United States Patent Application Publication US 2023/0026259 A1 - sequence listing, part 49

SEQ ID NO: 141051 - DNA, 5326 bp, Homo sapiens
  Payload ID: 7719
  Gene Symbol: HDAC5
  Gene Name: histone deacetylase 5
  Uniprot ID: Q9UQL6
  ENST ID: ENST00000225983
  CDS Start-End: 325-3696
gttgttggtggcggcggcgagcggagccggaggagccgccgcaaagatggaggagccgtcgaggaggtgctgccgccgctgccgccgccgctgctgccgccgccgcccgcgaagccggagctcgagccgcagcggggatgccgttctgagtgcctgactgcctcgccccgaaggatggcctcggatgggcattagaggcacggcggccccgggctcccgtcccgtccgtctgtctgttatcgtctgtctctcttgacatcaccgcagctccaccccctcccgtcccagcccccaacgccagcttcctgcaggcccagagccggcatgaactctcccaacgagtcggcagatgggatgtcaggtcgggaaccatccttggaaatcctgccgcggacttctctgcacagcatccctgtgacagtggaggtgaagccggtgctgccaagagccatgcccagttccatggggggtgggggtggaggcagccccagccctgtggagctacggggggctctggtgggctctgtggaccccacactgcgggagcagcaactgcagcaggagctcctggcgctcaagcagcagcagcagctgcagaagcagctcctgttcgctgagttccagaaacagcatgaccacctgacaaggcagcatgaggtccagctgcagaagcacctcaagcagcagcaggagatgctggcagccaagcagcagcaggagatgctggcagccaagcggcagcaggagctggagcagcagcggcagcgggagcagcagcggcaggaagagctggagaagcagcggctggagcagcagctgctcatcctgcggaacaaggagaagagcaaagagagtgccattgccagcactgaggtaaagctgaggctccaggaattcctcttgtcgaagtcaaaggagcccacaccaggcggcctcaaccattccctcccacagcaccccaaatgctggggagcccaccatgcttctttggaccagagttcccctccccagagcggcccccctgggacgcctccctcctacaaactgcctttgcctgggccctacgacagtcgagacgacttccccctccgcaaaacagcctctgaacccaacttgaaagtgcgttcaaggctaaaacagaaggtggctgagcggagaagcagtcccctcctgcgtcgcaaggatgggactgttattagcacctttaagaagagagctgttgagatcacaggtgccgggcctggggcgtcgtccgtgtgtaacagcgcacccggctccggccccagctctcccaacagctcccacagcaccatcgctgagaatggctttactggctcagtccccaacatccccactgagatgctccctcagcaccgagccctccctctggacagctcccccaaccagttcagcctctacacgtctccttctctgcccaacatctccctagggctgcaggccacggtcactgtcaccaactcacacctcactgcctccccgaagctgtcgacacagcaggaggccgagaggcaggccctccagtccctgcggcagggtggcacgctgaccggcaagttcatgagcacatcctctattcctggctgcctgctgggcgtggcactggagggcgacgggagcccccacgggcatgcctccctgctgcagcatgtgctgttgctggagcaggcccggcagcagagcaccctcattgctgtgccactccacgggcagtccccactagtgacgggtgaacgtgtggccaccagcatgcggacggtaggcaagctcccgcggcatcggcccctgagccgcactcagtcctcaccgctgccgcagagtccccaggccctgcagcagctggtcatgcaacaacagcaccagcagttcctggagaagcagaagcagcagcagctacagctgggcaagatcctcaccaagacaggggagctgcccaggcagcccaccacccaccctgaggagacagaggaggagctgacggagcagcaggaggtcttgctgggggagggagccctgaccatgccccgggagggctccacagagagtgagagcacacaggaagacctggaggaggaggacgaggaagacgatggggaggaggaggaggattgcatccaggttaaggacgaggagggcgagagtggtgctgaggaggggcccgacttggaggagcctggtgctggatacaaaaaactgttctcagatgcccagccgctgcagcctttgcaggtgtaccaggcgcccctcagcctggccactgtgccccaccaggccctgggccgtacccagtcctcccctgctgcccctgggggcatgaagagccccccagaccagcccgtcaagcacctcttcaccacaggtgtggtctacgacacgttcatgctaaagcaccagtgcatgtgcgggaacacacacgtgcaccctgagcatgctggccggatccagagcatctggtcccggctgcaggagacaggcctgcttagcaagtgcgagcggatccgaggtcgcaaagccacgctagatgagatccagacagtgcactctgaataccacaccctgctctatgggaccagtcccctcaaccggcagaagctagacagcaagaagttgctcggccccatcagccagaagatgtatgctgtgctgccttgtgggggcatcggggtggacagtgacaccgtgtggaatgagatgcactcctccagtgctgtgcgcatggcagtgggctgcctgctggagctggccttcaaggtggctgcaggagagctcaagaatggatttgccatcatccggcccccaggacaccacgccgaggaatccacagccatgggattctgcttcttcaactctgtagccatcaccgcaaaactcctacagcagaagttgaacgtgggcaaggtcctcatcgtggactgggacattcaccatggcaatggcacccagcaggcgttctacaatgacccctctgtgctctacatctctctgcatcgctatgacaacgggaacttctttccaggctctggggctcctgaagaggttggtggaggaccaggcgtggggtacaatgtgaacgtggcatggacaggaggtgtggacccccccattggagacgtggagtaccttacagccttcaggacagtggtgatgcccattgcccacgagttctcacctgatgtggtcctagtctccgccgggtttgatgctgttgaaggacatctgtctcctctgggtggctactctgtcaccgccagatgttttggccacttgaccaggcagctgatgaccctggcagggggccgggtggtgctggccctggagggaggccatgacttgaccgccatctgtgatgcctctgaggcttgtgtctcggctctgctcagtgtagagctgcagcccttggatgaggcagtcttgcagcaaaagcccaacatcaacgcagtggccacgctagagaaagtcatcgagatccagagcaaacactggagctgtgtgcagaagttcgccgctggtctgggccggtccctgcgagaggcccaagcaggtgagaccgaggaggccgagactgtgagcgccatggccttgctgtcggtgggggccgagcaggcccaggctgcggcagcccgggaacacagccccaggccggcagaggagcccatggagcaggagcctgccctgtgacgccccggcccccatccctctgggcttcaccattgtgattttgtttattttttctattaaaaacaaaaagtcacacattcaacaaggtgtgccgtgtgggtctctcagccttgcccctcctgctcctctacgctgcctcaggcccccagccctgtggcttccacctcagctctagaagcctgctccctctgcagggggtggtggtgtcttcccagccctgtcccatgtgtccctccccccattttcctgcattctgtctgtccttttcctccttggagcctgggccagctcaaggtgggcacgggggcccagacagtactctccagttctggggccccccgagtgaggagggaacgggaagtcggtgccttggtttcagctgatttggggggaaatgccttaatttcactctcctcccttctccagcctcaggggaggatctggaggatccactactgtctttaagatgcagagtggaggggaggtgggcacccaccctgcgattctccaccctttccccttctttcgtcctcaccatctctgcagacccctctcctcctccttcctcttggtctcagcactgatgggaggctggtgcccaagctgtggcctgcagtctgtgaggagggctgtcttgcctcacactcctcacagcctacttccccttccccggggctgagagggtgaaagtgtgtggggaaggagaggactggtttcctgggttctcaggggccaggaggagtaacagaaccaggtctgctccccaccttactcggatggcctccctgcccctctgctggcacagcctgggcaaggggagaaggtggtccctgcagaggggctccaggctggtgagagcccccctgctgtcaggaccagattttcccagccatccagcatgctgcggggagaaggggcagaggctcacctccctcctggggccttttgttttggatcctggggatggtgagaatggaggttctagaaggggtaaggccagaacccagggatccaggagtcggctctcagctggagcttccataccttctgggctccctttgctgaccaccagcccaagggagctaagaccaggagggggctgggcgctgtcccttctctttcccaggagccctgccaggggctgtgggcctacaaggcttccaggggatgccatccagcctgtaggaaaccaaagatgggaagtggctcctagggggctgactcttccttcctcctcctccccagtaccacatatactttctctccttctatctccagggccccaccaatctgtttacatatttattatcctatgggggcctgagcaggattgagggagccaggggaggggcaggagtcccagcaccatcggttcatagtgtgcttgtgtgtttgttttagatcctcctgggggatggggatggggccaggctcagtgtactaggcctctctgtgctgagccccaggctcccggccccttacccactctctccctgtggctggtctggttctcatgtaaacccactccttgctttgtctccctggatatggatttcagttaagtattttgtaacccgttacactgtgtgtccttgtgtaaataaacttgtttctggcagtgccttctggg

SEQ ID NO: 141052 - DNA, 5040 bp, Homo sapiens
  Payload ID: 7719
  Gene Symbol: HDAC5
  Gene Name: histone deacetylase 5
  Uniprot ID: Q9UQL6
  ENST ID: ENST00000336057
  CDS Start-End: 305-3418
gcggagccggaggagccgccgcaaagatggaggagccgtcgaggaggtgctgccgccgctgccgccgccgctgctgccgccgccgcccgcgaagccggagctcgagccgcagcggggatgccgttctgagtgcctgactgcctcgccccgaaggatggcctcggatgggcattagaggcacggcggccccgggctcccgtcccgtccgtctgtctgttatcgtctgtctctcttgacatcaccgcagctccaccccctcccgtcccagcccccaacgccagcttcctgcaggcccagagccggcatgaactctcccaacgagtcggatgggatgtcaggtcgggaaccatccttggaaatcctgccgcggacttctctgcacagcatccctgtgacagtggaggtgaagccggtgctgccaagagccatgcccagttccatggggggtgggggtggaggcagccccagccctgtggagctacggggggctctggtgggctctgtggaccccacactgcgggagcagcaactgcagcaggagctcctggcgctcaagcagcagcagcagctgcagaagcagctcctgttcgctgagttccagaaacagcatgaccacctgacaaggcagcatgaggtccagctgcagaagcacctcaagcagcagcaggagatgctggcagccaagcagcagcaggagatgctggcagccaagcggcagcaggagctggagcagcagcggcagcgggagcagcagcggcaggaagagctggagaagcagcggctggagcagcagctgctcatcctgcggaacaaggagaagagcaaagagagtgccattgccagcactgaggtaaagctgaggctccaggaattcctcttgtcgaagtcaaaggagcccacaccaggcggcctcaaccattccctcccacagcaccccaaatgctggggagcccaccatgcttctttggaccagagttcccctccccagagcggcccccctgggacgcctccctcctacaaactgcctttgcctgggccctacgacagtcgagacgacttccccctccgcaaaacagcctctgaacccaacttgaaagtgcgttcaaggctaaaacagaaggtggctgagcggagaagcagtcccctcctgcgtcgcaaggatgggactgttattagcacctttaagaagagagctgttgagatcacaggtgccgggcctggggcgtcgtccgtgtgtaacagcgcacccggctccggccccagctctcccaacagctcccacagcaccatcgctgagaatggctttactggctcagtccccaacatccccactgagatgctccctcagcaccgagccctccctctggacagctcccccaaccagttcagcctctacacgtctccttctctgcccaacatctccctagggctgcaggccacggtcactgtcaccaactcacacctcactgcctccccgaagctgtcgacacagcaggaggccgagaggcaggccctccagtccctgcggcagggtggcacgctgaccggcaagttcatgagcacatcctctattcctggctgcctgctgggcgtggcactggagggcgacgggagcccccacgggcatgcctccctgctgcagcatgtgctgttgctggagcaggcccggcagcagagcaccctcattgctgtgccactccacgggcagtccccactagtgacgggtgaacgtgtggccaccagcatgcggacggtaggcaagctcccgcggcatcggcccctgagccgcactcagtcctcaccgctgccgcagagtccccaggccctgcagcagctggtcatgcaacaacagcaccagcagttcctggagaagcagaagcagcagcagctacagctgggcaagatcctcaccaagacaggggagctgcccaggcagcccaccacccaccctgaggagacagaggaggagctgacggagcagcaggaggtcttgctgggggagggagccctgaccatgccccgggagggctccacagagagtgagagcacacaggaagacctggaggaggaggacgaggaagacgatggggaggaggaggaggattgcatccaggttaaggacgaggagggcgagagtggtgctgaggaggggcccgacttggaggagcctggtgctggatacaaaaaactgttctcagatgcccagccgctgcagcctttgcaggtgtaccaggcgcccctcagcctggccactgtgccccaccaggccctgggccgtacccagtcctcccctgctgcccctgggggcatgaagagccccccagaccagcccgtcaagcacctcttcaccacaggccccatcagccagaagatgtatgctgtgctgccttgtgggggcatcggggtggacagtgacaccgtgtggaatgagatgcactcctccagtgctgtgcgcatggcagtgggctgcctgctggagctggccttcaaggtggctgcaggagagctcaagaatggatttgccatcatccggcccccaggacaccacgccgaggaatccacagccatgggattctgcttcttcaactctgtagccatcaccgcaaaactcctacagcagaagttgaacgtgggcaaggtcctcatcgtggactgggacattcaccatggcaatggcacccagcaggcgttctacaatgacccctctgtgctctacatctctctgcatcgctatgacaacgggaacttctttccaggctctggggctcctgaagaggttggtggaggaccaggcgtggggtacaatgtgaacgtggcatggacaggaggtgtggacccccccattggagacgtggagtaccttacagccttcaggacagtggtgatgcccattgcccacgagttctcacctgatgtggtcctagtctccgccgggtttgatgctgttgaaggacatctgtctcctctgggtggctactctgtcaccgccagatgttttggccacttgaccaggcagctgatgaccctggcagggggccgggtggtgctggccctggagggaggccatgacttgaccgccatctgtgatgcctctgaggcttgtgtctcggctctgctcagtgtagagctgcagcccttggatgaggcagtcttgcagcaaaagcccaacatcaacgcagtggccacgctagagaaagtcatcgagatccagagcaaacactggagctgtgtgcagaagttcgccgctggtctgggccggtccctgcgagaggcccaagcaggtgagaccgaggaggccgagactgtgagcgccatggccttgctgtcggtgggggccgagcaggcccaggctgcggcagcccgggaacacagccccaggccggcagaggagcccatggagcaggagcctgccctgtgacgccccggcccccatccctctgggcttcaccattgtgattttgtttattttttctattaaaaacaaaaagtcacacattcaacaaggtgtgccgtgtgggtctctcagccttgcccctcctgctcctctacgctgcctcaggcccccagccctgtggcttccacctcagctctagaagcctgctccctctgcagggggtggtggtgtcttcccagccctgtcccatgtgtccctccccccattttcctgcattctgtctgtccttttcctccttggagcctgggccagctcaaggtgggcacgggggcccagacagtactctccagttctggggccccccgagtgaggagggaacgggaagtcggtgccttggtttcagctgatttggggggaaatgccttaatttcactctcctcccttctccagcctcaggggaggatctggaggatccactactgtctttaagatgcagagtggaggggaggtgggcacccaccctgcgattctccaccctttccccttctttcgtcctcaccatctctgcagacccctctcctcctccttcctcttggtctcagcactgatgggaggctggtgcccaagctgtggcctgcagtctgtgaggagggctgtcttgcctcacactcctcacagcctacttccccttccccggggctgagagggtgaaagtgtgtggggaaggagaggactggtttcctgggttctcaggggccaggaggagtaacagaaccaggtctgctccccaccttactcggatggcctccctgcccctctgctggcacagcctgggcaaggggagaaggtggtccctgcagaggggctccaggctggtgagagcccccctgctgtcaggaccagattttcccagccatccagcatgctgcggggagaaggggcagaggctcacctccctcctggggccttttgttttggatcctggggatggtgagaatggaggttctagaaggggtaaggccagaacccagggatccaggagtcggctctcagctggagcttccataccttctgggctccctttgctgaccaccagcccaagggagctaagaccaggagggggctgggcgctgtcccttctctttcccaggagccctgccaggggctgtgggcctacaaggcttccaggggatgccatccagcctgtaggaaaccaaagatgggaagtggctcctagggggctgactcttccttcctcctcctccccagtaccacatatactttctctccttctatctccagggccccaccaatctgtttacatatttattatcctatgggggcctgagcaggattgagggagccaggggaggggcaggagtcccagcaccatcggttcatagtgtgcttgtgtgtttgttttagatcctcctgggggatggggatggggccaggctcagtgtactaggcctctctgtgctgagccccaggctcccggccccttacccactctctccctgtggctggtctggttctcatgtaaacccactccttgctttgtctccctggatatggatttcagttaagtattttgtaacccgttacactgtgtgtccttgtgtaaataaacttgtttctggcagtgc

SEQ ID NO: 141053 - DNA, 846 bp, Homo sapiens
  Payload ID: 7719
  Gene Symbol: HDAC5
  Gene Name: histone deacetylase 5
  ENST ID: ENST00000588261
  CDS Start-End: 1-846
ggtaaagctgaggctccaggaattcctcttgtcgaagtcaaaggagcccacaccaggcggcctcaaccattccctcccacagcaccccaaatgctggggagcccaccatgcttctttggaccagagttcccctccccagagcggcccccctgggacgcctccctcctacaaactgcctttgcctgggccctacgacagtcgagacgacttccccctccgcaaaacagcgtcgtccgtgtgtaacagcgcacccggctccggccccagctctcccaacagctcccacagcaccatcgctgagaatggctttactggctcagtccccaacatccccactgagatgctccctcagcaccgagccctccctctggacagctcccccaaccagttcagcctctacacgtctccttctctgcccaacatctccctagggctgcaggccacggtcactgtcaccaactcacacctcactgcctccccgaagctgtcgacacagcaggaggccgagaggcaggccctccagtccctgcggcagggtggcacgctgaccggcaagttcatgagcacatcctctattcctggctgcctgctgggcgtggcactggagggcgacgggagcccccacgggcatgcctccctgctgcagcatgtgctgttgctggagcaggcccggcagcagagcaccctcattgctgtgccactccacgggcagtccccactagtgacgggtgaacgtgtggccaccagcatgcggacggtaggcaagctcccgcggcatcggcccctgagccgcactcagtcctcaccgctgccgcagagtccccaggccctgcagcagctggtcat

SEQ ID NO: 141054 - DNA, 445 bp, Homo sapiens
  Payload ID: 7719
  Gene Symbol: HDAC5
  Gene Name: histone deacetylase 5
  ENST ID: ENST00000588703
  CDS Start-End: 208-445
ggggtctgggtctatttttagctccgggtcgggtcacgtgacgggagtgacgtctccgaatgttgttgttggtggcggcggcgagcggagccggaggagccgccgcaaagatggaggagccgtcgaggaggtgctgccgccgctgccgccgccgctgctgccgccgccgcccgcgaagccggagctcgagccgcagcggcagatgggatgtcaggtcgggaaccatccttggaaatcctgccgcggacttctctgcacagcatccctgtgacagtggaggtgaagccggtgctgccaagagccatgcccagttccatggggggtgggggtggaggcagccccagccctgtggagctacggggggctctggtgggctctgtggaccccacactgcgggagcagcaactgcagcaggagctcctggcgctcaagcagcagcagcagc

SEQ ID NO: 141055 - DNA, 504 bp, Homo sapiens
  Payload ID: 7719
  Gene Symbol: HDAC5
  Gene Name: histone deacetylase 5
  ENST ID: ENST00000587135
  CDS Start-End: 384-504
gcggcggcgagcggagccggaggagccgccgcaaagatggaggagccgtcgaggaggtgctgccgccgctgccgccgccgctgctgccgccgccgcccgcgaagccggagctcgagccgcagcgggtgagcgcgccgccccggcccagatcccatcttccccggaccccgggacgcgaggcggcgccccctcctcctgctgtctctgtccgcgggctcccagcgcgcgcgccgcgctccgcgccccccttccttcctcccggccctgggagccagccggcgccccccgggagcatcggcagcccgtgagcgggacatcggggttgctgcgcgcgcccctccctgcccctcccagacaggggcgccttccctacagcagatgggatgtcaggtcgggaaccatccttggaaatcctgccgcggacttctctgcacagcatccctgtgacagtggaggtgaagccggtgctgccaagagccatgcccagttccatggggggtgggg

SEQ ID NO: 141056 - DNA, 3662 bp, Homo sapiens
  Payload ID: 7719
  Gene Symbol: HDAC5
  Gene Name: histone deacetylase 5
  Uniprot ID: Q9UQL6
  ENST ID: ENST00000586802
  CDS Start-End: 212-3580
gacaggggcgccttccctacagggatgccgttctgagtgcctgactgcctcgccccgaaggatggcctcggatgggcattagaggcacggcggccccgggctcccgtcccgtccgtctgtctgttatcgtctgtctctcttgacatcaccgcagctccaccccctcccgtcccagcccccaacgccagcttcctgcaggcccagagccggcatgaactctcccaacgagtcggatgggatgtcaggtcgggaaccatccttggaaatcctgccgcggacttctctgcacagcatccctgtgacagtggaggtgaagccggtgctgccaagagccatgcccagttccatggggggtgggggtggaggcagccccagccctgtggagctacggggggctctggtgggctctgtggaccccacactgcgggagcagcaactgcagcaggagctcctggcgctcaagcagcagcagcagctgcagaagcagctcctgttcgctgagttccagaaacagcatgaccacctgacaaggcagcatgaggtccagctgcagaagcacctcaagcagcagcaggagatgctggcagccaagcagcagcaggagatgctggcagccaagcggcagcaggagctggagcagcagcggcagcgggagcagcagcggcaggaagagctggagaagcagcggctggagcagcagctgctcatcctgcggaacaaggagaagagcaaagagagtgccattgccagcactgaggtaaagctgaggctccaggaattcctcttgtcgaagtcaaaggagcccacaccaggcggcctcaaccattccctcccacagcaccccaaatgctggggagcccaccatgcttctttggaccagagttcccctccccagagcggcccccctgggacgcctccctcctacaaactgcctttgcctgggccctacgacagtcgagacgacttccccctccgcaaaacagcctctgaacccaacttgaaagtgcgttcaaggctaaaacagaaggtggctgagcggagaagcagtcccctcctgcgtcgcaaggatgggactgttattagcacctttaagaagagagctgttgagatcacaggtgccgggcctggggcgtcgtccgtgtgtaacagcgcacccggctccggccccagctctcccaacagctcccacagcaccatcgctgagaatggctttactggctcagtccccaacatccccactgagatgctccctcagcaccgagccctccctctggacagctcccccaaccagttcagcctctacacgtctccttctctgcccaacatctccctagggctgcaggccacggtcactgtcaccaactcacacctcactgcctccccgaagctgtcgacacagcaggaggccgagaggcaggccctccagtccctgcggcagggtggcacgctgaccggcaagttcatgagcacatcctctattcctggctgcctgctgggcgtggcactggagggcgacgggagcccccacgggcatgcctccctgctgcagcatgtgctgttgctggagcaggcccggcagcagagcaccctcattgctgtgccactccacgggcagtccccactagtgacgggtgaacgtgtggccaccagcatgcggacggtaggcaagctcccgcggcatcggcccctgagccgcactcagtcctcaccgctgccgcagagtccccaggccctgcagcagctggtcatgcaacaacagcaccagcagttcctggagaagcagaagcagcagcagctacagctgggcaagatcctcaccaagacaggggagctgcccaggcagcccaccacccaccctgaggagacagaggaggagctgacggagcagcaggaggtcttgctgggggagggagccctgaccatgccccgggagggctccacagagagtgagagcacacaggaagacctggaggaggaggacgaggaagacgatggggaggaggaggaggattgcatccaggttaaggacgaggagggcgagagtggtgctgaggaggggcccgacttggaggagcctggtgctggatacaaaaaactgttctcagatgcccagccgctgcagcctttgcaggtgtaccaggcgcccctcagcctggccactgtgccccaccaggccctgggccgtacccagtcctcccctgctgcccctgggggcatgaagagccccccagaccagcccgtcaagcacctcttcaccacaggtgtggtctacgacacgttcatgctaaagcaccagtgcatgtgcgggaacacacacgtgcaccctgagcatgctggccggatccagagcatctggtcccggctgcaggagacaggcctgcttagcaagtgcgagcggatccgaggtcgcaaagccacgctagatgagatccagacagtgcactctgaataccacaccctgctctatgggaccagtcccctcaaccggcagaagctagacagcaagaagttgctcggccccatcagccagaagatgtatgctgtgctgccttgtgggggcatcggggtggacagtgacaccgtgtggaatgagatgcactcctccagtgctgtgcgcatggcagtgggctgcctgctggagctggccttcaaggtggctgcaggagagctcaagaatggatttgccatcatccggcccccaggacaccacgccgaggaatccacagccatgggattctgcttcttcaactctgtagccatcaccgcaaaactcctacagcagaagttgaacgtgggcaaggtcctcatcgtggactgggacattcaccatggcaatggcacccagcaggcgttctacaatgacccctctgtgctctacatctctctgcatcgctatgacaacgggaacttctttccaggctctggggctcctgaagaggttggtggaggaccaggcgtggggtacaatgtgaacgtggcatggacaggaggtgtggacccccccattggagacgtggagtaccttacagccttcaggacagtggtgatgcccattgcccacgagttctcacctgatgtggtcctagtctccgccgggtttgatgctgttgaaggacatctgtctcctctgggtggctactctgtcaccgccagatgttttggccacttgaccaggcagctgatgaccctggcagggggccgggtggtgctggccctggagggaggccatgacttgaccgccatctgtgatgcctctgaggcttgtgtctcggctctgctcagtgtagagctgcagcccttggatgaggcagtcttgcagcaaaagcccaacatcaacgcagtggccacgctagagaaagtcatcgagatccagagcaaacactggagctgtgtgcagaagttcgccgctggtctgggccggtccctgcgagaggcccaagcaggtgagaccgaggaggccgagactgtgagcgccatggccttgctgtcggtgggggccgagcaggcccaggctgcggcagcccgggaacacagccccaggccggcagaggagcccatggagcaggagcctgccctgtgacgccccggcccccatccctctgggcttcaccattgtgattttgtttattttttctattaaaaacaaaaagtcacacattcaa

SEQ ID NO: 141057 - DNA, 667 bp, Homo sapiens
  Payload ID: 7719
  Gene Symbol: HDAC5
  Gene Name: histone deacetylase 5
  ENST ID: ENST00000591714
  CDS Start-End: 463-667
gggcctcctggcagcccgcccgcagctccctgagcatgctccacctatttatagacagggccctcccccaactgctatttcagtctcctgccagctgccggcggcggctcattcgggaaggaggagcagggagccgggcccagagctgtcacccagggttgggagggaacacagagcccgcctgcccgctgagctccccttcctgtcccaagtgctcagccataccccagctcccaggaaccagggagaggctggtggtcggatgcccctctagagcagagctgggcctgcagctctagggcctccctgcccctcctgccgccaggagtgcccaggccggatgaggcacttccctacagtgtgggtcccgtcggcagtggcctgagggaacctgtgctgtgcgggctgcccgaccaccttcccttcggtctgctccccgcctctggcggccccctccctggcatgctgctggtgcccaaggctcaggggctcgtggagatgctgcagaccatctatgagacagaatcctgtttctcagcagatgggatgtcaggtcgggaaccatccttggaaatcctgccgcggacttctctgcacagcatccctgtgacagtggaggtgaagccggtgctgccaagagccatgcccagttccatggggggtgggg

SEQ ID NO: 141058 - DNA, 4190 bp, Homo sapiens
  Payload ID: 7720
  Gene Symbol: HDAC6
  Gene Name: histone deacetylase 6
  Uniprot ID: Q9UBN7
  ENST ID: ENST00000334136
  CDS Start-End: 179-3826
gaaggcggctagggactggctgaagagggttagcgaaacgttagcggtcgggtctgggcagggggtggagctggttgaaggaacggggcagtcccctgaggagcggggctggttgaaacgctaggggcgggatctggcggagtggaagaaccgcggcaggggccaagcctcctcaactatgacctcaaccggccaggattccaccacaaccaggcagcgaagaagtaggcagaacccccagtcgccccctcaggactccagtgtcacttcgaagcgaaatattaaaaagggagccgttccccgctctatccccaatctagcggaggtaaagaagaaaggcaaaatgaagaagctcggccaagcaatggaagaagacctaatcgtgggactgcaagggatggatctgaaccttgaggctgaagcactggctggcactggcttggtgttggatgagcagttaaatgaattccattgcctctgggatgacagcttcccggaaggccctgagcggctccatgccatcaaggagcaactgatccaggagggcctcctagatcgctgcgtgtcctttcaggcccggtttgctgaaaaggaagagctgatgttggttcacagcctagaatatattgatctgatggaaacaacccagtacatgaatgagggagaactccgtgtcctagcagacacctacgactcagtttatctgcatccgaactcatactcctgtgcctgcctggcctcaggctctgtcctcaggctggtggatgcggtcctgggggctgagatccggaatggcatggccatcattaggcctcctggacatcacgcccagcacagtcttatggatggctattgcatgttcaaccacgtggctgtggcagcccgctatgctcaacagaaacaccgcatccggagggtccttatcgtagattgggatgtgcaccacggtcaaggaacacagttcaccttcgaccaggaccccagtgtcctctatttctccatccaccgctacgagcagggtaggttctggccccacctgaaggcctctaactggtccaccacaggtttcggccaaggccaaggatataccatcaatgtgccttggaaccaggtggggatgcgggatgctgactacattgctgctttcctgcacgtcctgctgccagtcgccctcgagttccagcctcagctggtcctggtggctgctggatttgatgccctgcaaggggaccccaagggtgagatggccgccactccggcagggttcgcccagctaacccacctgctcatgggtctggcaggaggcaagctgatcctgtctctggagggtggctacaacctccgcgccctggctgaaggcgtcagtgcttcgctccacacccttctgggagacccttgccccatgctggagtcacctggtgccccctgccggagtgcccaggcttcagtttcctgtgctctggaagcccttgagcccttctgggaggttcttgtgagatcaactgagaccgtggagagggacaacatggaggaggacaatgtagaggagagcgaggaggaaggaccctgggagccccctgtgctcccaatcctgacatggccagtgctacagtctcgcacagggctggtctatgaccaaaatatgatgaatcactgcaacttgtgggacagccaccaccctgaggtaccccagcgcatcttgcggatcatgtgccgtctggaggagctgggccttgccgggcgctgcctcaccctgacaccgcgccctgccacagaggctgagctgctcacctgtcacagtgctgagtacgtgggtcatctccgggccacagagaaaatgaaaacccgggagctgcaccgtgagagttccaactttgactccatctatatctgccccagtaccttcgcctgtgcacagcttgccactggcgctgcctgccgcctggtggaggctgtgctctcaggagaggttctgaatggtgctgctgtggtgcgtcccccaggacaccacgcagagcaggatgcagcttgcggtttttgctttttcaactctgtggctgtggctgctcgccatgcccagactatcagtgggcatgccctacggatcctgattgtggattgggatgtccaccacggtaatggaactcagcacatgtttgaggatgaccccagtgtgctatatgtgtccctgcaccgctatgatcatggcaccttcttccccatgggggatgagggtgccagcagccagatcggccgggctgcgggcacaggcttcaccgtcaacgtggcatggaacgggccccgcatgggtgatgctgactacctagctgcctggcatcgcctggtgcttcccattgcctacgagtttaacccagaactggtgctggtctcagctggctttgatgctgcacggggggatccgctggggggctgccaggtgtcacctgagggttatgcccacctcacccacctgctgatgggccttgccagtggccgcattatccttatcctagagggtggctataacctgacatccatctcagagtccatggctgcctgcactcgctccctccttggagacccaccacccctgctgaccctgccacggcccccactatcaggggccctggcctcaatcactgagaccatccaagtccatcgcagatactggcgcagcttacgggtcatgaaggtagaagacagagaaggaccctccagttctaagttggtcaccaagaaggcaccccaaccagccaaacctaggttagctgagcggatgaccacacgagaaaagaaggttctggaagcaggcatggggaaagtcacctcggcatcatttggggaagagtccactccaggccagactaactcagagacagctgtggtggccctcactcaggaccagccctcagaggcagccacagggggagccactctggcccagaccatttctgaggcagccattgggggagccatgctgggccagaccacctcagaggaggctgtcgggggagccactccggaccagaccacctcagaggagactgtgggaggagccattctggaccagaccacctcagaggatgctgttgggggagccacgctgggccagactacctcagaggaggctgtaggaggagctacactggcccagaccacctcggaggcagccatggagggagccacactggaccagactacgtcagaggaggctccagggggcaccgagctgatccaaactcctctagcctcgagcacagaccaccagacccccccaacctcacctgtgcagggaactacaccccagatatctcccagtacactgattgggagtctcaggaccttggagctaggcagcgaatctcagggggcctcagaatctcaggccccaggagaggagaacctactaggagaggcagctggaggtcaggacatggctgattcgatgctgatgcagggatctaggggcctcactgatcaggccatattttatgctgtgacaccactgccctggtgtccccatttggtggcagtatgccccatacctgcagcaggcctagacgtgacccaaccttgtggggactgtggaacaatccaagagaattgggtgtgtctctcttgctatcaggtctactgtggtcgttacatcaatggccacatgctccaacaccatggaaattctggacacccgctggtcctcagctacatcgacctgtcagcctggtgttactactgtcaggcctatgtccaccaccaggctctcctagatgtgaagaacatcgcccaccagaacaagtttggggaggatatgccccacccacactaagccccagaatacggtccctcttcaccttctgaggcccacgatagaccagctgtagctcattccagcctgtaccttggatgaggggtagcctcccactgcatcccatcctgaatatcctttgcaactccccaagagtgcttatttaagtgttaatacttttaagagaactgcgacgattaattgtggatctccccctgcccattgcctgcttgaggggcaccactactccagcccagaaggaaaggggggcagctcagtggccccaagagggagctgatatcatgaggataacattggcgggaggggagttaactggcaggcatggcaaggttgcatatgtaataaagtacaagctgttaaaaaa

SEQ ID NO: 141059 - DNA, 736 bp, Homo sapiens
  Payload ID: 7720
  Gene Symbol: HDAC6
  Gene Name: histone deacetylase 6
  ENST ID: ENST00000376610
  CDS Start-End: 105-736
gtacagcgcgtcgacggcggaggcgggaagggggcggaggccgaccgaaggcggctagggactggctgaagaggaaccgcggcaggggccaagcctcctcaactatgacctcaaccggccaggattccaccacaaccaggcagcgaagaagtaggcagaacccccagtcgccccctcaggactccagtgtcacttcgaagcgaaatattaaaaagggagccgttccccgctctatccccaatctagcggaggtaaagaagaaaggcaaaatgaagaagctcggccaagcaatggaagaagacctaatcgtgggactgcaagggatggatctgaaccttgaggctgaagcactggctggcactggcttggtgttggatgagcagttaaatgaattccattgcctctgggatgacagcttcccggaaggccctgagcggctccatgccatcaaggagcaactgatccaggagggcctcctagatcgctgcgtgtcctttcaggcccggtttgctgaaaaggaagagctgatgttggttcacagcctagaatatattgatctgatggaaacaacccagtacatgaatgagggagaactccgtgtcctagcagacacctacgactcagtttatctgcatccgaactcatactcctgtgcctgcctggcctcaggctctgtcctcaggctggtggatgcggtcctgggggctgagatccggaatggcatggccatcattag

SEQ ID NO: 141060 - DNA, 4179 bp, Homo sapiens
  Payload ID: 7720
  Gene Symbol: HDAC6
  Gene Name: histone deacetylase 6
  Uniprot ID: Q9UBN7
  ENST ID: ENST00000376619
  CDS Start-End: 168-3815
gttagcggtcgggtctgggcagggggtggagctggttgaaggaacggggcagtcccctgaggagcggggctggttgaaacgctaggggcgggatctggcggagtggaaggtaccggtccggcccgataaggggtggaaaccgcggcaggggccaagcctcctcaactatgacctcaaccggccaggattccaccacaaccaggcagcgaagaagtaggcagaacccccagtcgccccctcaggactccagtgtcacttcgaagcgaaatattaaaaagggagccgttccccgctctatccccaatctagcggaggtaaagaagaaaggcaaaatgaagaagctcggccaagcaatggaagaagacctaatcgtgggactgcaagggatggatctgaaccttgaggctgaagcactggctggcactggcttggtgttggatgagcagttaaatgaattccattgcctctgggatgacagcttcccggaaggccctgagcggctccatgccatcaaggagcaactgatccaggagggcctcctagatcgctgcgtgtcctttcaggcccggtttgctgaaaaggaagagctgatgttggttcacagcctagaatatattgatctgatggaaacaacccagtacatgaatgagggagaactccgtgtcctagcagacacctacgactcagtttatctgcatccgaactcatactcctgtgcctgcctggcctcaggctctgtcctcaggctggtggatgcggtcctgggggctgagatccggaatggcatggccatcattaggcctcctggacatcacgcccagcacagtcttatggatggctattgcatgttcaaccacgtggctgtggcagcccgctatgctcaacagaaacaccgcatccggagggtccttatcgtagattgggatgtgcaccacggtcaaggaacacagttcaccttcgaccaggaccccagtgtcctctatttctccatccaccgctacgagcagggtaggttctggccccacctgaaggcctctaactggtccaccacaggtttcggccaaggccaaggatataccatcaatgtgccttggaaccaggtggggatgcgggatgctgactacattgctgctttcctgcacgtcctgctgccagtcgccctcgagttccagcctcagctggtcctggtggctgctggatttgatgccctgcaaggggaccccaagggtgagatggccgccactccggcagggttcgcccagctaacccacctgctcatgggtctggcaggaggcaagctgatcctgtctctggagggtggctacaacctccgcgccctggctgaaggcgtcagtgcttcgctccacacccttctgggagacccttgccccatgctggagtcacctggtgccccctgccggagtgcccaggcttcagtttcctgtgctctggaagcccttgagcccttctgggaggttcttgtgagatcaactgagaccgtggagagggacaacatggaggaggacaatgtagaggagagcgaggaggaaggaccctgggagccccctgtgctcccaatcctgacatggccagtgctacagtctcgcacagggctggtctatgaccaaaatatgatgaatcactgcaacttgtgggacagccaccaccctgaggtaccccagcgcatcttgcggatcatgtgccgtctggaggagctgggccttgccgggcgctgcctcaccctgacaccgcgccctgccacagaggctgagctgctcacctgtcacagtgctgagtacgtgggtcatctccgggccacagagaaaatgaaaacccgggagctgcaccgtgagagttccaactttgactccatctatatctgccccagtaccttcgcctgtgcacagcttgccactggcgctgcctgccgcctggtggaggctgtgctctcaggagaggttctgaatggtgctgctgtggtgcgtcccccaggacaccacgcagagcaggatgcagcttgcggtttttgctttttcaactctgtggctgtggctgctcgccatgcccagactatcagtgggcatgccctacggatcctgattgtggattgggatgtccaccacggtaatggaactcagcacatgtttgaggatgaccccagtgtgctatatgtgtccctgcaccgctatgatcatggcaccttcttccccatgggggatgagggtgccagcagccagatcggccgggctgcgggcacaggcttcaccgtcaacgtggcatggaacgggccccgcatgggtgatgctgactacctagctgcctggcatcgcctggtgcttcccattgcctacgagtttaacccagaactggtgctggtctcagctggctttgatgctgcacggggggatccgctggggggctgccaggtgtcacctgagggttatgcccacctcacccacctgctgatgggccttgccagtggccgcattatccttatcctagagggtggctataacctgacatccatctcagagtccatggctgcctgcactcgctccctccttggagacccaccacccctgctgaccctgccacggcccccactatcaggggccctggcctcaatcactgagaccatccaagtccatcgcagatactggcgcagcttacgggtcatgaaggtagaagacagagaaggaccctccagttctaagttggtcaccaagaaggcaccccaaccagccaaacctaggttagctgagcggatgaccacacgagaaaagaaggttctggaagcaggcatggggaaagtcacctcggcatcatttggggaagagtccactccaggccagactaactcagagacagctgtggtggccctcactcaggaccagccctcagaggcagccacagggggagccactctggcccagaccatttctgaggcagccattgggggagccatgctgggccagaccacctcagaggaggctgtcgggggagccactccggaccagaccacctcagaggagactgtgggaggagccattctggaccagaccacctcagaggatgctgttgggggagccacgctgggccagactacctcagaggaggctgtaggaggagctacactggcccagaccacctcggaggcagccatggagggagccacactggaccagactacgtcagaggaggctccagggggcaccgagctgatccaaactcctctagcctcgagcacagaccaccagacccccccaacctcacctgtgcagggaactacaccccagatatctcccagtacactgattgggagtctcaggaccttggagctaggcagcgaatctcagggggcctcagaatctcaggccccaggagaggagaacctactaggagaggcagctggaggtcaggacatggctgattcgatgctgatgcagggatctaggggcctcactgatcaggccatattttatgctgtgacaccactgccctggtgtccccatttggtggcagtatgccccatacctgcagcaggcctagacgtgacccaaccttgtggggactgtggaacaatccaagagaattgggtgtgtctctcttgctatcaggtctactgtggtcgttacatcaatggccacatgctccaacaccatggaaattctggacacccgctggtcctcagctacatcgacctgtcagcctggtgttactactgtcaggcctatgtccaccaccaggctctcctagatgtgaagaacatcgcccaccagaacaagtttggggaggatatgccccacccacactaagccccagaatacggtccctcttcaccttctgaggcccacgatagaccagctgtagctcattccagcctgtaccttggatgaggggtagcctcccactgcatcccatcctgaatatcctttgcaactccccaagagtgcttatttaagtgttaatacttttaagagaactgcgacgattaattgtggatctccccctgcccattgcctgcttgaggggcaccactactccagcccagaaggaaaggggggcagctcagtggccccaagagggagctgatatcatgaggataacattggcgggaggggagttaactggcaggcatggcaaggttgcatatgtaataaagtacaagctgttaaaaaa

SEQ ID NO: 141061 - DNA, 907 bp, Homo sapiens
  Payload ID: 7720
  Gene Symbol: HDAC6
  Gene Name: histone deacetylase 6
  ENST ID: ENST00000376643
  CDS Start-End: 276-907
agctggcgtagcacgccgacgcaccgccccgccgcttgtgagctcgcgagaggtgtggctcgcgcgaggggcgcggccttgaggcacggtcccctctggaggcgggatctgggcgggcagtcgagagacgaggcccaatggaaaagaaaagcctgagcgctcgcgtccccacaggtcgccagaaacttggtggagcgagccaagggcggagtttgagaaaggggctgcgtccaatgagtggagcgaaccgcggcaggggccaagcctcctcaactatgacctcaaccggccaggattccaccacaaccaggcagcgaagaagtaggcagaacccccagtcgccccctcaggactccagtgtcacttcgaagcgaaatattaaaaagggagccgttccccgctctatccccaatctagcggaggtaaagaagaaaggcaaaatgaagaagctcggccaagcaatggaagaagacctaatcgtgggactgcaagggatggatctgaaccttgaggctgaagcactggctggcactggcttggtgttggatgagcagttaaatgaattccattgcctctgggatgacagcttcccggaaggccctgagcggctccatgccatcaaggagcaactgatccaggagggcctcctagatcgctgcgtgtcctttcaggcccggtttgctgaaaaggaagagctgatgttggttcacagcctagaatatattgatctgatggaaacaacccagtacatgaatgagggagaactccgtgtcctagcagacacctacgactcagtttatctgcatccgaactcatactcctgtgcctgcctggcctcaggctctgtcctcaggctggtggatgcggtcctgggggctgagatccggaatggcatggccatcattag

SEQ ID NO: 141062 - DNA, 583 bp, Homo sapiens
  Payload ID: 7720
  Gene Symbol: HDAC6
  Gene Name: histone deacetylase 6
  ENST ID: ENST00000423941
  CDS Start-End: 157-583
agcccgcccgcgctacgtcatcacggcgcgtcgcgcgggaagtcgcggggaaaaggtcgccagaaacttggtggagcgagccaagggcggagtttgagaaaggggctgcgtccaatgagtggagcgaaccgcggcaggggccaagcctcctcaactatgacctcaaccggccaggattccaccacaaccaggcagcgaagaagtaggcagaacccccagtcgccccctcaggactccagtgtcacttcgaagcgaaatattaaaaagggagccgttccccgctctatccccaatctagcggaggtaaagaagaaaggcaaaatgaagaagctcggccaagcaatggaagaagacctaatcgtgggactgcaagggatggatctgaaccttgaggctgaagcactggctggcactggcttggtgttggatgagcagttaaatgaattccattgcctctgggatgacagcttcccggaaggccctgagcggctccatgccatcaaggagcaactgatccaggagggcctcctagatcgctgcgtgtcctttcaggcccggtttgctgaaaaggaagagctgatgt

SEQ ID NO: 141063 - DNA, 599 bp, Homo sapiens
  Payload ID: 7720
  Gene Symbol: HDAC6
  Gene Name: histone deacetylase 6
  ENST ID: ENST00000441703
  CDS Start-End: 117-599
agggtggagtcgaaaccggggtcggggccggggccggctgagtgaaagggtgggtgattatcccgggagataggccgaaagggcagaaccgcggcaggggccaagcctcctcaactatgacctcaaccggccaggattccaccacaaccaggcagcgaagaagtaggcagaacccccagtcgccccctcaggactccagtgtcacttcgaagcgaaatattaaaaagggagccgttccccgctctatccccaatctagcggaggtaaagaagaaaggcaaaatgaagaagctcggccaagcaatggaagaagacctaatcgtgggactgcaagggatggatctgaaccttgaggctgaagcactggctggcactggcttggtgttggatgagcagttaaatgaattccattgcctctgggatgacagcttcccggaaggccctgagcggctccatgccatcaaggagcaactgatccaggagggcctcctagatcgctgcgtgtcctttcaggcccggtttgctgaaaaggaagagctgatgttggttcacagcctagaatatattgatctgatggaaacaacccagtacatgaatgag

SEQ ID NO: 141064 - DNA, 658 bp, Homo sapiens
  Payload ID: 7720
  Gene Symbol: HDAC6
  Gene Name: histone deacetylase 6
  ENST ID: ENST00000440653
  CDS Start-End: 144-658
gcgtaaggaatggaatctaatagagggggcggagcctggaaaagggcagagaggtggggtcctcagggcacactagccccctcacatacccacgctcctccccccacccccagaaccgcggcaggggccaagcctcctcaactatgacctcaaccggccaggattccaccacaaccaggcagcgaagaagtaggcagaacccccagtcgccccctcaggactccagtgtcacttcgaagcgaaatattaaaaagggagccgttccccgctctatccccaatctagcggaggtaaagaagaaaggcaaaatgaagaagctcggccaagcaatggaagaagacctaatcgtgggactgcaagggatggatctgaaccttgaggctgaagcactggctggcactggcttggtgttggatgagcagttaaatgaattccattgcctctgggatgacagcttcccggaaggccctgagcggctccatgccatcaaggagcaactgatccaggagggcctcctagatcgctgcgtgtcctttcaggcccggtttgctgaaaaggaagagctgatgttggttcacagcctagaatatattgatctgatggaaacaacccagtacatgaatgagggagaactccgtgtcctagcagacacctacga

SEQ ID NO: 141065 - DNA, 618 bp, Homo sapiens
  Payload ID: 7720
  Gene Symbol: HDAC6
  Gene Name: histone deacetylase 6
  ENST ID: ENST00000430858
  CDS Start-End: 1-254
ctacaccccagatatctcccagtacactgattgggagtctcaggaccttggagctaggcagcgaatctcagggggcctcagaatctcaggccccaggagaggagaacctactaggagaggcagctggaggtcaggacatggctgattcgatgctgatgcagggatctaggggcctcactgatcaggctctcctagatgtgaagaacatcgcccaccagaacaagtttggggaggatatgccccacccacactaagccccagaatacggtccctcttcaccttctgaggcccacgatagaccagctgtagctcattccagcctgtaccttggatgaggggtagcctcccactgcatcccatcctgaatatcctttgcaactccccaagagtgcttatttaagtgttaatacttttaagagaactgcgacgattaattgtggatctccccctgcccattgcctgcttgaggggcaccactactccagcccagaaggaaaggggggcagctcagtggccccaagagggagctgatatcatgaggataacattggcgggaggggagttaactggcaggcatggcaaggttgcatatgtaataaagtacaagctgttaaaaaa

SEQ ID NO: 141066 - DNA, 882 bp, Homo sapiens
  Payload ID: 7720
  Gene Symbol: HDAC6
  Gene Name: histone deacetylase 6
  ENST ID: ENST00000426196
  CDS Start-End: 75-882
ggagtcgaaaccggggtcggggccggggccggctgagtgaaaggaaccgcggcaggggccaagcctcctcaactatgacctcaaccggccaggattccaccacaaccaggcagcgaagaagtaggcagaacccccagtcgccccctcaggactccagtgtcacttcgaagcgaaatattaaaaagggagccgttccccgctctatccccaatctagcggaggtaaagaagaaaggcaaaatgaagaagctcggccaagcaatggaagaagacctaatcgtgggactgcaagggatggatctgaaccttgaggctgaagcactggctggcactggcttggtgttggatgagcagttaaatgaattccattgcctctgggatgacagcttcccggaaggccctgagcggctccatgccatcaaggagcaactgatccaggagggcctcctagatcgctgcgtgtcctttcaggcccggtttgctgaaaaggaagagctgatgttggttcacagcctagaatatattgatctgatggaaacaacccagtacatgaatgagggagaactccgtgtcctagcagacacctacgactcagtttatctgcatccgaactcatactcctgtgcctgcctggcctcaggctctgtcctcaggctggtggatgcggtcctgggggctgagatccggaatggcatggccatcattaggcctcctggacatcacgcccagcacagtcttatggatggctattgcatgttcaaccacgtggctgtggcagcccgctatgctcaacagaaacaccgcatccggagggtccttatcgtagattgggatgtgcaccacggtcaaggaacacagttcaccttcgaccaggaccccaggt

SEQ ID NO: 141067 - DNA, 568 bp, Homo sapiens
  Payload ID: 7720
  Gene Symbol: HDAC6
  Gene Name: histone deacetylase 6
  ENST ID: ENST00000443563
  CDS Start-End: 68-568
gaggcggagtttggaaggctgtggagaatcagatcgcaaccgcggcaggggccaagcctcctcaactatgacctcaaccggccaggattccaccacaaccaggcagcgaagaagtaggcagaacccccagtcgccccctcaggactccagtgtcacttcgaagcgaaatattaaaaagggagccgttccccgctctatccccaatctagcggaggtaaagaagaaaggcaaaatgaagaagctcggccaagcaatggaagaagacctaatcgtgggactgcaagggatggatctgaaccttgaggctgaagcactggctggcactggcttggtgttggatgagcagttaaatgaattccattgcctctgggatgacagcttcccggaaggccctgagcggctccatgccatcaaggagcaactgatccaggagggcctcctagatcgctgcgtgtcctttcaggcccggtttgctgaaaaggaagagctgatgttggttcacagcctagaatatattgatctgatggaaacaacccagtacatgaatgagggagaactccgtgtccta

SEQ ID NO: 141068 - DNA, 610 bp, Homo sapiens
  Payload ID: 7720
  Gene Symbol: HDAC6
  Gene Name: histone deacetylase 6
  ENST ID: ENST00000438518
  CDS Start-End: 458-610
atcacggcgcgtcgcgcgggaagtcgcggggaaaaggtaagatgccccttcctaattccctcgcttccttgcttgctctccagacaccgccgacccgaagggctcctaagtgactggacagggacggaggggcggcggctatggcatccgggacgacagcgacgatagccgaggcaagaaaaagcttgcaccgcagccctgtcgggaaccgccggcgcctgccttttacgtaggcgcagcacagctggcgtagcacgccgacgcaccgccccgtcgcctgtgagctcgcggtgtggctcagcccagctggcgtagcacgccgacgcaccgccccgccgcttgtgagctcgcgagaggtcgccagaaacttggtggagcgagccaagggcggagtttgagaaaggggctgcgtccaatgagtggagcgaaccgcggcaggggccaagcctcctcaactatgacctcaaccggccaggattccaccacaaccaggcagcgaagaagtaggcagaacccccagtcgccccctcaggactccagtgtcacttcgaagcgaaatattaaaaagggagccgttccccgctctatccccaatctagcggaggtaaag

SEQ ID NO: 141069 - DNA, 4095 bp, Homo sapiens
  Payload ID: 7721
  Gene Symbol: HDAC7
  Gene Name: histone deacetylase 7
  Uniprot ID: Q8WUI4
  ENST ID: ENST00000080059
  CDS Start-End: 1-2976
atgcacagccccggcgctgatgggacccaggtgagcccgggtgcccactactgcagccccactggcgcaggctgccccaggccctgtgcagacacaccaggccctcagccgcagcccatggacctgcgggtgggccagcggcccccagtggagcccccaccagagcccacattgctggccctgcagcgtccccagcgcctgcaccaccacctcttcctagcaggcctgcagcagcagcgctcggtggagcccatgaggctctccatggacacgccgatgcccgagttgcaggtgggaccccaggaacaagagctgcggcagcttctccacaaggacaagagcaagcgaagtgctgtagccagcagcgtggtcaagcagaagctagcggaggtgattctgaaaaaacagcaggcggccctagaaagaacagtccatcccaacagccccggcattccctacagaaccctggagcccctggagacggaaggagccacccgctccatgctcagcagctttttgcctcctgttcccagcctgcccagtgaccccccagagcacttccctctgcgcaagacagtctctgagcccaacctgaagctgcgctataagcccaagaagtccctggagcggaggaagaatccactgctccgaaaggagagtgcgccccccagcctccggcggcggcccgcagagaccctcggagactcctccccaagtagtagcagcacgcccgcatcagggtgcagctcccccaatgacagcgagcacggccccaatcccatcctgggctcggaggcgctcttgggccagcggctgcggctgcaggagacttctgtggccccgttcgccttgccgacagtgtccttgctgcccgcaatcactctggggctgcccgcccctgccagggctgacagtgaccgcaggacccatccgactctgggccctcgggggccaatcctggggagcccccacactcccctcttcctgccccatggcttggagcccgaggctgggggcaccttgccctctcgcctgcagcccattctcctcctggacccctcaggctctcatgccccgctgctgactgtgcccgggcttgggcccttgcccttccactttgcccagtccttaatgaccaccgagcggctctctgggtcaggcctccactggccactgagccggactcgctcagagcccctgccccccagtgccaccgctcccccaccgccgggccccatgcagccccgcctggagcagctcaaaactcacgtccaggtgatcaagaggtcagccaagccgagtgagaagccccggctgcggcagataccctcggctgaagacctggagacagatggcgggggaccgggccaggtggtggacgatggcctggagcacagggagctgggccatgggcagcctgaggccagaggccccgctcctctccagcagcaccctcaggtgttgctctgggaacagcagcgactggctgggcggctcccccggggcagcaccggggacactgtgctgcttcctctggcccagggtgggcaccggcctctgtcccgggctcagtcttccccagccgcacctgcctcactgtcagccccagagcctgccagccaggcccgagtcctctccagctcagagacccctgccaggaccctgcccttcaccacagggctgatctatgactcggtcatgctgaagcaccagtgctcctgcggtgacaacagcaggcacccggagcacgccggccgcatccagagcatctggtcccggctgcaggagcgggggctccggagccagtgtgagtgtctccgaggccggaaggcctccctggaagagctgcagtcggtccactctgagcggcacgtgctcctctacggcaccaacccgctcagccgcctcaaactggacaacgggaagctggcagggctcctggcacagcggatgtttgtgatgctgccctgtggtggggttggggtggacactgacaccatctggaatgagcttcattcctccaatgcagcccgctgggccgctggcagtgtcactgacctcgccttcaaagtggcttctcgtgagctaaagaatggtttcgctgtggtgcggcccccaggacaccatgcagatcattcaacagccatgggcttctgcttcttcaactcagtggccatcgcctgccggcagctgcaacagcagagcaaggccagcaagatcctcattgtagactgggacgtgcaccatggcaacggcacccagcaaaccttctaccaagaccccagtgtgctctacatctccctgcatcgccatgacgacggcaacttcttcccggggagtggggctgtggatgaggtaggggctggcagcggtgagggcttcaatgtcaatgtggcctgggctggaggtctggacccccccatgggggatcctgagtacctggctgctttcaggatagtcgtgatgcccatcgcccgagagttctctccagacctagtcctggtgtctgctggatttgatgctgctgagggtcacccggccccactgggtggctaccatgtttctgccaaatgttttggatacatgacgcagcaactgatgaacctggcaggaggcgcagtggtgctggccttggagggtggccatgacctcacagccatctgtgacgcctctgaggcctgtgtggctgctcttctgggtaacagggtggatcccctttcagaagaaggctggaaacagaaacccaacctcaatgccatccgctctctggaggccgtgatccgggtgcacagtaaatactggggctgcatgcagcgcctggcctcctgtccagactcctgggtgcctagagtgccaggggctgacaaagaagaagtggaggcagtgaccgcactggcgtccctctctgtgggcatcctggctgaagataggccctcggagcagctggtggaggaggaagaacctatgaatctctaaggctctggaaccatctgcccgcccaccatgcccttgggacctggttctcttctaacccctggcaatagcccccattcctgggtctttagagatcctgtgggcaagtagttggaaccagagaacagcctgcctgctttgacagttatcccagggagcgtgagaaaatccctgggtctagaatgggaactggagaggaccctgagaggagacgggctgggcggcgacccccacagggctctcgagaacagattctcccctccagtatgggccctggctgtggcccccattcctcaggactgcacagaggaggactggctccggctccgtcgggctcacccttaaccactattcctggctctgcaaaccccagactttgcacacagcctcaggctccacacagaaatgtgaacttggcctcagacaggctggcccttcctaggctctaggggctaggggggagtggggagccaagaggtcccatattcctgagtgcaggggtagtccctctcacctgcttcctcagacgactctggaagcttccctctaccactgggcactgagacgaagctccctgacagccgagactggcagccctccatctggtccgtaccctcgccagaggcccccctacatcaacctcctggcgatgccctggtggagcagatgggtgctctgggagtcctgtgcttcctgatccaatggtgccaaacccttcatctccccaagaagcgcagcatacccctgggacccctcggccactgcccactcggggagccttctctgtttctggggcctcccccaccatagctctgattcccaccccacataggagtagcctgactgagggggaaggggtgggagagaagatacagacatggaggaggggaggctgctctggcaaagtcttcaaggcttttgggggtccaggcctggggtcaagaaggaaaatgtgtgtgagcatgtgtgtgagtgaggcgtgtgtgtgagcgtgtgtgtgagtgaggcgtgtgtgtgtgtctttcctaggacccaccataccctgtgtatgtatgcatgtttttgtaaaaaggaagaaaatggaaaaaaatctgaacaataaatgttttatttgctttaaaa

SEQ ID NO: 141070 - DNA, 4065 bp, Homo sapiens
  Payload ID: 7721
  Gene Symbol: HDAC7
  Gene Name: histone deacetylase 7
  Uniprot ID: Q8WUI4
  ENST ID: ENST00000354334
  CDS Start-End: 82-2946
ggcgactggggggatgtgaggccggcgccccagccccccgccccgccatgagccccccgctctgagggccccggcccctggatgcacagccccggcgctgatgggacccaggtgagcccgggtgcccactactgcagccccactggcgcaggctgccccaggccctgtgcagacacaccaggccctcagccgcagcccatggacctgcgggtgggccagcggcccccagtggagcccccaccagagcccacattgctggccctgcagcgtccccagcgcctgcaccaccacctcttcctagcaggcctgcagcagcagcgctcggtggagcccatgaggctctccatggacacgccgatgcccgagttgcaggtgggaccccaggaacaagagctgcggcagcttctccacaaggacaagagcaagcgaagtgctgtagccagcagcgtggtcaagcagaagctagcggaggtgattctgaaaaaacagcaggcggccctagaaagaacagtccatcccaacagccccggcattccctacagaaccctggagcccctggagacggaaggagccacccgctccatgctcagcagctttttgcctcctgttcccagcctgcccagtgaccccccagagcacttccctctgcgcaagacagtctctgagcccaacctgaagctgcgctataagcccaagaagtccctggagcggaggaagaatccactgctccgaaaggagagtgcgccccccagcctccggcggcggcccgcagagaccctcggagactcctccccaagtagtagcagcacgcccgcatcagggtgcagctcccccaatgacagcgagcacggccccaatcccatcctgggctcggaggctgacagtgaccgcaggacccatccgactctgggccctcgggggccaatcctggggagcccccacactcccctcttcctgccccatggcttggagcccgaggctgggggcaccttgccctctcgcctgcagcccattctcctcctggacccctcaggctctcatgccccgctgctgactgtgcccgggcttgggcccttgcccttccactttgcccagtccttaatgaccaccgagcggctctctgggtcaggcctccactggccactgagccggactcgctcagagcccctgccccccagtgccaccgctcccccaccgccgggccccatgcagccccgcctggagcagctcaaaactcacgtccaggtgatcaagaggtcagccaagccgagtgagaagccccggctgcggcagataccctcggctgaagacctggagacagatggcgggggaccgggccaggtggtggacgatggcctggagcacagggagctgggccatgggcagcctgaggccagaggccccgctcctctccagcagcaccctcaggtgttgctctgggaacagcagcgactggctgggcggctcccccggggcagcaccggggacactgtgctgcttcctctggcccagggtgggcaccggcctctgtcccgggctcagtcttccccagccgcacctgcctcactgtcagccccagagcctgccagccaggcccgagtcctctccagctcagagacccctgccaggaccctgcccttcaccacagggctgatctatgactcggtcatgctgaagcaccagtgctcctgcggtgacaacagcaggcacccggagcacgccggccgcatccagagcatctggtcccggctgcaggagcgggggctccggagccagtgtgagtgtctccgaggccggaaggcctccctggaagagctgcagtcggtccactctgagcggcacgtgctcctctacggcaccaacccgctcagccgcctcaaactggacaacgggaagctggcagggctcctggcacagcggatgtttgtgatgctgccctgtggtggggttggggtggacactgacaccatctggaatgagcttcattcctccaatgcagcccgctgggccgctggcagtgtcactgacctcgccttcaaagtggcttctcgtgagctaaagaatggtttcgctgtggtgcggcccccaggacaccatgcagatcattcaacagccatgggcttctgcttcttcaactcagtggccatcgcctgccggcagctgcaacagcagagcaaggccagcaagatcctcattgtagactgggacgtgcaccatggcaacggcacccagcaaaccttctaccaagaccccagtgtgctctacatctccctgcatcgccatgacgacggcaacttcttcccggggagtggggctgtggatgaggtaggggctggcagcggtgagggcttcaatgtcaatgtggcctgggctggaggtctggacccccccatgggggatcctgagtacctggctgctttcaggatagtcgtgatgcccatcgcccgagagttctctccagacctagtcctggtgtctgctggatttgatgctgctgagggtcacccggccccactgggtggctaccatgtttctgccaaatgttttggatacatgacgcagcaactgatgaacctggcaggaggcgcagtggtgctggccttggagggtggccatgacctcacagccatctgtgacgcctctgaggcctgtgtggctgctcttctgggtaacagggtggatcccctttcagaagaaggctggaaacagaaacccaacctcaatgccatccgctctctggaggccgtgatccgggtgcacagtaaatactggggctgcatgcagcgcctggcctcctgtccagactcctgggtgcctagagtgccaggggctgacaaagaagaagtggaggcagtgaccgcactggcgtccctctctgtgggcatcctggctgaagataggccctcggagcagctggtggaggaggaagaacctatgaatctctaaggctctggaaccatctgcccgcccaccatgcccttgggacctggttctcttctaacccctggcaatagcccccattcctgggtctttagagatcctgtgggcaagtagttggaaccagagaacagcctgcctgctttgacagttatcccagggagcgtgagaaaatccctgggtctagaatgggaactggagaggaccctgagaggagacgggctgggcggcgacccccacagggctctcgagaacagattctcccctccagtatgggccctggctgtggcccccattcctcaggactgcacagaggaggactggctccggctccgtcgggctcacccttaaccactattcctggctctgcaaaccccagactttgcacacagcctcaggctccacacagaaatgtgaacttggcctcagacaggctggcccttcctaggctctaggggctaggggggagtggggagccaagaggtcccatattcctgagtgcaggggtagtccctctcacctgcttcctcagacgactctggaagcttccctctaccactgggcactgagacgaagctccctgacagccgagactggcagccctccatctggtccgtaccctcgccagaggcccccctacatcaacctcctggcgatgccctggtggagcagatgggtgctctgggagtcctgtgcttcctgatccaatggtgccaaacccttcatctccccaagaagcgcagcatacccctgggacccctcggccactgcccactcggggagccttctctgtttctggggcctcccccaccatagctctgattcccaccccacataggagtagcctgactgagggggaaggggtgggagagaagatacagacatggaggaggggaggctgctctggcaaagtcttcaaggcttttgggggtccaggcctggggtcaagaaggaaaatgtgtgtgagcatgtgtgtgagtgaggcgtgtgtgtgagcgtgtgtgtgagtgaggcgtgtgtgtgtgtctttcctaggacccaccataccctgtgtatgtatgcatgtttttgtaaaaaggaagaaaatggaaaaaaatctgaacaataaatgttttatttgctttaaaa

SEQ ID NO: 141071 - DNA, 3261 bp, Homo sapiens
  Payload ID: 7721
  Gene Symbol: HDAC7
  Gene Name: histone deacetylase 7
  ENST ID: ENST00000380610
  CDS Start-End: 8-3052
atttagaatgagtgacttgaggaagagggagctgggagcccttttcaccagcagggggactggaggagtcgaatgggatgggacccaggtgagcccgggtgcccactactgcagccccactggcgcaggctgccccaggccctgtgcagacacaccaggccctcagccgcagcccatggacctgcgggtgggccagcggcccccagtggagcccccaccagagcccacattgctggccctgcagcgtccccagcgcctgcaccaccacctcttcctagcaggcctgcagcagcagcgctcggtggagcccatgaggctctccatggacacgccgatgcccgagttgcaggtgggaccccaggaacaagagctgcggcagcttctccacaaggacaagagcaagcgaagtgctgtagccagcagcgtggtcaagcagaagctagcggaggtgattctgaaaaaacagcaggcggccctagaaagaacagtccatcccaacagccccggcattccctacagaaccctggagcccctggagacggaaggagccacccgctccatgctcagcagctttttgcctcctgttcccagcctgcccagtgaccccccagagcacttccctctgcgcaagacagtctctgagcccaacctgaagctgcgctataagcccaagaagtccctggagcggaggaagaatccactgctccgaaaggagagtgcgccccccagcctccggcggcggcccgcagagaccctcggagactcctccccaagtagtagcagcacgcccgcatcagggtgcagctcccccaatgacagcgagcacggccccaatcccatcctgggctcggaggcgctcttgggccagcggctgcggctgcaggagacttctgtggccccgttcgccttgccgacagtgtccttgctgcccgcaatcactctggggctgcccgcccctgccagggctgacagtgaccgcaggacccatccgactctgggccctcgggggccaatcctggggagcccccacactcccctcttcctgccccatggcttggagcccgaggctgggggcaccttgccctctcgcctgcagcccattctcctcctggacccctcaggctctcatgccccgctgctgactgtgcccgggcttgggcccttgcccttccactttgcccagtccttaatgaccaccgagcggctctctgggtcaggcctccactggccactgagccggactcgctcagagcccctgccccccagtgccaccgctcccccaccgccgggccccatgcagccccgcctggagcagctcaaaactcacgtccaggtgatcaagaggtcagccaagccgagtgagaagccccggctgcggcagataccctcggctgaagacctggagacagatggcgggggaccgggccaggtggtggacgatggcctggagcacagggagctgggccatgggcagcctgaggccagaggccccgctcctctccagcagcaccctcaggtgttgctctgggaacagcagcgactggctgggcggctcccccggggcagcaccggggacactgtgctgcttcctctggcccagggtgggcaccggcctctgtcccgggctcagtcttccccagccgcacctgcctcactgtcagccccagagcctgccagccaggcccgagtcctctccagctcagagacccctgccaggaccctgcccttcaccacagggctgatctatgactcggtcatgctgaagcaccagtgctcctgcggtgacaacagcaggcacccggagcacgccggccgcatccagagcatctggtcccggctgcaggagcgggggctccggagccagtgtgagtgtctccgaggccggaaggcctccctggaagagctgcagtcggtccactctgagcggcacgtgctcctctacggcaccaacccgctcagccgcctcaaactggacaacgggaagctggcagggctcctggcacagcggatgtttgtgatgctgccctgtggtggggttggggtggacactgacaccatctggaatgagcttcattcctccaatgcagcccgctgggccgctggcagtgtcactgacctcgccttcaaagtggcttctcgtgagctaaagaatggtttcgctgtggtgcggcccccaggacaccatgcagatcattcaacagccatgggcttctgcttcttcaactcagtggccatcgcctgccggcagctgcaacagcagagcaaggccagcaagatcctcattgtagactgggacgtgcaccatggcaacggcacccagcaaaccttctaccaagaccccagtgtgctctacatctccctgcatcgccatgacgacggcaacttcttcccggggagtggggctgtggatgaggtaggggctggcagcggtgagggcttcaatgtcaatgtggcctgggctggaggtctggacccccccatgggggatcctgagtacctggctgctttcaggatagtcgtgatgcccatcgcccgagagttctctccagacctagtcctggtgtctgctggatttgatgctgctgagggtcacccggccccactgggtggctaccatgtttctgccaaatgttttggatacatgacgcagcaactgatgaacctggcaggaggcgcagtggtgctggccttggagggtggccatgacctcacagccatctgtgacgcctctgaggcctgtgtggctgctcttctgggtaacagggtggatcccctttcagaagaaggctggaaacagaaacccaacctcaatgccatccgctctctggaggccgtgatccgggtgcacatgggtgccctcacactgagccagattccaggacatggttcctcacagcagcaggcaggaggagcattctcctggcctgggcacccatgcagagcggccgtggtgatggtaaatactggggctgcatgcagcgcctggcctcctgtccagactcctgggtgcctagagtgccaggggctgacaaagaagaagtggaggcagtgaccgcactggcgtccctctctgtgggcatcctggctgaagataggccctcggagcagctggtggaggaggaagaacctatgaatctctaaggctctggaaccatctgcccgcccaccatgcccttgggacctggttctcttctaacccctggcaatagcccccattcctgggtctttagagatcctgtgggcaagtagttggaaccagag

SEQ ID NO: 141072 - DNA, 569 bp, Homo sapiens
  Payload ID: 7721
  Gene Symbol: HDAC7
  Gene Name: histone deacetylase 7
  ENST ID: ENST00000417107
  CDS Start-End: 336-569
agataaagcatttccttccattgtcatcctacccggccggccgggctgccagggccctccccctcccggccccctcccttcctctcgccgtctcacagtcgctctgcagcctccggcgactggggggatgtgaggccggcgccccagccccccgccccgccatgagccccccgctctgagggccccggcccctggatgcacagccccggcgctgggtgaagagacacctgtgccctgatgggacccaggtgagcccgggtgcccactactgcagccccactggcgcaggctgccccaggccctgtgcagacacaccaggccctcagccgcagcccatggacctgcgggtgggccagcggcccccagtggagcccccaccagagcccacattgctggccctgcagcgtccccagcgcctgcaccaccacctcttcctagcaggcctgcagcagcagcgctcggtggagcccatgaggctctccatggacacgccgatgcccgagttgcaggtgggaccccaggaacaagagctgcggcagcttctccacaaggacaagagcaagcgaagt

SEQ ID NO: 141073 - DNA, 645 bp, Homo sapiens
  Payload ID: 7721
  Gene Symbol: HDAC7
  Gene Name: histone deacetylase 7
  ENST ID: ENST00000434070
  CDS Start-End: 186-645
acacacacacacacacggtggaaactctatacccctgtgcctagtcagaaacagtgacggggagggacccagggaccaggcctcgagatgggacccaggtgagcccgggtgcccactactgcagccccactggcgcaggctgccccaggccctgtgcagacacaccaggccctcagccgcagcccatggacctgcgggtgggccagcggcccccagtggagcccccaccagagcccacattgctggccctgcagcgtccccagcgcctgcaccaccacctcttcctagcaggcctgcagcagcagcgctcggtggagcccatgaggctctccatggacacgccgatgcccgagttgcaggtgggaccccaggaacaagagctgcggcagcttctccacaaggacaagagcaagcgaagtgctgtagccagcagcgtggtcaagcagaagctagcggaggtgattctgaaaaaacagcaggcggccctagaaagaacagtccatcccaacagccccggcattccctacagaaccctggagcccctggagacggaaggagccacccgctccatgctcagcagctttttgcctcctgttcccagcctgcccagtgaccccccagagcacttccctctgcgcaagacag

SEQ ID NO: 141074 - DNA, 555 bp, Homo sapiens
  Payload ID: 7721
  Gene Symbol: HDAC7
  Gene Name: histone deacetylase 7
  ENST ID: ENST00000447463
  CDS Start-End: 96-555
cttttaataggaacaggctggacccttccgttcccctcagcaggcatggctgccccaggccctgtgcagacacaccaggccctcagccgcagcccatggacctgcgggtgggccagcggcccccagtggagcccccaccagagcccacattgctggccctgcagcgtccccagcgcctgcaccaccacctcttcctagcaggcctgcagcagcagcgctcggtggagcccatgaggctctccatggacacgccgatgcccgagttgcaggtgggaccccaggaacaagagctgcggcagcttctccacaaggacaagagcaagcgaagtgctgtagccagcagcgtggtcaagcagaagctagcggaggtgattctgaaaaaacagcaggcggccctagaaagaacagtccatcccaacagccccggcattccctacagaaccctggagcccctggagacggaaggagccacccgctccatgctcagcagctttttgcctcctgttcccagcctgcccagtgaccccccagagcacttccctctgcgcaagacag

SEQ ID NO: 141075 - DNA, 364 bp, Homo sapiens
  Payload ID: 7721
  Gene Symbol: HDAC7
  Gene Name: histone deacetylase 7
  ENST ID: ENST00000445237
  CDS Start-End: 211-364
attccaaggagcctagctctggctcctgaggtgaccccagcccagaagtcccattcccctctaccccaacccccagaatggcaggaggagcagggcagtctgggagtgacagatgggacccaggtgagcccgggtgcccactactgcagccccactggcgcaggctgccccaggccctgtgcagacacaccaggccctcagccgcagcccatggacctgcgggtgggccagcggcccccagtggagcccccaccagagcccacattgctggccctgcagcgtccccagcgcctgcaccaccacctcttcctagcaggcctgcagcagcagcgctcggtggagcccatgaggctctccatggaca

SEQ ID NO: 141076 - DNA, 914 bp, Homo sapiens
  Payload ID: 7721
  Gene Symbol: HDAC7
  Gene Name: histone deacetylase 7
  ENST ID: ENST00000430670
  CDS Start-End: 91-914
gcagcctccggcgactggggggatgtgaggccggcgccccagccccccgccccgccatgagccccccgctctgagggccccggcccctggatgcacagccccggcgctgatgggacccaggtgagcccgggtgcccactactgcagccccactggcgcaggctgccccaggccctgtgcagacacaccaggccctcagccgcagcccatggacctgcgggtgggccagcggcccccagtggagcccccaccagagcccacattgctggccctgcagcgtccccagcgcctgcaccaccacctcttcctagcaggcctgcagcagcagcgctcggtggagcccatgaggctctccatggacacgccgatgcccgagttgcaggtgggaccccaggaacaagagctgcggcagcttctccacaaggacaagagcaagcgaagtgctgtagccagcagcgtggtcaagcagaagctagcggaggtgattctgaaaaaacagcaggcggccctagaaagaacagtccatcccaacagccccggcattccctacagcctgcccagtgaccccccagagcacttccctctgcgcaagacagtctctgagcccaacctgaagctgcgctataagcccaagaagtccctggagcggaggaagaatccactgctccgaaaggagagtgcgccccccagcctccggcggcggcccgcagagaccctcggagactcctccccaagtagtagcagcacgcccgcatcagggtgcagctcccccaatgacagcgagcacggccccaatcccatcctgggctcggaggctgacagtgaccgcaggacccatccgactctgggccctcgggggccaatcctggggagcccccacactcccctcttcctgccccatggcttggagcccga

SEQ ID NO: 141077 - DNA, 579 bp, Homo sapiens
  Payload ID: 7721
  Gene Symbol: HDAC7
  Gene Name: histone deacetylase 7
  ENST ID: ENST00000450805
  CDS Start-End: 242-579
atcccgtggagccgggcagggccctactcagatccttcggcggggaaagaggtcccttggaggggtctctggctgggaggtttctctgagcattgccccccatccttgctcacccatcagggtgaagagacacctgtgccctgatgggacccaggtgagcccgggtgcccactactgcagccccactggcgcaggctgccccaggccctgtgcagacacaccaggccctcagccgcagcccatggacctgcgggtgggccagcggcccccagtggagcccccaccagagcccacattgctggccctgcagcgtccccagcgcctgcaccaccacctcttcctagcaggcctgcagcagcagcgctcggtggagcccatgaggctctccatggacacgccgatgcccgagttgcaggtgggaccccaggaacaagagctgcggcagcttctccacaaggacaagagcaagcgaagtgctgtagccagcagcgtggtcaagcagaagctagcggaggtgattctgaaaaaacagcaggcggccctagaaagaacagtccatcccaacagccccggcattcc

SEQ ID NO: 141078 - DNA, 576 bp, Homo sapiens
  Payload ID: 7721
  Gene Symbol: HDAC7
  Gene Name: histone deacetylase 7
  ENST ID: ENST00000417902
  CDS Start-End: 177-576
attgtcatcctacccggccggccgggctgccagggccctccccctcccggccccctcccttcctctcgccgtctcacagtcgctctgcagcctccggcgactggggggatgtgaggccggcgccccagccccccgccccgccatgagccccccgctctgagggccccggcccctggatgcacagccccggcgctggctgccccaggccctgtgcagacacaccaggccctcagccgcagcccatggacctgcgggtgggccagcggcccccagtggagcccccaccagagcccacattgctggccctgcagcgtccccagcgcctgcaccaccacctcttcctagcaggcctgcagcagcagcgctcggtggagcccatgaggctctccatggacacgccgatgcccgagttgcaggtgggaccccaggaacaagagctgcggcagcttctccacaaggacaagagcaagcgaagtgctgtagccagcagcgtggtcaagcagaagctagcggaggtgattctgaaaaaacagcaggcggccctagaaagaacagtccatcccaacagccccggca

SEQ ID NO: 141079 - DNA, 621 bp, Homo sapiens
  Payload ID: 7721
  Gene Symbol: HDAC7
  Gene Name: histone deacetylase 7
  ENST ID: ENST00000425451
  CDS Start-End: 99-404
gtcgctctgcagcctccggcgactggggggatgtgaggccggcgccccagccccccgccccgccatgagccccccgctctgagggccccggcccctggatgcacagccccggcgctgctctccatggacacgccgatgcccgagttgcaggtgggaccccaggaacaagagctgcggcagcttctccacaaggacaagagcaagcgaagtgctgtagccagcagcgtggtcaagcagaagctagcggaggtgattctgaaaaaacagcaggcggccctagaaagaacagtccatcccaacagccccggcattccctacagaaccctggagcccctggagacggaaggagccacccgctccatgctcagcagctttttgcctcctgttcccagcctgcccagtgaccccccagagcacttccctctgcgcaagacaggctgacagtgaccgcaggacccatccgactctgggccctcgggggccaatcctggggagcccccacactcccctcttcctgccccatggcttggagcccgaggctgggggcaccttgccctctcgcctgcagcccattctcctcctggacccctcaggctctcatgccccgctgctgactgtgcc

SEQ ID NO: 141080 - DNA, 402 bp, Homo sapiens
  Payload ID: 7721
  Gene Symbol: HDAC7
  Gene Name: histone deacetylase 7
  ENST ID: ENST00000433685
  CDS Start-End: 139-402
cgttcccctcagcaggcatggtgtgtgtgtgggggtgccagtgggggagggctgggcagtgattcaaatcagatcctggaactttcctgaggctgccccaggccctgtgcagacacaccaggccctcagccgcagcccatggacctgcgggtgggccagcggcccccagtggagcccccaccagagcccacattgctggccctgcagcgtccccagcgcctgcaccaccacctcttcctagcaggcctgcagcagcagcgctcggtggagcccatgaggctctccatggacacgccgatgcccgagttgcaggtgggaccccaggaacaagagctgcggcagcttctccacaaggacaagagcaagcgaagtgctgtagccagcagcgtggtcaagcagaag

SEQ ID NO: 141081 - DNA, 3016 bp, Homo sapiens
  Payload ID: 7721
  Gene Symbol: HDAC7
  Gene Name: histone deacetylase 7
  Uniprot ID: Q8WUI4
  ENST ID: ENST00000427332
  CDS Start-End: 158-3016
acaccctttttcttttaataggaacaggctggacccttccgttcccctcagcaggcatgatgggacccaggtgagcccgggtgcccactactgcagccccactggcgcaggctgccccaggccctgtgcagacacaccaggccctcagccgcagcccatggacctgcgggtgggccagcggcccccagtggagcccccaccagagcccacattgctggccctgcagcgtccccagcgcctgcaccaccacctcttcctagcaggcctgcagcagcagcgctcggtggagcccatgaggctctccatggacacgccgatgcccgagttgcaggtgggaccccaggaacaagagctgcggcagcttctccacaaggacaagagcaagcgaagtgctgtagccagcagcgtggtcaagcagaagctagcggaggtgattctgaaaaaacagcaggcggccctagaaagaacagtccatcccaacagccccggcattccctacagaaccctggagcccctggagacggaaggagccacccgctccatgctcagcagctttttgcctcctgttcccagcctgcccagtgaccccccagagcacttccctctgcgcaagacagtctctgagcccaacctgaagctgcgctataagcccaagaagtccctggagcggaggaagaatccactgctccgaaaggagagtgcgccccccagcctccggcggcggcccgcagagaccctcggagactcctccccaagtagtagcagcacgcccgcatcagggtgcagctcccccaatgacagcgagcacggccccaatcccatcctgggctcggaggcgctcttgggccagcggctgcggctgcaggagacttctgtggccccgttcgccttgccgacagtgtccttgctgcccgcaatcactctggggctgcccgcccctgccagggctgacagtgaccgcaggacccatccgactctgggccctcgggggccaatcctggggagcccccacactcccctcttcctgccccatggcttggagcccgaggctgggggcaccttgccctctcgcctgcagcccattctcctcctggacccctcaggctctcatgccccgctgctgactgtgcccgggcttgggcccttgcccttccactttgcccagtccttaatgaccaccgagcggctctctgggtcaggcctccactggccactgagccggactcgctcagagcccctgccccccagtgccaccgctcccccaccgccgggccccatgcagccccgcctggagcagctcaaaactcacgtccaggtgatcaagaggtcagccaagccgagtgagaagccccggctgcggcagataccctcggctgaagacctggagacagatggcgggggaccgggccaggtggtggacgatggcctggagcacagggagctgggccatgggcagcctgaggccagaggccccgctcctctccagcagcaccctcaggtgttgctctgggaacagcagcgactggctgggcggctcccccggggcagcaccggggacactgtgctgcttcctctggcccagggtgggcaccggcctctgtcccgggctcagtcttccccagccgcacctgcctcactgtcagccccagagcctgccagccaggcccgagtcctctccagctcagagacccctgccaggaccctgcccttcaccacagggctgatctatgactcggtcatgctgaagcaccagtgctcctgcggtgacaacagcaggcacccggagcacgccggccgcatccagagcatctggtcccggctgcaggagcgggggctccggagccagtgtgagtgtctccgaggccggaaggcctccctggaagagctgcagtcggtccactctgagcggcacgtgctcctctacggcaccaacccgctcagccgcctcaaactggacaacgggaagctggcagggctcctggcacagcggatgtttgtgatgctgccctgtggtggggttggggtggacactgacaccatctggaatgagcttcattcctccaatgcagcccgctgggccgctggcagtgtcactgacctcgccttcaaagtggcttctcgtgagctaaagaatggtttcgctgtggtgcggcccccaggacaccatgcagatcattcaacagccatgggcttctgcttcttcaactcagtggccatcgcctgccggcagctgcaacagcagagcaaggccagcaagatcctcattgtagactgggacgtgcaccatggcaacggcacccagcaaaccttctaccaagaccccagtgtgctctacatctccctgcatcgccatgacgacggcaacttcttcccggggagtggggctgtggatgaggtaggggctggcagcggtgagggcttcaatgtcaatgtggcctgggctggaggtctggacccccccatgggggatcctgagtacctggctgctttcaggatagtcgtgatgcccatcgcccgagagttctctccagacctagtcctggtgtctgctggatttgatgctgctgagggtcacccggccccactgggtggctaccatgtttctgccaaatgttttggatacatgacgcagcaactgatgaacctggcaggaggcgcagtggtgctggccttggagggtggccatgacctcacagccatctgtgacgcctctgaggcctgtgtggctgctcttctgggtaacagggtggatcccctttcagaagaaggctggaaacagaaacccaacctcaatgccatccgctctctggaggccgtgatccgggtgcacagtaaatactggggctgcatgcagcgcctggcctcctgtccagactcctgggtgcctagagtgccaggggctgacaaagaagaagtggaggcagtgaccgcactggcgtccctctctgtgggcatcctggctgaagataggccctcggagcagctggtggaggaggaagaacctatgaatctctaa

SEQ ID NO: 141082 - DNA, 593 bp, Homo sapiens
  Payload ID: 7721
  Gene Symbol: HDAC7
  Gene Name: histone deacetylase 7
  ENST ID: ENST00000422254
  CDS Start-End: 170-593
cccctgggtcccgggagtgagtcacggcggagacgctgaggaggtgctggcgcagcaccccacccccaccgggcgaggggctgagcgcaggcctcgccccccagattccagcgctgaaggaggctgccccaggccctgtgcagacacaccaggccctcagccgcagcccatggacctgcgggtgggccagcggcccccagtggagcccccaccagagcccacattgctggccctgcagcgtccccagcgcctgcaccaccacctcttcctagcaggcctgcagcagcagcgctcggtggagcccatgaggctctccatggacacgccgatgcccgagttgcaggtgggaccccaggaacaagagctgcggcagcttctccacaaggacaagagcaagcgaagtgctgtagccagcagcgtggtcaagcagaagctagcggaggtgattctgaaaaaacagcaggcggccctagaaagaacagtccatcccaacagccccggcattccctacagcctgcccagtgaccccccagagcacttccctctgcgcaagacagtctctgagcccaacctgaagctgcgctataagccca

SEQ ID NO: 141083 - DNA, 580 bp, Homo sapiens
  Payload ID: 7721
  Gene Symbol: HDAC7
  Gene Name: histone deacetylase 7
  ENST ID: ENST00000440293
  CDS Start-End: 102-580
acagtcgctctgcagcctccggcgactggggggatgtgaggccggcgccccagccccccgccccgccatgagccccccgctctgagggccccggcccctggatgcacagccccggcgctggctgccccaggccctgtgcagacacaccaggccctcagccgcagcccatggacctgcgggtgggccagcggcccccagtggagcccccaccagagcccacattgctggccctgcagcgtccccagcgcctgcaccaccacctcttcctagcaggcctgcagcagcagcgctcggtggagcccatgaggctctccatggacacgccgatgcccgagttgcaggtgggaccccaggaacaagagctgcggcagcttctccacaaggacaagagcaagcgaagtgctgtagccagcagcgtggtcaagcagaagctagcggaggtgattctgaaaaaacagcaggcggccctagaaagaacagtccatcccaacagccccggcattccctacagcctgcccagtgaccccccagagcacttccctctgcgcaagacagtctctgagcccaacctgaagctgcg

SEQ ID NO: 141084 - DNA, 583 bp, Homo sapiens
  Payload ID: 7721
  Gene Symbol: HDAC7
  Gene Name: histone deacetylase 7
  ENST ID: ENST00000421231
  CDS Start-End: 170-583
cccctgggtcccgggagtgagtcacggcggagacgctgaggaggtgctggcgcagcaccccacccccaccgggcgaggggctgagcgcaggcctcgccccccagattccagcgctgaaggaggctgccccaggccctgtgcagacacaccaggccctcagccgcagcccatggacctgcgggtgggccagcggcccccagtggagcccccaccagagcccacattgctggccctgcagcgtccccagcgcctgcaccaccacctcttcctagcaggcctgcagcagcagcgctcggtggagcccatgaggctctccatggacacgccgatgcccgagttgcaggtgggaccccaggaacaagagctgcggcagcttctccacaaggacaagagcaagcgaagtgctgtagccagcagcgtggtcaagcagaagctagcggaggtgattctgaaaaaacagcaggcggccctagaaagaacagtccatcccaacagccccggcattccctacagaaccctggagcccctggagacggaaggagccacccgctccatgctcagcagctttttgcctcctgttccc

SEQ ID NO: 141085 - DNA, 1479 bp, Homo sapiens
  Payload ID: 7721
  Gene Symbol: HDAC7
  Gene Name: histone deacetylase 7
  ENST ID: ENST00000548080
  CDS Start-End: 1-1154
ggctgatctatgactcggtcatgctgaagcaccagtgctcctgcggtgacaacagcaggcacccggagcacgccggccgcatccagagcatctggtcccggctgcaggagcgggggctccggagccagtgtgagtgtctccgaggccggaaggcctccctggaagagctgcagtcggtccactctgagcggcacgtgctcctctacggcaccaacccgctcagccgcctcaaactggacaacgggaagctggcagggctcctggcacagcggatgtttgtgatgctgccctgtggtggggttggggtggacactgacaccatctggaatgagcttcattcctccaatgcagcccgctgggccgctggcagtgtcactgacctcgccttcaaagtggcttctcgtgagctaaaggacgtgcaccatggcaacggcacccagcaaaccttctaccaagaccccagtgtgctctacatctccctgcatcgccatgacgacggcaacttcttcccggggagtggggctgtggatgaggtaggggctggcagcggtgagggcttcaatgtcaatgtggcctgggctggaggtctggacccccccatgggggatcctgagtacctggctgctttcaggatagtcgtgatgcccatcgcccgagagttctctccagacctagtcctggtgtctgctggatttgatgctgctgagggtcacccggccccactgggtggctaccatgtttctgccaaatgttttggatacatgacgcagcaactgatgaacctggcaggaggcgcagtggtgctggccttggagggtggccatgacctcacagccatctgtgacgcctctgaggcctgtgtggctgctcttctgggtaacagggtggatcccctttcagaagaaggctggaaacagaaacccaacctcaatgccatccgctctctggaggccgtgatccgggtgcacagtaaatactggggctgcatgcagcgcctggcctcctgtccagactcctgggtgcctagagtgccaggggctgacaaagaagaagtggaggcagtgaccgcactggcgtccctctctgtgggcatcctggctgaagataggccctcggagcagctggtggaggaggaagaacctatgaatctctaaggctctggaaccatctgcccgcccaccatgcccttgggacctggttctcttctaacccctggcaatagcccccattcctgggtctttagagatcctgtgggcaagtagttggaaccagagaacagcctgcctgctttgacagttatcccagggagcgtgagaaaatccctgggtctagaatgggaactggagaggaccctgagaggagacgggctgggcggcgacccccacagggctctcgagaacagattctcccctccagtatgggccctggctgtggcccccattcctcaggactgcacagaggaggactggctccggctcc

SEQ ID NO: 141086 - DNA, 569 bp, Homo sapiens
  Payload ID: 7721
  Gene Symbol: HDAC7
  Gene Name: histone deacetylase 7
  ENST ID: ENST00000547259
  CDS Start-End: 1-331
agacctagtcctggtgtctgctggatttgatgctgctgagggtcacccggccccactgggtggctaccatgtttctgccaaatgttttggatacatgacgcagcaactgatgaacctggcaggaggcgcagtggtgctggccttggagggtggccatgacctcacagccatctgtgacgcctctgaggcctgtgtggctgctcttctgggtaacagggtgagccgtctccctcccccatccatgcttctgtcaggcaggtggatcccctttcagaagaaggctggaaacagaaacccaacctcaatgccatccgctctctggaggccgtgatccgggtgcacagtaaatactggggctgcatgcagcgcctggcctcctgtccagactcctgggtgcctagagtgccaggggctgacaaagaagaagtggaggcagtgaccgcactggcgtccctctctgtgggcatcctggctgaagataggccctcggagcagctggtggaggaggaagaacctatgaatctctaaggctctggaaccatctgcccgcccaccatgcccttgggacc

SEQ ID NO: 141087 - DNA, 2719 bp, Homo sapiens
  Payload ID: 7721
  Gene Symbol: HDAC7
  Gene Name: histone deacetylase 7
  ENST ID: ENST00000548938
  CDS Start-End: 1-185
gcagcaccggggacactgtgctgcttcctctggcccagggtgggcaccggcctctgtcccgggctcagtcttccccagccgcacctgcctcactgtcagccccagagcctgccagccaggcccgagtcctctccagctcagagacccctgccaggaccctgcccttcaccacaggttcactctaaagaagtagcattcctgggtcacatggtgtgagcattttgagagtcgttggtgtcctagacgcacagaaattgaccctcccacccgcaatgagcaggaccctcctctgaagacttcccacggggctgatctatgactcggtcatgctgaagcaccagtgctcctgcggtgacaacagcaggcacccggagcacgccggccgcatccagagcatctggtcccggctgcaggagcgggggctccggagccagtgtgagtgtctccgaggccggaaggcctccctggaagagctgcagtcggtccactctgagcggcacgtgctcctctacggcaccaacccgctcagccgcctcaaactggacaacgggaagctggcagggctcctggcacagcggatgtttgtgatgctgccctgtggtggggttggggtggacactgacaccatctggaatgagcttcattcctccaatgcagcccgctgggccgctggcagtgtcactgacctcgccttcaaagtggcttctcgtgagctaaagaatggtttcgctgtggtgcggcccccaggacaccatgcagatcattcaacagccatgggcttctgcttcttcaactcagtggccatcgcctgccggcagctgcaacagcagagcaaggccagcaagatcctcattgtagactgggacgtgcaccatggcaacggcacccagcaaaccttctaccaagaccccagtgtgctctacatctccctgcatcgccatgacgacggcaacttcttcccggggagtggggctgtggatgaggtaggggctggcagcggtgagggcttcaatgtcaatgtggcctgggctggaggtctggacccccccatgggggatcctgagtacctggctgctttcaggatagtcgtgatgcccatcgcccgagagttctctccagacctagtcctggtgtctgctggatttgatgctgctgagggtcacccggccccactgggtggctaccatgtttctgccaaatgttttggatacatgacgcagcaactgatgaacctggcaggaggcgcagtggtgctggccttggagggtggccatgacctcacagccatctgtgacgcctctgaggcctgtgtggctgctcttctgggtaacagggtggatcccctttcagaagaaggctggaaacagaaacccaacctcaatgccatccgctctctggaggccgtgatccgggtgcacagtaaatactggggctgcatgcagcgcctggcctcctgtccagactcctgggtgcctagagtgccaggggctgacaaagaagaagtggaggcagtgaccgcactggcgtccctctctgtgggcatcctggctgaagataggccctcggagcagctggtggaggaggaagaacctatgaatctctaaggctctggaaccatctgcccgcccaccatgcccttgggacctggttctcttctaacccctggcaatagcccccattcctgggtctttagagatcctgtgggcaagtagttggaaccagagaacagcctgcctgctttgacagttatcccagggagcgtgagaaaatccctgggtctagaatgggaactggagaggaccctgagaggagacgggctgggcggcgacccccacagggctctcgagaacagattctcccctccagtatgggccctggctgtggcccccattcctcaggactgcacagaggaggactggctccggctccgtcgggctcacccttaaccactattcctggctctgcaaaccccagactttgcacacagcctcaggctccacacagaaatgtgaacttggcctcagacaggctggcccttcctaggctctaggggctaggggggagtggggagccaagaggtcccatattcctgagtgcaggggtagtccctctcacctgcttcctcagacgactctggaagcttccctctaccactgggcactgagacgaagctccctgacagccgagactggcagccctccatctggtccgtaccctcgccagaggcccccctacatcaacctcctggcgatgccctggtggagcagatgggtgctctgggagtcctgtgcttcctgatccaatggtgccaaacccttcatctccccaagaagcgcagcatacccctgggacccctcggccactgcccactcggggagccttctctgtttctggggcctcccccaccatagctctgattcccaccccacataggagtagcctgactgagggggaaggggtgggagagaagatacagacatggaggaggggaggctgctctggcaaagtcttcaaggcttttgggggtccaggcctggggtcaagaaggaaaatgtgtgtgagcatgtgtgtgagtgaggcgtgtgtgtgagcgtgtgtgtgagtgaggcgtgtgtgtgtgtctttcctaggacccaccataccctgtgtatgtatgcatgtttttgtaaaaaggaagaaaatggaaaaaaatctgaacaataaatgttttatttgcttt

SEQ ID NO: 141088 - DNA, 724 bp, Homo sapiens
  Payload ID: 7721
  Gene Symbol: HDAC7
  Gene Name: histone deacetylase 7
  ENST ID: ENST00000485796
  CDS Start-End: 1-459
gagcccctggagacggaaggagccacccgctccatgctcagcagctttttgcctcctgttcccagcctgcccagtgaccccccagagcacttccctctgcgcaagacagtctctgagcccaacctgaagctgcgctataagcccaagaagtccctggagcggaggaagaatccactgctccgaaaggagagtgcgccccccagcctccggcggcggcccgcagagaccctcggagactcctccccaagtagtagcagcacgcccgcatcagggtgcagctcccccaatgacagcgagcacggccccaatcccatcctgggctcggaggcgctcttgggccagcggctgcggctgcaggagacttctgtggccccgttcgccttgccgacagtgtccttgctgcccgcaatcactctggggctgcccgcccctgccagggctctcatgccccgctgctgactgtgcccgggcttgggcccttgcccttccactttgcccagtccttaatgaccaccgagcggctctctgggtcaggcctccactggccactgagccggactcgctcagagcccctgccccccagtgccaccgctcccccaccgccgggccccatgcagccccgcctggagcagctcaaaactcacgtccaggtgatcaagaggtcagccaagccgagtgagaagccccggctgcggcagataccctcggctgaagacctggagac

SEQ ID NO: 141089 - DNA, 3216 bp, Homo sapiens
  Payload ID: 7721
  Gene Symbol: HDAC7
  Gene Name: histone deacetylase 7
  Uniprot ID: Q8WUI4
  ENST ID: ENST00000552960
  CDS Start-End: 102-3026
acagtcgctctgcagcctccggcgactggggggatgtgaggccggcgccccagccccccgccccgccatgagccccccgctctgagggccccggcccctggatgcacagccccggcgctggctgccccaggccctgtgcagacacaccaggccctcagccgcagcccatggacctgcgggtgggccagcggcccccagtggagcccccaccagagcccacattgctggccctgcagcgtccccagcgcctgcaccaccacctcttcctagcaggcctgcagcagcagcgctcggtggagcccatgaggctctccatggacacgccgatgcccgagttgcaggtgggaccccaggaacaagagctgcggcagcttctccacaaggacaagagcaagcgaagtgctgtagccagcagcgtggtcaagcagaagctagcggaggtgattctgaaaaaacagcaggcggccctagaaagaacagtccatcccaacagccccggcattccctacagaaccctggagcccctggagacggaaggagccacccgctccatgctcagcagctttttgcctcctgttcccagcctgcccagtgaccccccagagcacttccctctgcgcaagacagtctctgagcccaacctgaagctgcgctataagcccaagaagtccctggagcggaggaagaatccactgctccgaaaggagagtgcgccccccagcctccggcggcggcccgcagagaccctcggagactcctccccaagtagtagcagcacgcccgcatcagggtgcagctcccccaatgacagcgagcacggccccaatcccatcctgggctcggaggcgctcttgggccagcggctgcggctgcaggagacttctgtggccccgttcgccttgccgacagtgtccttgctgcccgcaatcactctggggctgcccgcccctgccagggctgacagtgaccgcaggacccatccgactctgggccctcgggggccaatcctggggagcccccacactcccctcttcctgccccatggcttggagcccgaggctgggggcaccttgccctctcgcctgcagcccattctcctcctggacccctcaggctctcatgccccgctgctgactgtgcccgggcttgggcccttgcccttccactttgcccagtccttaatgaccaccgagcggctctctgggtcaggcctccactggccactgagccggactcgctcagagcccctgccccccagtgccaccgctcccccaccgccgggccccatgcagccccgcctggagcagctcaaaactcacgtccaggtgatcaagaggtcagccaagccgagtgagaagccccggctgcggcagataccctcggctgaagacctggagacagatggcgggggaccgggccaggtggtggacgatggcctggagcacagggagctgggccatgggcagcctgaggccagaggccccgctcctctccagcagcaccctcaggtgttgctctgggaacagcagcgactggctgggcggctcccccggggcagcaccggggacactgtgctgcttcctctggcccagggtgggcaccggcctctgtcccgggctcagtcttccccagccgcacctgcctcactgtcagccccagagcctgccagccaggcccgagtcctctccagctcagagacccctgccaggaccctgcccttcaccacagggctgatctatgactcggtcatgctgaagcaccagtgctcctgcggtgacaacagcaggcacccggagcacgccggccgcatccagagcatctggtcccggctgcaggagcgggggctccggagccagtgtgagtgtctccgaggccggaaggcctccctggaagagctgcagtcggtccactctgagcggcacgtgctcctctacggcaccaacccgctcagccgcctcaaactggacaacgggaagctggcagggctcctggcacagcggatgtttgtgatgctgccctgtggtggggttggggtggacactgacaccatctggaatgagcttcattcctccaatgcagcccgctgggccgctggcagtgtcactgacctcgccttcaaagtggcttctcgtgagctaaagaatggtttcgctgtggtgcggcccccaggacaccatgcagatcattcaacagccatgggcttctgcttcttcaactcagtggccatcgcctgccggcagctgcaacagcagagcaaggccagcaagatcctcattgtagactgggacgtgcaccatggcaacggcacccagcaaaccttctaccaagaccccagtgtgctctacatctccctgcatcgccatgacgacggcaacttcttcccggggagtggggctgtggatgaggtaggggctggcagcggtgagggcttcaatgtcaatgtggcctgggctggaggtctggacccccccatgggggatcctgagtacctggctgctttcaggatagtcgtgatgcccatcgcccgagagttctctccagacctagtcctggtgtctgctggatttgatgctgctgagggtcacccggccccactgggtggctaccatgtttctgccaaatgttttggatacatgacgcagcaactgatgaacctggcaggaggcgcagtggtgctggccttggagggtggccatgacctcacagccatctgtgacgcctctgaggcctgtgtggctgctcttctgggtaacagggtggatcccctttcagaagaaggctggaaacagaaacccaacctcaatgccatccgctctctggaggccgtgatccgggtgcacagtaaatactggggctgcatgcagcgcctggcctcctgtccagactcctgggtgcctagagtgccaggggctgacaaagaagaagtggaggcagtgaccgcactggcgtccctctctgtgggcatcctggctgaagataggccctcggagcagctggtggaggaggaagaacctatgaatctctaaggctctggaaccatctgcccgcccaccatgcccttgggacctggttctcttctaacccctggcaatagcccccattcctgggtctttagagatcctgtgggcaagtagttggaaccagagaacagcctgcctgctttgacagttatcccagggagcgtgagaaaatccctgggtctagaatgggaactgg

SEQ ID NO: 141090 - DNA, 3122 bp, Homo sapiens
  Payload ID: 7721
  Gene Symbol: HDAC7
  Gene Name: histone deacetylase 7
  ENST ID: ENST00000477203
  CDS Start-End: 216-890
ataatacctaccttgcaggaccacgacaggattaagtgaggaaaaacccccatgagagtgttttgccattgtcaagtgagcctgagggaggctgaggggggatcaggctgtatcatgcccccgaggacaaactttccagtttaccctgctccctctctctgtccctaggctgccccaggccctgtgcagacacaccaggccctcagccgcagcccatggacctgcgggtgggccagcggcccccagtggagcccccaccagagcccacattgctggccctgcagcgtccccagcgcctgcaccaccacctcttcctagcaggcctgcagcagcagcgctcggtggagcccatgaggctctccatggacacgccgatgcccgagttgcaggtgggaccccaggaacaagagctgcggcagcttctccacaaggacaagagcaagcgaagtgctgtagccagcagcgtggtcaagcagaagctagcggaggtgattctgaaaaaacagcaggcggccctagaaagaacagtccatcccaacagccccggcattccctacagaaccctggagcccctggagacggaaggagccacccgctccatgctcagcagctttttgcctcctgttcccagcctgcccagtgaccccccagagcacttccctctgcgcaagacagtctctgagcccaacctgaagctgcgctataagcccaagaagtccctggagcggaggaagaatccactgctccgaaaggagagtgcgccccccagcctccggcggcggcccgcagagaccctcggagactcctccccaagtagtagcagcacgcccgcatcagggtgcagctcccccaatgacagcgagcacggccccaatcccatcctgggctgacagtgaccgcaggacccatccgactctgggccctcgggggccaatcctggggagcccccacactcccctcttcctgccccatggcttggagcccgaggctgggggcaccttgccctctcgcctgcagcccattctcctcctggacccctcaggctctcatgccccgctgctgactgtgcccgggcttgggcccttgcccttccactttgcccagtccttaatgaccaccgagcggctctctgggtcaggcctccactggccactgagccggactcgctcagagcccctgccccccagtgccaccgctcccccaccgccgggccccatgcagccccgcctggagcagctcaaaactcacgtccaggtgatcaagaggtcagccaagccgagtgagaagccccggctgcggcagataccctcggctgaagacctggagacagatggcgggggaccgggccaggtggtggacgatggcctggagcacagggagctgggccatgggcagcctgaggccagaggccccgctcctctccagcagcaccctcaggtgttgctctgggaacagcagcgactggctgggcggctcccccggggcagcaccggggacactgtgctgcttcctctggcccagggtgggcaccggcctctgtcccgggctcagtcttccccagccgcacctgcctcactgtcagccccagagcctgccagccaggcccgagtcctctccagctcagagacccctgccaggaccctgcccttcaccacagggctgatctatgactcggtcatgctgaagcaccagtgctcctgcggtgacaacagcaggcacccggagcacgccggccgcatccagagcatctggtcccggctgcaggagcgggggctccggagccagtgtgagtgtctccgaggccggaaggcctccctggaagagctgcagtcggtccactctgagcggcacgtgctcctctacggcaccaacccgctcagccgcctcaaactggacaacgggaagctggcagggctcctggcacagcggatgtttgtgatgctgccctgtggtggggttggggtggacactgacaccatctggaatgagcttcattcctccaatgcagcccgctgggccgctggcagtgtcactgacctcgccttcaaagtggcttctcgtgagctaaagaatggtttcgctgtggtgcggcccccaggacaccatgcagatcattcaacagccatgggcttctgcttcttcaactcagtggccatcgcctgccggcagctgcaacagcagagcaaggccagcaagatcctcattgtagactgggacgtgcaccatggcaacggcacccagcaaaccttctaccaagaccccagtgtgctctacatctccctgcatcgccatgacgacggcaacttcttcccggggagtggggctgtggatgaggtaggggctggcagcggtgagggcttcaatgtcaatgtggcctgggctggaggtctggacccccccatgggggatcctgagtacctggctgctttcaggatagtcgtgatgcccatcgcccgagagttctctccagacctagtcctggtgtctgctggatttgatgctgctgagggtcacccggccccactgggtggctaccatgtttctgccaaatgttttggatacatgacgcagcaactgatgaacctggcaggaggcgcagtggtgctggccttggagggtggccatgacctcacagccatctgtgacgcctctgaggcctgtgtggctgctcttctgggtaacagggtggatcccctttcagaagaaggctggaaacagaaacccaacctcaatgccatccgctctctggaggccgtgatccgggtgcacagtaaatactggggctgcatgcagcgcctggcctcctgtccagactcctgggtgcctagagtgccaggggctgacaaagaagaagtggaggcagtgaccgcactggcgtccctctctgtgggcatcctggctgaagataggccctcggagcagctggtggaggaggaagaacctatgaatctctaaggctctggaaccatctgcccgcccaccatgcccttgggacctggttctcttctaacccctggcaatagcccccattcctgggtctttagagatcctgtgggcaagtagttggaaccagagaacagcctgcctgctttgacagttatcccagggagcgtgagaaaatc

SEQ ID NO: 141091 - DNA, 739 bp, Homo sapiens
  Payload ID: 7721
  Gene Symbol: HDAC7
  Gene Name: histone deacetylase 7
  ENST ID: ENST00000488927
  CDS Start-End: 1-616
gatctatgactcggtcatgctgaagcaccagtgctcctgcggtgacaacagcaggcacccggagcacgccggccgcatccagagcatctggtcccggctgcaggagcgggggctccggagccagtgtgagtgtctccgaggccggaaggcctccctggaagagctgcagtcggtccactctgagcggcacgtgctcctctacggcaccaacccgctcagccgcctcaaactggacaacgggaagctggcagggctcctggcacagcggatgtttgtgatgctgccctgtggtggggttggggtggacactgacaccatctggaatgagcttcattcctccaatgcagcccgctgggccgctggcagtgtcactgacctcgccttcaaagtggcttctcgtgagctaaagaatggtttcgctgtggtgcggcccccaggacaccatgcagatcattcaacagccatgggcttctgcttcttcaactcagtggccatcgcctgccggcagctgcaacagcagagcaaggccagcaagatcctcattgtagactgggtagtgatgataagaataatagcagataacatcagtacaccactaatcacatccagacactgatggttttacacatgatggatttaatcctgactataacccactttacagatgaaagacgtgcaccatggcaacggcacccagcaaaccttctaccaagaccccagtgtgctctacatctccctg

SEQ ID NO: 141092 - DNA, 833 bp, Homo sapiens
  Payload ID: 7722
  Gene Symbol: HDAC8
  Gene Name: histone deacetylase 8
  Uniprot ID: Q9BY41
  ENST ID: ENST00000373554
  CDS Start-End: 93-533
gcggccgatcagaggagcaggaactggaaccctggccgagtccgaaaaaagccagatctggaaggtggctgcggaacggttttaagcggaagatggaggagccggaggaaccggcggacagtgggcagtcgctggtcccggtttatatctatagtcccgagtatgtcagtatgtgtgactccctggccaagatccccaaacgggccagtatggtgcattctttgattgaagcatatgcactgcataagcagatgaggatagttaagcctaaagtggcctccatggaggagatggccaccttccacactgatgcttatctgcagcatctccagaaggtcagccaagagggcgatgatgatcatccggactccatagaatatgggctaggttatgactgcccagccactgaagggatatttgactatgcagcagctataggaggggctacgatcacagctgcccaatgcctgattgacggaatgtgcaaagtagcaattaactggtctggagggtggcatcatgcaaagaagtaagaaaatgacctttctgttttctgactctttccttgagtcagtttctcagttatgtaaactcttatgcttattgtattgacatttacagagagacgtgtgtgtatgtggcactttacaaggcattctgaagaaatccaagtgaaatagaaaaaagattacctaatatagtggaaagcacactgctcaaagtcaggacacctgggctctacacctagtttttctaacttggctaactgacttggactgattaccctccctaggcctcagtttcttcatcaataaaatgaacaaaggatacaa

SEQ ID NO: 141093 - DNA, 704 bp, Homo sapiens
  Payload ID: 7722
  Gene Symbol: HDAC8
  Gene Name: histone deacetylase 8
  Uniprot ID: Q9BY41
  ENST ID: ENST00000373556
  CDS Start-End: 53-529
tccgaaaaaagccagatctggaaggtggctgcggaacggttttaagcggaagatggaggagccggaggaaccggcggacagtgggcagtcgctggtcccggtttatatctatagtcccgagtatgtcagtatgtgtgactccctggccaagatccccaaacgggccagtatggtgcattctttgattgaagcatatgcactgcataagcagatgaggatagttaagcctaaagtggcctccatggaggagatggccaccttccacactgatgcttatctgcagcatctccagaaggtcagccaagagggcgatgatgatcatccggactccatagaatatgggctaggttatgactgcccagccactgaagggatatttgactatgcagcagctataggaggggctacgatcacagctgcccaatgcctgattgacggaatgtgcaaagtagcaattaactggtctggagggtggcatcatgcaaagaaagagacgtgtgtgtatgtggcactttacaaggcattctgaagaaatccaagtgaaatagaaaaaagattacctaatatagtggaaagcacactgctcaaagtcaggacacctgggctctacacctagtttttctaacttggctaactgacttggactgattaccctccctaggcctcagtttcttcatcaataaaatgaacaaaggatacaacta

SEQ ID NO: 141094 - DNA, 632 bp, Homo sapiens
  Payload ID: 7722
  Gene Symbol: HDAC8
  Gene Name: histone deacetylase 8
  Uniprot ID: Q9BY41
  ENST ID: ENST00000373559
  CDS Start-End: 52-471
ccgaaaaaagccagatctggaaggtggctgcggaacggttttaagcggaagatggaggagccggaggaaccggcggacagtgggcagtcgctggtcccggtttatatctatagtcccgagtatgtcagtatgtgtgactccctggccaagatccccaaacgggccagtatggtgcattctttgattgaagcatatgcactgcataagcagatgagagatgaagcatctggtttttgttatctcaatgatgctgtcctgggaatattacgattgcgacggaaatttgagcgtattctctacgtggatttggatctgcaccatggagatggaacaggtgacgtgtctgatgttggcctagggaagggacggtactacagtgtaaatgtgcccattcaggatggcatacaagatgaaaaatattaccagatctgtgaaaggtacgaacctcctgccccaaatccaggcctgtagaagcagctgccgcagcttgtcttccccatttgcatagccttgtctgaaaactagactgctgaatactgaaggatcaggtttctcatcaagaaaactgcattttaaatgaatatcttgtatgtttatagggaagttactaatgtagtataaagagatgcctg

SEQ ID NO: 141095 - DNA, 819 bp, Homo sapiens
  Payload ID: 7722
  Gene Symbol: HDAC8
  Gene Name: histone deacetylase 8
  ENST ID: ENST00000373560
  CDS Start-End: 64-534
ccctggccgagtccgaaaaaagccagatctggaaggtggctgcggaacggttttaagcggaagatggaggagccggaggaaccggcggacagtgggcagtcgctggtcccggtttatatctatagtcccgagtatgtcagtatgtgtgactccctggccaagatccccaaacgggccagtatggtgcattctttgattgaagcatatgcactgcataagcagatgaggatagttaagcctaaagtggcctccatggaggagatggccaccttccacactgatgcttatctgcagcatctccagaaggtcagccaagagggcgatgatgatcatccggactccatagaatatgggctaggttatgactgcccagccactgaagggatatttgactatgcagcagctataggaggggctacgatcacagctgcccaatgcctgattgacggaatgtgcaaagtagcaattaactggtctggagggtggcatcatgcaaagaagtacgaacctcctgccccaaatccaggcctgtagaagcagctgccgcagcttgtcttccccatttgcatagccttgtctgaaaactagactgctgaatactgaaggatcaggtttctcatcaagaaaactgcattttaaatgaatatcttgtatgtttatagggaagttactaatgtagtataaagagatgcctgtcctccccctcctttctggataagagattttatactttcacaaaacgaaaaattaatgatttgcagtgtagcaaacagtactgttacagtggttagggaaactttcccaaaagcaatctggagt

SEQ ID NO: 141096 - DNA, 1037 bp, Homo sapiens
  Payload ID: 7722
  Gene Symbol: HDAC8
  Gene Name: histone deacetylase 8
  ENST ID: ENST00000373568
  CDS Start-End: 293-1037
gtgccataaaaacaatcgatcctaattgacagctatttggacttttacatctgccaaacccttttccttgaactgtggtcactaaatgaggggagtctggtctgggaagtcccatccattccttcaataggatggggagcggtgatagtgtctccggcgatctcaagaataggagggaatgttgaccagggagcaccgctgcggccgatcagaggagcaggaactggaaccctggccgagtccgaaaaaagccagatctggaaggtggctgcggaacggttttaagcggaagatggaggagccggaggaaccggcggacagtgggcagtcgctggtcccggtttatatctatagtcccgagtatgtcagtatgtgtgactccctggccaagatccccaaacgggccagtatggtgcattctttgattgaagcatatgcactgcataagcagatgagagatgaagcatctggtttttgttatctcaatgatgctgtcctgggaatattacgattgcgacggaaatttgagcgtattctctacgtggatttggatctgcaccatggagatggtgtagaagacgcattcagtttcacctccaaagtcatgaccgtgtccctgcacaaattctccccaggatttttcccaggaacaggtgacgtgtctgatgttggcctagggaagggacggtactacagtgtaaatgtgcccattcaggatggcatacaagatgaaaaatattaccagatctgtgaaagtgtactaaaggaagtataccaagcctttaatcccaaagcagtggtcttacagctgggagctgacacaatagctggggatcccatgtgctcctttaacatgactccagtgggaattggcaagtgtcttaagtacatccttcaatggcagttggcaacactcattttgggaggaggaggctataaccttgccaacacggctcgatgctggacatacttgaccggggtcatcctagggaaaacactatcctctgagatcccagatcatgagtttttcacagcat

SEQ ID NO: 141097 - DNA, 2133 bp, Homo sapiens
  Payload ID: 7722
  Gene Symbol: HDAC8
  Gene Name: histone deacetylase 8
  ENST ID: ENST00000373571
  CDS Start-End: 83-844
agaggagcaggaactggaaccctggccgagtccgaaaaaagccagatctggaaggtggctgcggaacggttttaagcggaagatggaggagccggaggaaccggcggacagtgggcagtcgctggtcccggtttatatctatagtcccgagtatgtcagtatgtgtgactccctggccaagatccccaaacgggccagtatggtgcattctttgattgaagcatatgcactgcataagcagatgaggatagttaagcctaaagtggcctccatggaggagatggccaccttccacactgatgcttatctgcagcatctccagaaggtcagccaagagggcgatgatgatcatccggactccatagaatatgggctaggttatgactgcccagccactgaagggatatttgactatgcagcagctataggaggggctacgatcacagctgcccaatgcctgattgacggaatgtgcaaagtagcaattaactggtctggagggtggcatcatgcaaagaaagatgaagcatctggtttttgttatctcaatgatgctgtcctgggaatattacgattgcgacggaaatttgagcgtattctctacgtggatttggatctgcaccatggagatggtgtagaagacgcattcagtttcacctccaaagtcatgaccgtgtccctgcacaaattctccccaggatttttcccaggaacaggtgacgtgtctgatgttggcctagggaagggacggtactacagtgtaaatgtgcccattcaggatggcatacaagatgaaaaatattaccagatctgtgaaagagccctctttatcagaactccttgaggactcattttccctacctggctataatcaaaacaactactccagaaacacctgcctgcctttatcctttcctctctcctaaataccaaacactcataaatgttatatgtatatgcttttcttgtgtgtcactctgtattacccgatcaattctaccatataaatttctcccaaatctatctcttcctccttatccttgctgtcactggcctggatggttgcaaaagccctcatcaaccttcagggtatcctacaatagagcttgagtatctttaaaatggaaatctaattatgccttcaaagcacacacacacagatgcacacatgcacccacacaatgtttgagacattttgtaccctttaagcaaaagtccaaactcattagcctgccgggcatatatagcccacgtttacctctctagcctcatcccaccactcccgctgtcaagccttcatgtttctgcatgcatacttccttctccggacttagtcccctaccagtaaccccacaatcatctctgcctccaacttccctatcgtcaccctacatacctataaatttctatacttttaaaaaaacttttattgcacaataatcacagattcacagaaggttgcaaaaaaatgtacagggaagtcccatgtacccttcttccagcctcccccaatgttgacatcttatacaattatattacggcatcaaaatgaagaagttgatattggacattggtacaagccatagagcttatttagatttcaccagctatatatgcacgtgtgtgtgtgtgtgtgtgtgtgtgtgtgtgtgtagctctatgcaattttatcacacatgtagccttgcataactacaaccacaatcaagatacagatcagtaccatcaccacaaggttccctcatgctacgcctttatagctacatccatccctaacccctggcaaccaactaatctattctccacctctgtaattattattttgcaaatgtaatatgaatgggctcatgcagcagataatcttttgagattggccttcttgacccagcacaattcccttgagagccacccagattttttgcatgtatcaatagtttgctcctttttattaatgagcaatattccagtggcatggttgtaccagtttgtttaaccatttatctgttgaaatacatctgggttgtttccaatgtttggctattacaaattgagctgctacgaacattcatgtacaagttcctacacaaaaataagtcttaaattatctgaaatacattgcccaagagtacaatt

SEQ ID NO: 141098 - DNA, 2014 bp, Homo sapiens
  Payload ID: 7722
  Gene Symbol: HDAC8
  Gene Name: histone deacetylase 8
  Uniprot ID: Q9BY41
  ENST ID: ENST00000373573
  CDS Start-End: 343-1476
aaatggccccgtagggcaacaaggatggttagttttgaccctacttatttgtgccataaaaacaatcgatcctaattgacagctatttggacttttacatctgccaaacccttttccttgaactgtggtcactaaatgaggggagtctggtctgggaagtcccatccattccttcaataggatggggagcggtgatagtgtctccggcgatctcaagaataggagggaatgttgaccagggagcaccgctgcggccgatcagaggagcaggaactggaaccctggccgagtccgaaaaaagccagatctggaaggtggctgcggaacggttttaagcggaagatggaggagccggaggaaccggcggacagtgggcagtcgctggtcccggtttatatctatagtcccgagtatgtcagtatgtgtgactccctggccaagatccccaaacgggccagtatggtgcattctttgattgaagcatatgcactgcataagcagatgaggatagttaagcctaaagtggcctccatggaggagatggccaccttccacactgatgcttatctgcagcatctccagaaggtcagccaagagggcgatgatgatcatccggactccatagaatatgggctaggttatgactgcccagccactgaagggatatttgactatgcagcagctataggaggggctacgatcacagctgcccaatgcctgattgacggaatgtgcaaagtagcaattaactggtctggagggtggcatcatgcaaagaaagatgaagcatctggtttttgttatctcaatgatgctgtcctgggaatattacgattgcgacggaaatttgagcgtattctctacgtggatttggatctgcaccatggagatggtgtagaagacgcattcagtttcacctccaaagtcatgaccgtgtccctgcacaaattctccccaggatttttcccaggaacaggtgacgtgtctgatgttggcctagggaagggacggtactacagtgtaaatgtgcccattcaggatggcatacaagatgaaaaatattaccagatctgtgaaagtgtactaaaggaagtataccaagcctttaatcccaaagcagtggtcttacagctgggagctgacacaatagctggggatcccatgtgctcctttaacatgactccagtgggaattggcaagtgtcttaagtacatccttcaatggcagttggcaacactcattttgggaggaggaggctataaccttgccaacacggctcgatgctggacatacttgaccggggtcatcctagggaaaacactatcctctgagatcccagatcatgagtttttcacagcatatggtcctgattatgtgctggaaatcacgccaagctgccggccagaccgcaatgagccccaccgaatccaacaaatcctcaactacatcaaagggaatctgaagcatgtggtctagttgacagaaagagatcaggtttccagagctgaggagtggtgcctataatgaagacagcgtgtttatgcaagcagtttgtggaatttgtgactgcagggaaaatttgaaagaaattacttcctgaaaatttccaaggggcatcaagtggcagctggcttcctggggtgaagaggcaggcaccccagagtcctcaactggacctaggggaagaaggagatatcccacatttaaagttcttatttaaaaaaacacacacacacaaatgaaatttttaatctttgaaaattatttttaagcgaattggggaggggagtattttaatcatcttaaatgaaacagatcagaagctggatgagagcagtcaccagtttgtagggcaggaggcagctgacaggcagggtttgggcctcaggaccatccaggtggagccctgggagagagggtactgatcagcagactgggaggtggggagaagtccgctggtgttgttttagtgttatatatctttggtttttttaataaaatctttgaaaaccta

SEQ ID NO: 141099 - DNA, 434 bp, Homo sapiens
  Payload ID: 7722
  Gene Symbol: HDAC8
  Gene Name: histone deacetylase 8
  ENST ID: ENST00000373583
  CDS Start-End: 77-271
gcaggaactggaaccctggccgagtccgaaaaaagccagatctggaaggtggctgcggaacggttttaagcggaagatggaggagccggaggaaccggcggacagtgggcagtcgctggtcccggtttatatctatagtcccgagtatgtcagtatgtgtgactccctggccaagatccccaaacgggccagtatggtgcattctttgattgaagcatatgcactgcataagcagatgagaagctggatgagagcagtcaccagtttgtagggcaggaggcagctgacaggcagggtttgggcctcaggaccatccaggtggagccctgggagagagggtactgatcagcagactgggaggtggggagaagtccgctggtgttgttttagtgttatatatctttggtttttttaataaaatctttgaaaaccta

SEQ ID NO: 141100 - DNA, 1740 bp, Homo sapiens
  Payload ID: 7722
  Gene Symbol: HDAC8
  Gene Name: histone deacetylase 8
  Uniprot ID: Q9BY41
  ENST ID: ENST00000373589
  CDS Start-End: 343-1203
aaatggccccgtagggcaacaaggatggttagttttgaccctacttatttgtgccataaaaacaatcgatcctaattgacagctatttggacttttacatctgccaaacccttttccttgaactgtggtcactaaatgaggggagtctggtctgggaagtcccatccattccttcaataggatggggagcggtgatagtgtctccggcgatctcaagaataggagggaatgttgaccagggagcaccgctgcggccgatcagaggagcaggaactggaaccctggccgagtccgaaaaaagccagatctggaaggtggctgcggaacggttttaagcggaagatggaggagccggaggaaccggcggacagtgggcagtcgctggtcccggtttatatctatagtcccgagtatgtcagtatgtgtgactccctggccaagatccccaaacgggccagtatggtgcattctttgattgaagcatatgcactgcataagcagatgagagatgaagcatctggtttttgttatctcaatgatgctgtcctgggaatattacgattgcgacggaaatttgagcgtattctctacgtggatttggatctgcaccatggagatggtgtagaagacgcattcagtttcacctccaaagtcatgaccgtgtccctgcacaaattctccccaggatttttcccaggaacaggtgacgtgtctgatgttggcctagggaagggacggtactacagtgtaaatgtgcccattcaggatggcatacaagatgaaaaatattaccagatctgtgaaagtgtactaaaggaagtataccaagcctttaatcccaaagcagtggtcttacagctgggagctgacacaatagctggggatcccatgtgctcctttaacatgactccagtgggaattggcaagtgtcttaagtacatccttcaatggcagttggcaacactcattttgggaggaggaggctataaccttgccaacacggctcgatgctggacatacttgaccggggtcatcctagggaaaacactatcctctgagatcccagatcatgagtttttcacagcatatggtcctgattatgtgctggaaatcacgccaagctgccggccagaccgcaatgagccccaccgaatccaacaaatcctcaactacatcaaagggaatctgaagcatgtggtctagttgacagaaagagatcaggtttccagagctgaggagtggtgcctataatgaagacagcgtgtttatgcaagcagtttgtggaatttgtgactgcagggaaaatttgaaagaaattacttcctgaaaatttccaaggggcatcaagtggcagctggcttcctggggtgaagaggcaggcaccccagagtcctcaactggacctaggggaagaaggagatatcccacatttaaagttcttatttaaaaaaacacacacacacaaatgaaatttttaatctttgaaaattatttttaagcgaattggggaggggagtattttaatcatcttaaatgaaacagatcagaagctggatgagagcagtcaccagtttgtagggcaggaggcagctgacaggcagggtttgggcctcaggaccatccaggtggagccctgggagagagggtactgatcagcagactgggaggtggggagaagtccgctggtgttgttttagtgttatatatctttggtttttttaataaaatctttgaaaacct

SEQ ID NO: 141101 - DNA, 913 bp, Homo sapiens
  Payload ID: 7722
  Gene Symbol: HDAC8
  Gene Name: histone deacetylase 8
  ENST ID: ENST00000415409
  CDS Start-End: 16-913
ggttttaagcggaagatggaggagccggaggaaccggcggacagtgggcagtcgctggtcccggtttatatctatagtcccgagtatgtcagtatgtgtgactccctggccaagatccccaaacgggccagtatggtgcattctttgattgaagcatatgcactgcataagcagatgaggatagttaagcctaaagtggcctccatggaggagatggccaccttccacactgatgcttatctgcagcatctccagaaggtcagccaagagggcgatgatgatcatccggactccatagaatatgggctaggttatgactgcccagccactgaagggatatttgactatgcagcagctataggaggggctacgatcacagctgcccaatgcctgattgacggaatgtgcaaagtagcaattaactggtctggagggtggcatcatgcaaagaaagatgaagcatctggtttttgttatctcaatgatgctgtcctgggaatattacgattgcgacggaaatttgagcgtattctctacgtggatttggatctgcaccatggagatggaacaggtgacgtgtctgatgttggcctagggaagggacggtactacagtgtaaatgtgcccattcaggatggcatacaagatgaaaaatattaccagatctgtgaaagtgtactaaaggaagtataccaagcctttaatcccaaagcagtggtcttacagctgggagctgacacaatagctggggatcccatgtgctcctttaacatgactccagtgggaattggcaagtgtcttaagtacatccttcaatggcagttggcaacactcattttgggaggaggaggctataaccttgccaacacggctcgatgctggacatacttgaccggggtcatcctagggaaaa

SEQ ID NO: 141102 - DNA, 592 bp, Homo sapiens
  Payload ID: 7722
  Gene Symbol: HDAC8
  Gene Name: histone deacetylase 8
  ENST ID: ENST00000421523
  CDS Start-End: 198-592
ccatgggctttgggggtgggggtgggggcggtggacgaaagagcgttaggaagcggagaggacactgggctgggggaaatcttcagaaatttcgagtagctgtatcagatacctaaagctgtatcagaaggaagtgttctcatatcgtttctgagagcgcagcatgtctcttcgggacgtccaatggacaggccagtatggtgcattctttgattgaagcatatgcactgcataagcagatgaggatagttaagcctaaagtggcctccatggaggagatggccaccttccacactgatgcttatctgcagcatctccagaaggtcagccaagagggcgatgatgatcatccggactccatagaatatgggctaggttatgactgcccagccactgaagggatatttgactatgcagcagctataggaggggctacgatcacagctgcccaatgcctgattgacggaatgtgcaaagtagcaattaactggtctggagggtggcatcatgcaaagaaagatgaagcatctggtttttgttatctcaatgatgctgtcctgggaatattacgattgcgacggaaatttgagcg

SEQ ID NO: 141103 - DNA, 679 bp, Homo sapiens
  Payload ID: 7722
  Gene Symbol: HDAC8
  Gene Name: histone deacetylase 8
  ENST ID: ENST00000412342
  CDS Start-End: 10-180
aagcggaagatggaggagccggaggaaccggcggacagtgggcagtcgctggtcccggtttatatctatagtcccgagtatgtcagtatgtgtgactccctggccaagatccccaaacgggccagtatggtgcattctttgattgaagcatatgcactgcataagcagatgaggttatgactgcccagccactgaagggatatttgactatgcagcagctataggaggggctacgatcacagctgcccaatgcctgattgacggaatgtgcaaagtagcaattaactggtctggagggtggcatcatgcaaagaaagatgaagcatctggtttttgttatctcaatgatgctgtcctgggaatattacgattgcgacggaaatttgagcgtattctctacgtggatttggatctgcaccatggagatggtgtagaagacgcattcagtttcacctccaaagtcatgaccgtgtccctgcacaaattctccccaggatttttcccaggaacaggtgacgtgtctgatgttggcctagggaagggacggtactacagtgtaaatgtgcccattcaggatggcatacaagatgaaaaatattaccagatctgtgaaagtgtactaaaggaagtataccaagcctttaatcccaaagcagtggtcttacagctgggagctgac

SEQ ID NO: 141104 - DNA, 607 bp, Homo sapiens
  Payload ID: 7722
  Gene Symbol: HDAC8
  Gene Name: histone deacetylase 8
  ENST ID: ENST00000444609
  CDS Start-End: 319-486
atggttagttttgaccctacttatttgtgccataaaaacaatcgatcctaattgacagctatttggacttttacatctgccaaacccttttccttgaactgtggtcactaaatgaggggagtctggtctgggaagtcccatccattccttcaataggatggggagcggtgatagtgtctccggcgatctcaagaataggagggaatgttgaccagggagcaccgctgcggccgatcagaggagcaggaactggaaccctggccgagtccgaaaaaagccagatctggaaggtggctgcggaacggttttaagcggaagatggaggagccggaggaaccggcggacagtgggcagtcgctggtcccggtttatatctatagtcccgagtatgtcagtatgtgtgactccctggccaagatccccaaacgggccagtatggtgcattctttgattgaagcatatgcactgcataagcagatgagttaagcctaaagtggcctccatggaggagatggccaccttccacactgatgcttatctgcagcatctccagaaggtcagccaagagggcgatgatgatcatccggactccatagaatatgggcta

SEQ ID NO: 141105 - DNA, 2338 bp, Homo sapiens
  Payload ID: 7722
  Gene Symbol: HDAC8
  Gene Name: histone deacetylase 8
  Uniprot ID: Q9BY41
  ENST ID: ENST00000439122
  CDS Start-End: 288-1058
ataaaaacaatcgatcctaattgacagctatttggacttttacatctgccaaacccttttccttgaactgtggtcactaaatgaggggagtctggtctgggaagtcccatccattccttcaataggatggggagcggtgatagtgtctccggcgatctcaagaataggagggaatgttgaccagggagcaccgctgcggccgatcagaggagcaggaactggaaccctggccgagtccgaaaaaagccagatctggaaggtggctgcggaacggttttaagcggaagatggaggagccggaggaaccggcggacagtgggcagtcgctggtcccggtttatatctatagtcccgagtatgtcagtatgtgtgactccctggccaagatccccaaacgggccagtatggtgcattctttgattgaagcatatgcactgcataagcagatgaggatagttaagcctaaagtggcctccatggaggagatggccaccttccacactgatgcttatctgcagcatctccagaaggtcagccaagagggcgatgatgatcatccggactccatagaatatgggctaggttatgactgcccagccactgaagggatatttgactatgcagcagctataggaggggctacgatcacagctgcccaatgcctgattgacggaatgtgcaaagtagcaattaactggtctggagggtggcatcatgcaaagaaagatgaagcatctggtttttgttatctcaatgatgctgtcctgggaatattacgattgcgacggaaatttgagcgtattctctacgtggatttggatctgcaccatggagatggtgtagaagacgcattcagtttcacctccaaagtcatgaccgtgtccctgcacaaattctccccaggatttttcccaggaacaggtgacgtgtctgatgttggcctagggaagggacggtactacagtgtaaatgtgcccattcaggatggcatacaagatgaaaaatattaccagatctgtgaaaggtacgaacctcctgccccaaatccaggcctgtagaagcagctgccgcagcttgtcttccccatttgcatagccttgtctgaaaactagactgctgaatactgaaggatcaggtttctcatcaagaaaactgcattttaaatgaatatcttgtatgtttatagggaagttactaatgtagtataaagagatgcctgtcctccccctcctttctggataagagattttatactttcacaaaacgaaaaattaatgatttgcagtgtagcaaacagtactgttacagtggttagggaaactttcccaaaagcaatctggagtgacatttcattcatgtattcatttaatgactatttattgaatgcctactatgtataaagtattgattctaccctcgaggaagttagtggaaatttttaaatgttagataaataaatagagattgattttcatattcacacacatttaaataaataaaacatagaaaattgtaagaaccataagagatagaatgctgtgggtattcaaagagagaaaatacttcagaaaaaggcgtaattgaggaggtaacatttgatctggtttctaaagggtagctaattactctatctttacaaagtgtgtgaatgtatatgagtgtttataaaatctgggtcaagtttgaatatacagagattgtagggaaggatgttctacacacagggtacagcaagatcaaagttgggagagactgagctatgtacaaagaatagcagtggttttagtttggctggactgtaaagtgcatggaggagaagttgcaaagaagattggaaacctgggtgggaaccacatcacggaagagctggaattcttagctatgaaaatttgtaccatattctgtaaacattttgggagccactgaaggttttagaatgagggaatcataagatcaaagcttgcttgggaagattaacactcttcccagtaaagttttggcaacagcatctgctgttatattgacataatgtgggtaaagtggctgacatagtatctgatgcataggagctcagtaagtcatggaagcagatatactgtagtggtttagagcaaaaactctggtgcctggatgcctgggttcaaaaaccagctctgccacttaatagctgtgtgattttgtacagatttcttaacctctctgtatggcagtttccccatctgtaaaataggattaaaaataatacctgttatgaattattatgagggtcaaatgagttaagacatgtaaaatacatagaacagtgctctattctgaataaagttctcaataaatgtta

SEQ ID NO: 141106 - DNA, 908 bp, Homo sapiens
  Payload ID: 7722
  Gene Symbol: HDAC8
  Gene Name: histone deacetylase 8
  ENST ID: ENST00000436675
  CDS Start-End: 98-655
ccgctgcggccgatcagaggagcaggaactggaaccctggccgagtccgaaaaaagccagatctggaaggtggctgcggaacggttttaagcggaagatggaggagccggaggaaccggcggacagtgggcagtcgctggtcccggtttatatctatagtcccgagtatgtcagtatgtgtgactccctggccaagatccccaaacgggccagtatggtgcattctttgattgaagcatatgcactgcataagcagatgaggatagttaagcctaaagtggcctccatggaggagatggccaccttccacactgatgcttatctgcagcatctccagaaggtcagccaagagggcgatgatgatcatccggactccatagaatatgggctaggttatgactgcccagccactgaagggatatttgactatgcagcagctataggaggggctacgatcacagctgcccaatgcctgattgacggaatgtgcaaagtagcaattaactggtctggagggtggcatcatgcaaagaaagatgaagcatctggtttttgttatctcaatgatgctgtcctgggaatattacgattgcgacggaaatttgagcgtattctctacgtggatttggatctgcaccatggagatgtgtactaaaggaagtataccaagcctttaatcccaaagcagtggtcttacagctgggagctgacacaatagctggggatcccatgtgctcctttaacatgactccagtgggaattggcaagtgtcttaagtacatccttcaatggcagttggcaacactcattttgggaggaggaggctataaccttgccaacacggctcgatgctggacatacttgaccggggtcatcctagggaaaacactatcctctgagatcccaga

SEQ ID NO: 141107 - DNA, 3254 bp, Homo sapiens
  Payload ID: 7723
  Gene Symbol: HDAC9
  Gene Name: histone deacetylase 9
  Uniprot ID: Q9UKV0
  ENST ID: ENST00000401921
  CDS Start-End: 42-3119
atggggtggctggacgagagcagctcttggctcagcaaagaatgcacagtatgatcagctcagtggatgtgaagtcagaagttcctgtgggcctggagcccatctcacctttagacctaaggacagacctcaggatgatgatgcccgtggtggaccctgttgtccgtgagaagcaattgcagcaggaattacttcttatccagcagcagcaacaaatccagaagcagcttctgatagcagagtttcagaaacagcatgagaacttgacacggcagcaccaggctcagcttcaggagcatatcaagttgcaacaggaacttctagccataaaacagcaacaagaactcctagaaaaggagcagaaactggagcagcagaggcaagaacaggaagtagagaggcatcgcagagaacagcagcttcctcctctcagaggcaaagatagaggacgagaaagggcagtggcaagtacagaagtaaagcagaagcttcaagagttcctactgagtaaatcagcaacgaaagacactccaactaatggaaaaaatcattccgtgagccgccatcccaagctctggtacacggctgcccaccacacatcattggatcaaagctctccaccccttagtggaacatctccatcctacaagtacacattaccaggagcacaagatgcaaaggatgatttcccccttcgaaaaactgaatcctcagtcagtagcagttctccaggctctggtcccagttcaccaaacaatgggccaactggaagtgttactgaaaatgagacttcggttttgccccctacccctcatgccgagcaaatggtttcacagcaacgcattctaattcatgaagattccatgaacctgctaagtctttatacctctccttctttgcccaacattaccttggggcttcccgcagtgccatcccagctcaatgcttcgaattcactcaaagaaaagcagaagtgtgagacgcagacgcttaggcaaggtgttcctctgcctgggcagtatggaggcagcatcccggcatcttccagccaccctcatgttactttagagggaaagccacccaacagcagccaccaggctctcctgcagcatttattattgaaagaacaaatgcgacagcaaaagcttcttgtagctggtggagttcccttacatcctcagtctcccttggcaacaaaagagagaatttcacctggcattagaggtacccacaaattgccccgtcacagacccctgaaccgaacccagtctgcacctttgcctcagagcacgttggctcagctggtcattcaacagcaacaccagcaattcttggagaagcagaagcaataccagcagcagatccacatgaacaaactgctttcgaaatctattgaacaactgaagcaaccaggcagtcaccttgaggaagcagaggaagagcttcagggggaccaggcgatgcaggaagacagagcgccctctagtggcaacagcactaggagcgacagcagtgcttgtgtggatgacacactgggacaagttggggctgtgaaggtcaaggaggaaccagtggacagtgatgaagatgctcagatccaggaaatggaatctggggagcaggctgcttttatgcaacagcctttcctggaacccacgcacacacgtgcgctctctgtgcgccaagctccgctggctgcggttggcatggatggattagagaaacaccgtctcgtctccaggactcactcttcccctgctgcctctgttttacctcacccagcaatggaccgccccctccagcctggctctgcaactggaattgcctatgaccccttgatgctgaaacaccagtgcgtttgtggcaattccaccacccaccctgagcatgctggacgaatacagagtatctggtcacgactgcaagaaactgggctgctaaataaatgtgagcgaattcaaggtcgaaaagccagcctggaggaaatacagcttgttcattctgaacatcactcactgttgtatggcaccaaccccctggacggacagaagctggaccccaggatactcctaggtgatgactctcaaaagtttttttcctcattaccttgtggtggacttggggtggacagtgacaccatttggaatgagctacactcgtccggtgctgcacgcatggctgttggctgtgtcatcgagctggcttccaaagtggcctcaggagagctgaagaatgggtttgctgttgtgaggccccctggccatcacgctgaagaatccacagccatggggttctgcttttttaattcagttgcaattaccgccaaatacttgagagaccaactaaatataagcaagatattgattgtagatctggatgttcaccatggaaacggtacccagcaggccttttatgctgaccccagcatcctgtacatttcactccatcgctatgatgaagggaactttttccctggcagtggagccccaaatgaggttggaacaggccttggagaagggtacaatataaatattgcctggacaggtggccttgatcctcccatgggagatgttgagtaccttgaagcattcaggaccatcgtgaagcctgtggccaaagagtttgatccagacatggtcttagtatctgctggatttgatgcattggaaggccacacccctcctctaggagggtacaaagtgacggcaaaatgttttggtcatttgacgaagcaattgatgacattggctgatggacgtgtggtgttggctctagaaggaggacatgatctcacagccatctgtgatgcatcagaagcctgtgtaaatgcccttctaggaaatgagctggagccacttgcagaagatattctccaccaaagcccgaatatgaatgctgttatttctttacagaagatcattgaaattcaaagcaagtattggaagtcagtaaggatggtggctgtgccaaggggctgtgctctggctggtgctcagttgcaagaggagacagagaccgtttctgccctggcctccctaacagtggatgtggaacagccctttgctcaggaagacagcagaactgctggtgagcctatggaagaggagccagccttgtgaagtgccaagtccccctctgatatttcctgtgtgtgacatcattgtgtatccccccaccccagtaccctcagacatgtcttgtctgctgcctgggtggcacagattcaatggaacataaacactgggcacaaaatt

SEQ ID NO: 141108 - DNA, 4102 bp, Homo sapiens
  Payload ID: 7723
  Gene Symbol: HDAC9
  Gene Name: histone deacetylase 9
  ENST ID: ENST00000406072
  CDS Start-End: 53-1786
gcactgagcagtgatgaatgtttcatgtagctgaagtaagagtgactggaatatgctgcagacaatttacgagagtgactcctgtttttcctcagatggggtggctggacgagagcagctcttggctcagcaaagaatgcacagtatgatcagctcagtggatgtgaagtcagaagttcctgtgggcctggagcccatctcacctttagacctaaggacagacctcaggatgatgatgcccgtggtggaccctgttgtccgtgagaagcaattgcagcaggaattacttcttatccagcagcagcaacaaatccagaagcagcttctgatagcagagtttcagaaacagcatgagaacttgacacggcagcaccaggctcagcttcaggagcatatcaagttgcaacaggaacttctagccataaaacagcaacaagaactcctagaaaaggagcagaaactggagcagcagaggcaagaacaggaagtagagaggcatcgcagagaacagcagcttcctcctctcagaggcaaagatagaggacgagaaagggcagtggcaagtacagaagtaaagcagaagcttcaagagttcctactgagtaaatcagcaacgaaagacactccaactaatggaaaaaatcattccgtgagccgccatcccaagctctggtacacggctgcccaccacacatcattggatcaaagctctccaccccttagtggaacatctccatcctacaagtacacattaccaggagcacaagatgcaaaggatgatttcccccttcgaaaaactgaatcctcagtcagtagcagttctccaggctctggtcccagttcaccaaacaatgggccaactggaagtgttactgaaaatgagacttcggttttgccccctacccctcatgccgagcaaatggtttcacagcaacgcattctaattcatgaagattccatgaacctgctaagtctttatacctctccttctttgcccaacattaccttggggcttcccgcagtgccatcccagctcaatgcttcgaattcactcaaagaaaagcagaagtgtgagacgcagacgcttaggcaaggtgttcctctgcctgggcagtatggaggcagcatcccggcatcttccagccaccctcatgttactttagagggaaagccacccaacagcagccaccaggctctcctgcagcatttattattgaaagaacaaatgcgacagcaaaagcttcttgtagctggtggagttcccttacatcctcagtctcccttggcaacaaaagagagaatttcacctggcattagaggtacccacaaattgccccgtcacagacccctgaaccgaacccagtctgcacctttgcctcagagcacgttggctcagctggtcattcaacagcaacaccagcaattcttggagaagcagaagcaataccagcagcagatccacatgaacaaactgctttcgaaatctattgaacaactgaagcaaccaggcagtcaccttgaggaagcagaggaagagcttcagggggaccaggcgatgcaggaagacagagcgccctctagtggcaacagcactaggagcgacagcagtgcttgtgtggatgacacactgggacaagttggggctgtgaaggtcaaggaggaaccagtggacagtgatgaagatgctcagatccaggaaatggaatctggggagcaggctgcttttatgcaacaggtaataggcaaagatttagctccaggatttgtaattaaagtcattatctgaacatgaaatgcattgcaggtttggtaaatggatatgatttcctatcagtttatatttctctatgatttgagttcagtgtttaaggattctacctaatgcagatatatgtatatatctatatagaggtctttctatatactgatctctatatagatatcaatgtttcattgaaaatccactggtaaggaaatacctgttatactaaaattatgatacataatatctgagcagttaataggctttaaatttatcccaaagcctgctacaccaattacttctaaagaaaacaaattcactgttattttgagtttatgtgttgagatcagtgactgctggatagtctcccagtctgatcaatgaagcattcgattagtttttgattttttgcaacatctagaatttaattttcacatcactgtacataatgtatcatactatagtcttgaacactgttaaaggtagtctgccccttccttcctctctctttttttagttaagtagaaatgttctggtcaccatgccagtagtcctaggttattgtgtaggttgcaattgaacatattaggaatacaggtggttttaaatatatagatgcaaattgcagcactactttaaatattagattatgtctcacatagcactgctcattttacttttattttgtgtaatttgatgacactgtctatcaaaaaagagcaaatgaagcagatgcaaatgttagtgagaagtaatgtgcagcattatggtccaatcagatacaatattgtgtctacaattgcaaaaaacacagtaacaggatgaatattatctgatatcaagtcaaaatcagtttgaaaagaaggtgtatcatattttatattgtcactagaatctcttaagtataattccataatgacatgggcatataccgtaacattctggcaaataacaattagaaaagataggtttaacaaaaaaatttacttgtatataatgcaccttcaggaggactatgtcctttgatgctataaaatacaaacaactttgaaggcaacagaagacactgtttattcaagtcagttctttgtcaggttcctgctgttctcctacagaaaagtgattctgtgagggtgaacaggaaatgccttgtggaaacaggaagtccaagtgattcatgtactgaggaatgtaggaaaaaaaatctgaggatagtgctttactctttctgtttttaaagggcactctatgaattgatttattgtctaagaaaataacaccacaagtagggaaattgttacggaagcttttcactggaacatttccttcatattcccttttgatatgtttaccttgttttataggtttacttttgttaagctagttaaaggttcgttgtattaagacccctttaatatggataatccaaattgacctagaatctttgtgaggttttttctattaaaatatttatatttctaaatccgaggtatttcaaggtgtagtatcctatttcaaaggagatatagcagttttgccaaatgtagacattgttcaactgtatgttattggcacgtgttgtttacattttgctgtgacatttaaaaatatttctttaaaaatgttactgctaaagatacattatccttttttaaaaagtctccattcaaattaaattaacataactagaagttagaaagtttaaaagttttccacataatgaaagtccttctgataatttgacaaatagctataataggaacactccctatcaccaacatattttggttagtatattccttcatattaaaatgactttttgtcagttgttttgcattaaaaatatggcatgcctaagataaaattgtatattttttccatctcataaatattcattttcttcaaagtcttttttcaatctcataaaaaagggatagtgcatcttttaaaatacattttatttggggaggaacatgtggctgagcagacttttgtataatattacttcaaagatatgtaatcacaaacaaaaaaaactattttttataatgtcatttgagagagtttcatcagtacagttggtggacgttaattgtttgaatttgatagtctttgaatttaatcaagaaactacctggaaccagtgaaaaggaaagctggacttaaataatcttagaattaattgataaatgtctcttttaaaatctactgtatttattataatttacacccttgaaggtgatctcttgttttgtgttgtaaatatattgtttgtatgtttcccttcttgccttctgttataagtctcttcctttctcaaataaagttttttttaaaaga

SEQ ID NO: 141109 - DNA, 4239 bp, Homo sapiens
  Payload ID: 7723
  Gene Symbol: HDAC9
  Gene Name: histone deacetylase 9
  Uniprot ID: Q9UKV0
  ENST ID: ENST00000405010
  CDS Start-End: 151-1923
ggggaagagaggcacagacacagataggagaagggcaccggctggagccacttgcaggactgagggtttttgcaacaaaaccctagcagcctgaagaactctaagccagatggggtggctggacgagagcagctcttggctcagcaaagaatgcacagtatgatcagctcagtggatgtgaagtcagaagttcctgtgggcctggagcccatctcacctttagacctaaggacagacctcaggatgatgatgcccgtggtggaccctgttgtccgtgagaagcaattgcagcaggaattacttcttatccagcagcagcaacaaatccagaagcagcttctgatagcagagtttcagaaacagcatgagaacttgacacggcagcaccaggctcagcttcaggagcatatcaaggaacttctagccataaaacagcaacaagaactcctagaaaaggagcagaaactggagcagcagaggcaagaacaggaagtagagaggcatcgcagagaacagcagcttcctcctctcagaggcaaagatagaggacgagaaagggcagtggcaagtacagaagtaaagcagaagcttcaagagttcctactgagtaaatcagcaacgaaagacactccaactaatggaaaaaatcattccgtgagccgccatcccaagctctggtacacggctgcccaccacacatcattggatcaaagctctccaccccttagtggaacatctccatcctacaagtacacattaccaggagcacaagatgcaaaggatgatttcccccttcgaaaaactgcctctgagcccaacttgaaggtgcggtccaggttaaaacagaaagtggcagagaggagaagcagccccttactcaggcggaaggatggaaatgttgtcacttcattcaagaagcgaatgtttgaggtgacagaatcctcagtcagtagcagttctccaggctctggtcccagttcaccaaacaatgggccaactggaagtgttactgaaaatgagacttcggttttgccccctacccctcatgccgagcaaatggtttcacagcaacgcattctaattcatgaagattccatgaacctgctaagtctttatacctctccttctttgcccaacattaccttggggcttcccgcagtgccatcccagctcaatgcttcgaattcactcaaagaaaagcagaagtgtgagacgcagacgcttaggcaaggtgttcctctgcctgggcagtatggaggcagcatcccggcatcttccagccaccctcatgttactttagagggaaagccacccaacagcagccaccaggctctcctgcagcatttattattgaaagaacaaatgcgacagcaaaagcttcttgtagctggtggagttcccttacatcctcagtctcccttggcaacaaaagagagaatttcacctggcattagaggtacccacaaattgccccgtcacagacccctgaaccgaacccagtctgcacctttgcctcagagcacgttggctcagctggtcattcaacagcaacaccagcaattcttggagaagcagaagcaataccagcagcagatccacatgaacaaactgctttcgaaatctattgaacaactgaagcaaccaggcagtcaccttgaggaagcagaggaagagcttcagggggaccaggcgatgcaggaagacagagcgccctctagtggcaacagcactaggagcgacagcagtgcttgtgtggatgacacactgggacaagttggggctgtgaaggtcaaggaggaaccagtggacagtgatgaagatgctcagatccaggaaatggaatctggggagcaggctgcttttatgcaacaggtaataggcaaagatttagctccaggatttgtaattaaagtcattatctgaacatgaaatgcattgcaggtttggtaaatggatatgatttcctatcagtttatatttctctatgatttgagttcagtgtttaaggattctacctaatgcagatatatgtatatatctatatagaggtctttctatatactgatctctatatagatatcaatgtttcattgaaaatccactggtaaggaaatacctgttatactaaaattatgatacataatatctgagcagttaataggctttaaatttatcccaaagcctgctacaccaattacttctaaagaaaacaaattcactgttattttgagtttatgtgttgagatcagtgactgctggatagtctcccagtctgatcaatgaagcattcgattagtttttgattttttgcaacatctagaatttaattttcacatcactgtacataatgtatcatactatagtcttgaacactgttaaaggtagtctgccccttccttcctctctctttttttagttaagtagaaatgttctggtcaccatgccagtagtcctaggttattgtgtaggttgcaattgaacatattaggaatacaggtggttttaaatatatagatgcaaattgcagcactactttaaatattagattatgtctcacatagcactgctcattttacttttattttgtgtaatttgatgacactgtctatcaaaaaagagcaaatgaagcagatgcaaatgttagtgagaagtaatgtgcagcattatggtccaatcagatacaatattgtgtctacaattgcaaaaaacacagtaacaggatgaatattatctgatatcaagtcaaaatcagtttgaaaagaaggtgtatcatattttatattgtcactagaatctcttaagtataattccataatgacatgggcatataccgtaacattctggcaaataacaattagaaaagataggtttaacaaaaaaatttacttgtatataatgcaccttcaggaggactatgtcctttgatgctataaaatacaaacaactttgaaggcaacagaagacactgtttattcaagtcagttctttgtcaggttcctgctgttctcctacagaaaagtgattctgtgagggtgaacaggaaatgccttgtggaaacaggaagtccaagtgattcatgtactgaggaatgtaggaaaaaaaatctgaggatagtgctttactctttctgtttttaaagggcactctatgaattgatttattgtctaagaaaataacaccacaagtagggaaattgttacggaagcttttcactggaacatttccttcatattcccttttgatatgtttaccttgttttataggtttacttttgttaagctagttaaaggttcgttgtattaagacccctttaatatggataatccaaattgacctagaatctttgtgaggttttttctattaaaatatttatatttctaaatccgaggtatttcaaggtgtagtatcctatttcaaaggagatatagcagttttgccaaatgtagacattgttcaactgtatgttattggcacgtgttgtttacattttgctgtgacatttaaaaatatttctttaaaaatgttactgctaaagatacattatccttttttaaaaagtctccattcaaattaaattaacataactagaagttagaaagtttaaaagttttccacataatgaaagtccttctgataatttgacaaatagctataataggaacactccctatcaccaacatattttggttagtatattccttcatattaaaatgactttttgtcagttgttttgcattaaaaatatggcatgcctaagataaaattgtatattttttccatctcataaatattcattttcttcaaagtcttttttcaatctcataaaaaagggatagtgcatcttttaaaatacattttatttggggaggaacatgtggctgagcagacttttgtataatattacttcaaagatatgtaatcacaaacaaaaaaaactattttttataatgtcatttgagagagtttcatcagtacagttggtggacgttaattgtttgaatttgatagtctttgaatttaatcaagaaactacctggaaccagtgaaaaggaaagctggacttaaataatcttagaattaattgataaatgtctcttttaaaatctactgtatttattataatttacacccttgaaggtgatctcttgttttgtgttgtaaatatattgtttgtatgtttcccttcttgccttctgttataagtctcttcctttctcaaataaagttttttttaaaaga

SEQ ID NO: 141110 - DNA, 9705 bp, Homo sapiens
  Payload ID: 7723
  Gene Symbol: HDAC9
  Gene Name: histone deacetylase 9
  Uniprot ID: Q9UKV0
  ENST ID: ENST00000406451
  CDS Start-End: 151-3351
ggggaagagaggcacagacacagataggagaagggcaccggctggagccacttgcaggactgagggtttttgcaacaaaaccctagcagcctgaagaactctaagccagatggggtggctggacgagagcagctcttggctcagcaaagaatgcacagtatgatcagctcagtggatgtgaagtcagaagttcctgtgggcctggagcccatctcacctttagacctaaggacagacctcaggatgatgatgcccgtggtggaccctgttgtccgtgagaagcaattgcagcaggaattacttcttatccagcagcagcaacaaatccagaagcagcttctgatagcagagtttcagaaacagcatgagaacttgacacggcagcaccaggctcagcttcaggagcatatcaaggaacttctagccataaaacagcaacaagaactcctagaaaaggagcagaaactggagcagcagaggcaagaacaggaagtagagaggcatcgcagagaacagcagcttcctcctctcagaggcaaagatagaggacgagaaagggcagtggcaagtacagaagtaaagcagaagcttcaagagttcctactgagtaaatcagcaacgaaagacactccaactaatggaaaaaatcattccgtgagccgccatcccaagctctggtacacggctgcccaccacacatcattggatcaaagctctccaccccttagtggaacatctccatcctacaagtacacattaccaggagcacaagatgcaaaggatgatttcccccttcgaaaaactgcctctgagcccaacttgaaggtgcggtccaggttaaaacagaaagtggcagagaggagaagcagccccttactcaggcggaaggatggaaatgttgtcacttcattcaagaagcgaatgtttgaggtgacagaatcctcagtcagtagcagttctccaggctctggtcccagttcaccaaacaatgggccaactggaagtgttactgaaaatgagacttcggttttgccccctacccctcatgccgagcaaatggtttcacagcaacgcattctaattcatgaagattccatgaacctgctaagtctttatacctctccttctttgcccaacattaccttggggcttcccgcagtgccatcccagctcaatgcttcgaattcactcaaagaaaagcagaagtgtgagacgcagacgcttaggcaaggtgttcctctgcctgggcagtatggaggcagcatcccggcatcttccagccaccctcatgttactttagagggaaagccacccaacagcagccaccaggctctcctgcagcatttattattgaaagaacaaatgcgacagcaaaagcttcttgtagctggtggagttcccttacatcctcagtctcccttggcaacaaaagagagaatttcacctggcattagaggtacccacaaattgccccgtcacagacccctgaaccgaacccagtctgcacctttgcctcagagcacgttggctcagctggtcattcaacagcaacaccagcaattcttggagaagcagaagcaataccagcagcagatccacatgaacaaactgctttcgaaatctattgaacaactgaagcaaccaggcagtcaccttgaggaagcagaggaagagcttcagggggaccaggcgatgcaggaagacagagcgccctctagtggcaacagcactaggagcgacagcagtgcttgtgtggatgacacactgggacaagttggggctgtgaaggtcaaggaggaaccagtggacagtgatgaagatgctcagatccaggaaatggaatctggggagcaggctgcttttatgcaacagcctttcctggaacccacgcacacacgtgcgctctctgtgcgccaagctccgctggctgcggttggcatggatggattagagaaacaccgtctcgtctccaggactcactcttcccctgctgcctctgttttacctcacccagcaatggaccgccccctccagcctggctctgcaactggaattgcctatgaccccttgatgctgaaacaccagtgcgtttgtggcaattccaccacccaccctgagcatgctggacgaatacagagtatctggtcacgactgcaagaaactgggctgctaaataaatgtgagcgaattcaaggtcgaaaagccagcctggaggaaatacagcttgttcattctgaacatcactcactgttgtatggcaccaaccccctggacggacagaagctggaccccaggatactcctaggtgatgactctcaaaagtttttttcctcattaccttgtggtggacttggggtggacagtgacaccatttggaatgagctacactcgtccggtgctgcacgcatggctgttggctgtgtcatcgagctggcttccaaagtggcctcaggagagctgaagaatgggtttgctgttgtgaggccccctggccatcacgctgaagaatccacagccatggggttctgcttttttaattcagttgcaattaccgccaaatacttgagagaccaactaaatataagcaagatattgattgtagatctggatgttcaccatggaaacggtacccagcaggccttttatgctgaccccagcatcctgtacatttcactccatcgctatgatgaagggaactttttccctggcagtggagccccaaatgaggttggaacaggccttggagaagggtacaatataaatattgcctggacaggtggccttgatcctcccatgggagatgttgagtaccttgaagcattcaggaccatcgtgaagcctgtggccaaagagtttgatccagacatggtcttagtatctgctggatttgatgcattggaaggccacacccctcctctaggagggtacaaagtgacggcaaaatgttttggtcatttgacgaagcaattgatgacattggctgatggacgtgtggtgttggctctagaaggaggacatgatctcacagccatctgtgatgcatcagaagcctgtgtaaatgcccttctaggaaatgagctggagccacttgcagaagatattctccaccaaagcccgaatatgaatgctgttatttctttacagaagatcattgaaattcaaagcaagtattggaagtcagtaaggatggtggctgtgccaaggggctgtgctctggctggtgctcagttgcaagaggagacagagaccgtttctgccctggcctccctaacagtggatgtggaacagccctttgctcaggaagacagcagaactgctggtgagcctatggaagaggagccagccttgtgaagtgccaagtccccctctgatatttcctgtgtgtgacatcattgtgtatccccccaccccagtaccctcagacatgtcttgtctgctgcctgggtggcacagattcaatggaacataaacactgggcacaaaattctgaacagcagcttcacttgttctttggatggacttgaaagggcattaaagattccttaaacgtaaccgctgtgattctagagttacagtaaaccacgattggaagaaactgcttccagcatgcttttaatatgctgggtgacccactcctagacaccaagtttgaactagaaacattcagtacagcactagatattgttaatttcagaagctatgacagccagtgaaattttgggcaaaacctgagacatagtcattcctgacattctgatcagctttttttggggtaatttgtttttcaaacagtcttaacttgtttacaagatttgcttttagctatgaacggatcgtaattccacccagaatgtaatgtttcttgtttgtttgttttgttttgttagggtttttttctcaactttaacacacagttcaactgttcctagtaaaagttcaagatggaggaactagcatgaggcttttttcagtatctcgaagtccaaatgccaaaggaacctcacacactgtttgtaatggtgcaatattttatatcacttttttttaaacatccccaacatctttgtgttctcacacacaggcaatttgcaatgttgcaattgtgttggagaatgaagtccccccacctcccagccacacacacatcctttgttctcatgacagtaggtctgagcaaatgttccaccaagcattttcagtgtctttgaaaagcacgtaacttttcaaaggtggtcttaatttgttgcatatctatcaaggacttattcactcacctttccttttctgccctctatcaattgatttcttcttacctttcatcattcattccttcctttagaaaaactgaagattacccataatctcctcttattacttgagggccttgactatttagtttattttgtttactttacaggttaacacagttgttttgtctgattgcattttattaactgtgaagccgttgaaatgaatatcacttaagcaacgttgctaaatttctatgtgtttgaaatgtgttaatgaaggcactgcttatttgtagtcaccttgaactgacttaacctagaagctgtgccttcttgtgaaaaaaaaaaaaaacaaaaacaaaaaacagcctttaaacaagtttccttagtgtcaaaagttaaaaataaaggacatttatttctgagataaaaagtaacttactaaatataagtaggttatcctcctacctcctaaaattcgatttcaacatataactcaaacacctaaacatattgaggtagaatatctcacagtatttaatatctgacaatgcttttgaaagagttgatgtttctttttatatatttttctaactcaaaggatatattaaagccataagtgaagattgtcatgcttttattcagaaatctgaaagaaaccttaattaaaacaaggttttagggaaggccatgatatgaaagatatggaacaatatggttttagttagagaggactctaacctgtaaatcaaagatgaaagatttcactcaagtagaattatataactccctttgttatacagtcagaccatatttttcatgcatttggtttttttaggattaccattttaattttaaagacttttattacatatacaaaaatggctcaatacttggtttaacttcttagaaatttgagacaccctttgaaataggaaatctgaaatggaatgtaacttagtattaggtaaaaattgctttcattgcgtaagggcaaattcagtctagattcatagtagtaatcaattttttataaattttattttcatgagaaattcataccaatcatatttgctagcttatgttattttgcagtgattgcttgaggatatttacttaaaaaaatagtagagccaaaggcttaacaaaagactctcccccattttaaaaaggaaactcatgttttaattagaaaaataattgtgtagttttaaaatcaacttcataattataaatctctgtcattactttttagtcctcccagatatttttttagttgttgaataagaaaataaaacagtgtaatgcaaacatgctaatttactaaagtttcctacaacagtttagccacatgtttatgccaagccattaatctgataaagccaaatcactaggacatctccatggttatttagatttaaaacttgacacattaatgagttaatcacacatactcccatatgacaccatacccaattggttgcacttagagtctttaaaatacctggagaagcaaatgaactgtggagaggattatccacagcatgtagttgtaagaacagaatgccattgctttttgattataccattacaagatggagcatagccctgagggacagaatggaggctttccgaaaatatcaacacttcttttgaaatagaccagcactttttgaaagggtagtttcacttggtatagtttttcttcacttacccgtttaaattttattgctcgcagttgttctgaatgagaggctagaagagtattatcaattttgcatctccttgtgatacttactttgaaggaaaatcacatacgctctctcatggtctcatggtatctcatacagggtgaataaaaatgatttttgataaatctactagtaaataatactaggaatttaataagctgtcaaacgtaggtataaaaagaaggcttaaaaattaattttcccaattgtataatttggggctgtatattaaactaaaaaacacagacagttttattaaatagtaaccaaaatggactcaaataaaaccagaggctatgttaccattgcttagtaaatggaaagaacattgtgagatgaactatctttaaatattgtaacaagtttataacatcaatagtggagacagaagtcagctttggagaaaatagagatatttatgaaaaaactactacaaatcacatttccattaccaatcctggggatggaaatattgccttcagtttttactccagccctatacgacactctcactaacctttcactgacaacatcatggccttgaaagcagggatctcctcccacaaaggcttcagaaattacaggactggtctctcttaatagtttagtcctgctttatttccaaagggcaattataaagcctcgtggatttactgggtttctttacagactccatatggaagtaaaatagaatgatcatttggaaagtctcctgggaaaaaattcctcttcaatcagcattttaaaacttttttatttttgagtcagagttttgctcttggtgcccaggctggagtgcaatggcgcaatctcgactcactgcaacctccgcctcccgggttcaagcaattctcctgacgagtagctgggcatgcgccaccacgtctggctaatttttgtatttttagtagagacggggtttctccatgttggtcaggctggtctcaaactcccgacctcaggtgatccgcccgcctcggcctcccaaagtgctgaaattacaggtgtgagccactgcacccggccaaacttattgttttaatcccagcatttatgtttagaagaattaatttaaatatttcttactatttctctgtcgaatgtttactctcatcttatctcaatgaaagaagtattaaaagtcttatggccccaaaagaaacaagccaaactgtactgtcttaaaagtgattcattctgagcttgaaacgactctgtcagtgtttgacattgtcatttctagtggcatgtatcttaacattcttttcctgcttcaggaatgaaatcacttgtcctgctgagaaaataaggggaaaacaagatagaagtaaaaaacaacacacctgttgaactattttcataaagatggcgttttcactttcaaaagaaatgaaaaccagatggtctatgctaagaagtgaaggcattttgttgtcttcagaactgatcaacatggtcatgatcatcatcaaatttcttgtttccaaaggccactattgtagtacagtctccagcaggattttgtaccatgtgctgcctttggaataaagtattataatgtatcttgtcaccttcatcaacaccaccattaaatatgtaagttcctatatgtgactttttctgggcatatttgcatcaaaaatcacagtccttgcctccttgcttgcttttactccatgaaacgcttcatgaagcagagcatgattgtcaagtgaccagaggatgacatttgtaagtgaacgtggtatactcacacatgctatactcatactacataacttagtttctccaaatcaactgcagtccgttttatctatgatattcctggcttcgtataatggttttgtaaaatacattaaatacaattaagtccgttattactatgctggaaataactaggtcagacaatgaaaccttagacttttgattggggctgtttggacttgatccaatgataaggtaataaggttgttgcaatttctcaaagcatcttaattctcaaactgaaacatttagcaaatacatggtgaatctggtgtaaacttacaatctaacaaataattttctttcaactcttctctttttctgcctaacaatctatacgaaattgccaatatctaagcaatcaaaagtttctgaaatctctgtttccttagtagaaatgaccttgacaacttattttctgagataccactaggcctactgtctttcatgccattttatataaacattttgatagatactctgtcttttgttttttatctcttctcttttcaagagtcacttgactttttcaaatattcttaaaagatagatttagttattgtattttggtctacaattttggacttggcagtttgttttactaatgcagaattattctttttgtttcaaacatagtttgccatcatctggctactacctaatcatgttgtactagttattgtggaaagaaaattgtacatacatttccttgtcctttgggagatgtctttgagtcaaacccacaagcatgaactctcacctgaaagaaaactggaaaaggagaaactttaaatcagtatgttttgaaaggaagagatttccagactttttaaagcaaattggaatcgttttatttttttgtttgggccttaggcacaatagaagcaaatgttgcaatattaaatataatagggagagttcactgtttcctgggacattgtggtcatgtccttaatccttcattgtgatgccccttcttggagttggcattttgtgacaattcatagagatcttgcagcaatatttggctattggttttattaacttaaaattcaacagaaatggagtaattaaaaaaaaaaacaaaaaacagagaagaattgcaaaatctgaagtggaatggcacttccttgggtatgtaagggttgtttttagataaaactcccgatttgttcttcctacactttaatagtctcaaattctttctggggaagcaacgtcagtgtctacctccacagtaactatgatataggaaattgtcctttcagtggtttctaggtataacaaacaagccgttaaaaatgagtgaccattttgtaggttacagcctcagcaatctgtgtcatttgaaagcaaatatcctgatatttttaaataaggtgagcagggcaggcaggaaaccaatatttagtacttttgtgattaaacattctagaccaggcttgttgatatgtatgccaatagcctagaatttttggcttagtgtaaaataaaaatgtcttttctattgtggtctgatatccgtttctgtaataagatcagtttgttgtcctctgtgcaccagtggttttgcccttaattttttttggctagcatcaccaagatctgtcatccagagctgctgagaaaaatacatgttgccaaacttttcttaaaattgtgctgccagtggtattttcccagatgtgaaaaataataatctaataaaggattaatatctaataacaataccattgttgaacatgctcatggaatgtccaccttcttctgattccttttttgtatttgaaaatgcaatggtgtgttccaaattattgttggtgttgttaatgtcatgactctcctttgaatagaataaaataaccccttttgttttgtgttttctactgaattagattttcctctagtcctatgtgaataaaaagctatttgaaataaaa

SEQ ID NO: 141111 - DNA, 2307 bp, Homo sapiens
  Payload ID: 7723
  Gene Symbol: HDAC9
  Gene Name: histone deacetylase 9
  Uniprot ID: Q9UKV0
  ENST ID: ENST00000456174
  CDS Start-End: 246-1934
ctccacttaacttctgccttgtggaaggggtggggaagcctttatcaatgggtaggtgggagaaccaggggaagactgtcagctacgattttctctagcctcaagaagactgagaccgagccaaactcctggccaacgtgctttgtggattcacagtgtagcttgagaaaaatgtggatgtgaagtcagaagttcctgtgggcctggagcccatctcacctttagacctaaggacagacctcaggatgatgatgcccgtggtggaccctgttgtccgtgagaagcaattgcagcaggaattacttcttatccagcagcagcaacaaatccagaagcagcttctgatagcagagtttcagaaacagcatgagaacttgacacggcagcaccaggctcagcttcaggagcatatcaagttgcaacaggaacttctagccataaaacagcaacaagaactcctagaaaaggagcagaaactggagcagcagaggcaagaacaggaagtagagaggcatcgcagagaacagcagcttcctcctctcagaggcaaagatagaggacgagaaagggcagtggcaagtacagaagtaaagcagaagcttcaagagttcctactgagtaaatcagcaacgaaagacactccaactaatggaaaaaatcattccgtgagccgccatcccaagctctggtacacggctgcccaccacacatcattggatcaaagctctccaccccttagtggaacatctccatcctacaagtacacattaccaggagcacaagatgcaaaggatgatttcccccttcgaaaaactgcctctgagcccaacttgaaggtgcggtccaggttaaaacagaaagtggcagagaggagaagcagccccttactcaggcggaaggatggaaatgttgtcacttcattcaagaagcgaatgtttgaggtgacagaatcctcagtcagtagcagttctccaggctctggtcccagttcaccaaacaatgggccaactggaagtgttactgaaaatgagacttcggttttgccccctacccctcatgccgagcaaatggtttcacagcaacgcattctaattcatgaagattccatgaacctgctaagtctttatacctctccttctttgcccaacattaccttggggcttcccgcagtgccatcccagctcaatgcttcgaattcactcaaagaaaagcagaagtgtgagacgcagacgcttaggcaaggtgttcctctgcctgggcagtatggaggcagcatcccggcatcttccagccaccctcatgttactttagagggaaagccacccaacagcagccaccaggctctcctgcagcatttattattgaaagaacaaatgcgacagcaaaagcttcttgtagctggtggagttcccttacatcctcagtctcccttggcaacaaaagagagaatttcacctggcattagaggtacccacaaattgccccgtcacagacccctgaaccgaacccagtctgcacctttgcctcagagcacgttggctcagctggtcattcaacagcaacaccagcaattcttggagaagcagaagcaataccagcagcagatccacatgaacaaactgctttcgaaatctattgaacaactgaagcaaccaggcagtcaccttgaggaagcagaggaagagcttcagggggaccaggcgatgcaggaagacagagcgccctctagtggcaacagcactaggagcgacagcagtgcttgtgtggatgacacactgggacaagttggggctgtgaaggtcaaggaggaaccagtggacagtgatgaagatgctcagatccaggaaatggaatctggggagcaggctgcttttatgcaacaggtaataggcaaagatttagctccaggatttgtaattaaagtcattatctgaacatgaaatgcattgcaggtttggtaaatggatatgatttcctatcagtttatatttctctatgatttgagttcagtgtttaaggattctacctaatgcagatatatgtatatatctatatagaggtctttctatatactgatctctatatagatatcaatgtttcattgaaaatccactggtaaggaaatacctgttatactaaaattatgatacataatatctgagcagttaataggctttaaatttatcccaaagcctgctacaccaattacttctaaagaaaacaaattcactgttattttgagtttatgtgttgagatcagtgactgctggatagtctcccagtctgatcaatgaagcattcgattag

SEQ ID NO: 141112 - DNA, 799 bp, Homo sapiens
  Payload ID: 7723
  Gene Symbol: HDAC9
  Gene Name: histone deacetylase 9
  ENST ID: ENST00000413380
  CDS Start-End: 356-799
gctttagccaacttgagctgagagagactgagaaagggggaagagaggcacagacacagataggagaagggcaccggctggagccacttgcaggactgagggtttttgcaacaaaaccctagcagcctgaagaactctaagccaggtttaattggtttctttttctcgtgggtagacttaataattttctacgtattctgacaaagaaataaccccgaagcacgttcctatttcccacctgcttgtagtttccgggataacctaaactccagagagctatagcatccactctgtcctttctgctttgcacacagatggggtggctggacgagagcagctcttggctcagcaaagaatgcacagtatgatcagctcagtggatgtgaagtcagaagttcctgtgggcctggagcccatctcacctttagacctaaggacagacctcaggatgatgatgcccgtggtggaccctgttgtccgtgagaagcaattgcagcaggaattacttcttatccagcagcagcaacaaatccagaagcagcttctgatagcagagtttcagaaacagcatgagaacttgacacggcagcaccaggctcagcttcaggagcatatcaagttgcaacaggaacttctagccataaaacagcaacaagaactcctagaaaaggagcagaaactggagcagcagaggcaagaacaggaagtagagaggcatcgcagagaacagcagcttcctcctctcagaggcaaagatagaggacgagaaagggcagtggcaagtacagaagtaaagcag

SEQ ID NO: 141113 - DNA, 2359 bp, Homo sapiens
  Payload ID: 7723
  Gene Symbol: HDAC9
  Gene Name: histone deacetylase 9
  Uniprot ID: Q9UKV0
  ENST ID: ENST00000428307
  CDS Start-End: 141-1781
ggcacagacacagataggagaagggcaccggctggagccacttgcaggactgagggtttttgcaacaaaaccctagcagcctgaagaactctaagccagatggggtggctggacgagagcagctcttggctcagcaaagaatgcacagtatgatcagctcagtggatgtgaagtcagaagttcctgtgggcctggagcccatctcacctttagacctaaggacagacctcaggatgatgatgcccgtggtggaccctgttgtccgtgagaagcaattgcagcaggaattacttcttatccagcagcagcaacaaatccagaagcagcttctgatagcagagtttcagaaacagcatgagaacttgacacggcagcaccaggctcagcttcaggagcatatcaaggaacttctagccataaaacagcaacaagaactcctagaaaaggagcagaaactggagcagcagaggcaagaacaggaagtagagaggcatcgcagagaacagcagcttcctcctctcagaggcaaagatagaggacgagaaagggcagtggcaagtacagaagtaaagcagaagcttcaagagttcctactgagtaaatcagcaacgaaagacactccaactaatggaaaaaatcattccgtgagccgccatcccaagctctggtacacggctgcccaccacacatcattggatcaaagctctccaccccttagtggaacatctccatcctacaagtacacattaccaggagcacaagatgcaaaggatgatttcccccttcgaaaaactgaatcctcagtcagtagcagttctccaggctctggtcccagttcaccaaacaatgggccaactggaagtgttactgaaaatgagacttcggttttgccccctacccctcatgccgagcaaatggtttcacagcaacgcattctaattcatgaagattccatgaacctgctaagtctttatacctctccttctttgcccaacattaccttggggcttcccgcagtgccatcccagctcaatgcttcgaattcactcaaagaaaagcagaagtgtgagacgcagacgcttaggcaaggtgttcctctgcctgggcagtatggaggcagcatcccggcatcttccagccaccctcatgttactttagagggaaagccacccaacagcagccaccaggctctcctgcagcatttattattgaaagaacaaatgcgacagcaaaagcttcttgtagctggtggagttcccttacatcctcagtctcccttggcaacaaaagagagaatttcacctggcattagaggtacccacaaattgccccgtcacagacccctgaaccgaacccagtctgcacctttgcctcagagcacgttggctcagctggtcattcaacagcaacaccagcaattcttggagaagcagaagcaataccagcagcagatccacatgaacaaactgctttcgaaatctattgaacaactgaagcaaccaggcagtcaccttgaggaagcagaggaagagcttcagggggaccaggcgatgcaggaagacagagcgccctctagtggcaacagcactaggagcgacagcagtgcttgtgtggatgacacactgggacaagttggggctgtgaaggtcaaggaggaaccagtggacagtgatgaagatgctcagatccaggaaatggaatctggggagcaggctgcttttatgcaacaggtaataggcaaagatttagctccaggatttgtaattaaagtcattatctgaacatgaaatgcattgcaggtttggtaaatggatatgatttcctatcagtttatatttctctatgatttgagttcagtgtttaaggattctacctaatgcagatatatgtatatatctatatagaggtctttctatatactgatctctatatagatatcaatgtttcattgaaaatccactggtaaggaaatacctgttatactaaaattatgatacataatatctgagcagttaataggctttaaatttatcccaaagcctgctacaccaattacttctaaagaaaacaaattcactgttattttgagtttatgtgttgagatcagtgactgctggatagtctcccagtctgatcaatgaagcattcgattagtttttgattttttgcaacatctagaatttaattttcacatcactgtacataatgtatcatactatagtcttgaacactgttaaaggtagtctgccccttccttcctctctctttttttagttaagtagaaatgttctggtcaccatgccagtagtcctaggttattgtgtaggttgcaattgaacatattaggaatacaggtggt

SEQ ID NO: 141114 - DNA, 2524 bp, Homo sapiens
  Payload ID: 7723
  Gene Symbol: HDAC9
  Gene Name: histone deacetylase 9
  Uniprot ID: Q9UKV0
  ENST ID: ENST00000417496
  CDS Start-End: 362-2128
gcagcgcgcaccgagccggccgcgccgcgcccgccgctctcgccgctttcgccgcggtctcctcctctagcgcccgccgcggccggtaaatctcggctggaggagcagcggcggcccccgagtcaactttcattccctttttgcttctgcctcaccattctcttctcctcctcgaaagatggctgtttggagaagggggagaagttaagaggtcgccagcgcggagcgaaggagggcgcgatagcctcagcaggagcgggcggaggtttctcctctgccaacccctcctggaccattgtcagcagttgaacgacaaaggctgtgaatctgcatcctagtcttagcagtccctctgattctcatgatgagctcacctgcacagcctgacctcatgtggaaccttgtaccatgggtgctattctgtggctgctgtaggatcttcccagatggggtggctggacgagagcagctcttggctcagcaaagaatgcacagtatgatcagctcagtggatgtgaagtcagaagttcctgtgggcctggagcccatctcacctttagacctaaggacagacctcaggatgatgatgcccgtggtggaccctgttgtccgtgagaagcaattgcagcaggaattacttcttatccagcagcagcaacaaatccagaagcagcttctgatagcagagtttcagaaacagcatgagaacttgacacggcagcaccaggctcagcttcaggagcatatcaaggaacttctagccataaaacagcaacaagaactcctagaaaaggagcagaaactggagcagcagaggcaagaacaggaagtagagaggcatcgcagagaacagcagcttcctcctctcagaggcaaagatagaggacgagaaagggcagtggcaagtacagaagtaaagcagaagcttcaagagttcctactgagtaaatcagcaacgaaagacactccaactaatggaaaaaatcattccgtgagccgccatcccaagctctggtacacggctgcccaccacacatcattggatcaaagctctccaccccttagtggaacatctccatcctacaagtacacattaccaggagcacaagatgcaaaggatgatttcccccttcgaaaaactgaatcctcagtcagtagcagttctccaggctctggtcccagttcaccaaacaatgggccaactggaagtgttactgaaaatgagacttcggttttgccccctacccctcatgccgagcaaatggtttcacagcaacgcattctaattcatgaagattccatgaacctgctaagtctttatacctctccttctttgcccaacattaccttggggcttcccgcagtgccatcccagctcaatgcttcgaattcactcaaagaaaagcagaagtgtgagacgcagacgcttaggcaaggtgttcctctgcctgggcagtatggaggcagcatcccggcatcttccagccaccctcatgttactttagagggaaagccacccaacagcagccaccaggctctcctgcagcatttattattgaaagaacaaatgcgacagcaaaagcttcttgtagctggtggagttcccttacatcctcagtctcccttggcaacaaaagagagaatttcacctggcattagaggtacccacaaattgccccgtcacagacccctgaaccgaacccagtctgcacctttgcctcagagcacgttggctcagctggtcattcaacagcaacaccagcaattcttggagaagcagaagcaataccagcagcagatccacatgaacaaactgctttcgaaatctattgaacaactgaagcaaccaggcagtcaccttgaggaagcagaggaagagcttcagggggaccaggcgatgcaggaagacagagcgccctctagtggcaacagcactaggagcgacagcagtgcttgtgtggatgacacactgggacaagttggggctgtgaaggtcaaggaggaaccagtggacagtgatgaagatgctcagatccaggaaatggaatctggggagcaggctgcttttatgcaacaggtaataggcaaagatttagctccaggatttgtaattaaagtcattatctgaacatgaaatgcattgcaggtttggtaaatggatatgatttcctatcagtttatatttctctatgatttgagttcagtgtttaaggattctacctaatgcagatatatgtatatatctatatagaggtctttctatatactgatctctatatagatatcaatgtttcattgaaaatccactggtaaggaaatacctgttatactaaaattatgatacataatatctgagcagttaataggctttaaatttatcccaaagcctgctacaccaattacttctaaagaaaacaaattcactgttattttgagtttatgtgttgagatcagtgactgctggatagtctcccagtctgatcaatgaagcattcgattagtttttgattttttgcaacatcta

SEQ ID NO: 141115 - DNA, 584 bp, Homo sapiens
  Payload ID: 7723
  Gene Symbol: HDAC9
  Gene Name: histone deacetylase 9
  ENST ID: ENST00000441986
  CDS Start-End: 254-584
gtgcatattcagtctgcttagggacagcagcttctgaatgaaattgcaaactattgcttctgatgaaagatgagactgagataagtaaaatgtagttgggggtgttttgcctttactatgcaactagaaaaaggagctgtgtactgattgtaagcctattctaataggactttaaaaatcagtggatgtgaagtcagaagttcctgtgggcctggagcccatctcacctttagacctaaggacagacctcaggatgatgatgcccgtggtggaccctgttgtccgtgagaagcaattgcagcaggaattacttcttatccagcagcagcaacaaatccagaagcagcttctgatagcagagtttcagaaacagcatgagaacttgacacggcagcaccaggctcagcttcaggagcatatcaaggaacttctagccataaaacagcaacaagaactcctagaaaaggagcagaaactggagcagcagaggcaagaacaggaagtagagaggcatcgcagagaacagcagcttcctcctctcagaggcaaagatagaggacgagaaagggcagtggcaagtacag

SEQ ID NO: 141116 - DNA, 3210 bp, Homo sapiens
  Payload ID: 7723
  Gene Symbol: HDAC9
  Gene Name: histone deacetylase 9
  Uniprot ID: Q9UKV0
  ENST ID: ENST00000441542
  CDS Start-End: 1-3210
atgcacagtatgatcagctcagtggatgtgaagtcagaagttcctgtgggcctggagcccatctcacctttagacctaaggacagacctcaggatgatgatgcccgtggtggaccctgttgtccgtgagaagcaattgcagcaggaattacttcttatccagcagcagcaacaaatccagaagcagcttctgatagcagagtttcagaaacagcatgagaacttgacacggcagcaccaggctcagcttcaggagcatatcaagttgcaacaggaacttctagccataaaacagcaacaagaactcctagaaaaggagcagaaactggagcagcagaggcaagaacaggaagtagagaggcatcgcagagaacagcagcttcctcctctcagaggcaaagatagaggacgagaaagggcagtggcaagtacagaagtaaagcagaagcttcaagagttcctactgagtaaatcagcaacgaaagacactccaactaatggaaaaaatcattccgtgagccgccatcccaagctctggtacacggctgcccaccacacatcattggatcaaagctctccaccccttagtggaacatctccatcctacaagtacacattaccaggagcacaagatgcaaaggatgatttcccccttcgaaaaactgcctctgagcccaacttgaaggtgcggtccaggttaaaacagaaagtggcagagaggagaagcagccccttactcaggcggaaggatggaaatgttgtcacttcattcaagaagcgaatgtttgaggtgacagaatcctcagtcagtagcagttctccaggctctggtcccagttcaccaaacaatgggccaactggaagtgttactgaaaatgagacttcggttttgccccctacccctcatgccgagcaaatggtttcacagcaacgcattctaattcatgaagattccatgaacctgctaagtctttatacctctccttctttgcccaacattaccttggggcttcccgcagtgccatcccagctcaatgcttcgaattcactcaaagaaaagcagaagtgtgagacgcagacgcttaggcaaggtgttcctctgcctgggcagtatggaggcagcatcccggcatcttccagccaccctcatgttactttagagggaaagccacccaacagcagccaccaggctctcctgcagcatttattattgaaagaacaaatgcgacagcaaaagcttcttgtagctggtggagttcccttacatcctcagtctcccttggcaacaaaagagagaatttcacctggcattagaggtacccacaaattgccccgtcacagacccctgaaccgaacccagtctgcacctttgcctcagagcacgttggctcagctggtcattcaacagcaacaccagcaattcttggagaagcagaagcaataccagcagcagatccacatgaacaaactgctttcgaaatctattgaacaactgaagcaaccaggcagtcaccttgaggaagcagaggaagagcttcagggggaccaggcgatgcaggaagacagagcgccctctagtggcaacagcactaggagcgacagcagtgcttgtgtggatgacacactgggacaagttggggctgtgaaggtcaaggaggaaccagtggacagtgatgaagatgctcagatccaggaaatggaatctggggagcaggctgcttttatgcaacagcctttcctggaacccacgcacacacgtgcgctctctgtgcgccaagctccgctggctgcggttggcatggatggattagagaaacaccgtctcgtctccaggactcactcttcccctgctgcctctgttttacctcacccagcaatggaccgccccctccagcctggctctgcaactggaattgcctatgaccccttgatgctgaaacaccagtgcgtttgtggcaattccaccacccaccctgagcatgctggacgaatacagagtatctggtcacgactgcaagaaactgggctgctaaataaatgtgagcgaattcaaggtcgaaaagccagcctggaggaaatacagcttgttcattctgaacatcactcactgttgtatggcaccaaccccctggacggacagaagctggaccccaggatactcctaggtgatgactctcaaaagtttttttcctcattaccttgtggtggacttggggtggacagtgacaccatttggaatgagctacactcgtccggtgctgcacgcatggctgttggctgtgtcatcgagctggcttccaaagtggcctcaggagagctgaagaatgggtttgctgttgtgaggccccctggccatcacgctgaagaatccacagccatggggttctgcttttttaattcagttgcaattaccgccaaatacttgagagaccaactaaatataagcaagatattgattgtagatctggatgttcaccatggaaacggtacccagcaggccttttatgctgaccccagcatcctgtacatttcactccatcgctatgatgaagggaactttttccctggcagtggagccccaaatgaggttggaacaggccttggagaagggtacaatataaatattgcctggacaggtggccttgatcctcccatgggagatgttgagtaccttgaagcattcaggaccatcgtgaagcctgtggccaaagagtttgatccagacatggtcttagtatctgctggatttgatgcattggaaggccacacccctcctctaggagggtacaaagtgacggcaaaatgttttggtcatttgacgaagcaattgatgacattggctgatggacgtgtggtgttggctctagaaggaggacatgatctcacagccatctgtgatgcatcagaagcctgtgtaaatgcccttctaggaaatgagctggagccacttgcagaagatattctccaccaaagcccgaatatgaatgctgttatttctttacagaagatcattgaaattcaaagcaagtattggaagtcagtaaggatggtggctgtgccaaggggctgtgctctggctggtgctcagttgcaagaggagacagagaccgtttctgccctggcctccctaacagtggatgtggaacagccctttgctcaggaagacagcagaactgctggtgagcctatggaagaggagccagccttgtga

SEQ ID NO: 141117 - DNA, 602 bp, Homo sapiens
  Payload ID: 7723
  Gene Symbol: HDAC9
  Gene Name: histone deacetylase 9
  ENST ID: ENST00000433709
  CDS Start-End: 535-602
gagtatacttagagtatggagctgacaaacattctctttccttctcctcctcctcctcctcattctgttgaattgctggtttctgtagtctattaggcttcttattaatagtaataaaatgttcattcattaactctctcatgcctgcataccagctatagtaactgtctttgcccccaagttatgcagtctttataaagtcgttcagtagcagggcaatgagttgggaaaactgatattgcatctgtagcatcaggtactatttaaccagtgggagggactgataaaattagcaagttgactaaccacttcccttccttgtggctctttaatattataacggatacagaaaagttcagaaggactgagctagtttgcgaaaccacagcacactttggcaaagagggaatgcacaacaaaacgggagtacctggtaaaatgctgtggtgtatggagacagttatgagaaactggagggaggatgatagttgagatggggtggctggacgagagcagctcttggctcagcaaagaatgcacagtatgatcagctcagtggatgtgaagtcagaagttcctgtgggcctggagcccatctcacc

SEQ ID NO: 141118 - DNA, 3099 bp, Homo sapiens
  Payload ID: 7723
  Gene Symbol: HDAC9
  Gene Name: histone deacetylase 9
  Uniprot ID: Q9UKV0
  ENST ID: ENST00000432645
  CDS Start-End: 1-3036
atgcacagtatgatcagctcagtggatgtgaagtcagaagttcctgtgggcctggagcccatctcacctttagacctaaggacagacctcaggatgatgatgcccgtggtggaccctgttgtccgtgagaagcaattgcagcaggaattacttcttatccagcagcagcaacaaatccagaagcagcttctgatagcagagtttcagaaacagcatgagaacttgacacggcagcaccaggctcagcttcaggagcatatcaaggaacttctagccataaaacagcaacaagaactcctagaaaaggagcagaaactggagcagcagaggcaagaacaggaagtagagaggcatcgcagagaacagcagcttcctcctctcagaggcaaagatagaggacgagaaagggcagtggcaagtacagaagtaaagcagaagcttcaagagttcctactgagtaaatcagcaacgaaagacactccaactaatggaaaaaatcattccgtgagccgccatcccaagctctggtacacggctgcccaccacacatcattggatcaaagctctccaccccttagtggaacatctccatcctacaagtacacattaccaggagcacaagatgcaaaggatgatttcccccttcgaaaaactgcctctgagcccaacttgaaggtgcggtccaggttaaaacagaaagtggcagagaggagaagcagccccttactcaggcggaaggatggaaatgttgtcacttcattcaagaagcgaatgtttgaggtgacagaatcctcagtcagtagcagttctccaggctctggtcccagttcaccaaacaatgggccaactggaagtgttactgaaaatgagacttcggttttgccccctacccctcatgccgagcaaatggtttcacagcaacgcattctaattcatgaagattccatgaacctgctaagtctttatacctctccttctttgcccaacattaccttggggcttcccgcagtgccatcccagctcaatgcttcgaattcactcaaagaaaagcagaagtgtgagacgcagacgcttaggcaaggtgttcctctgcctgggcagtatggaggcagcatcccggcatcttccagccaccctcatgttactttagagggaaagccacccaacagcagccaccaggctctcctgcagcatttattattgaaagaacaaatgcgacagcaaaagcttcttgtagctggtggagttcccttacatcctcagtctcccttggcaacaaaagagagaatttcacctggcattagaggtacccacaaattgccccgtcacagacccctgaaccgaacccagtctgcacctttgcctcagagcacgttggctcagctggtcattcaacagcaacaccagcaattcttggagaagcagaagcaataccagcagcagatccacatgaacaaactgctttcgaaatctattgaacaactgaagcaaccaggcagtcaccttgaggaagcagaggaagagcttcagggggaccaggcgatgcaggaagacagagcgccctctagtggcaacagcactaggagcgacagcagtgcttgtgtggatgacacactgggacaagttggggctgtgaaggtcaaggaggaaccagtggacagtgatgaagatgctcagatccaggaaatggaatctggggagcaggctgcttttatgcaacagcctttcctggaacccacgcacacacgtgcgctctctgtgcgccaagctccgctggctgcggttggcatggatggattagagaaacaccgtctcgtctccaggactcactcttcccctgctgcctctgttttacctcacccagcaatggaccgccccctccagcctggctctgcaactggaattgcctatgaccccttgatgctgaaacaccagtgcgtttgtggcaattccaccacccaccctgagcatgctggacgaatacagagtatctggtcacgactgcaagaaactgggctgctaaataaatgtgagcgaattcaaggtcgaaaagccagcctggaggaaatacagcttgttcattctgaacatcactcactgttgtatggcaccaaccccctggacggacagaagctggaccccaggatactcctaggtgatgactctcaaaagtttttttcctcattaccttgtggtggacttggggtggacagtgacaccatttggaatgagctacactcgtccggtgctgcacgcatggctgttggctgtgtcatcgagctggcttccaaagtggcctcaggagagctgaagaatgggtttgctgttgtgaggccccctggccatcacgctgaagaatccacagccatggggttctgcttttttaattcagttgcaattaccgccaaatacttgagagaccaactaaatataagcaagatattgattgtagatctggatgttcaccatggaaacggtacccagcaggccttttatgctgaccccagcatcctgtacatttcactccatcgctatgatgaagggaactttttccctggcagtggagccccaaatgaggttggaacaggccttggagaagggtacaatataaatattgcctggacaggtggccttgatcctcccatgggagatgttgagtaccttgaagcattcaggaccatcgtgaagcctgtggccaaagagtttgatccagacatggtcttagtatctgctggatttgatgcattggaaggccacacccctcctctaggagggtacaaagtgacggcaaaatgttttggtcatttgacgaagcaattgatgacattggctgatggacgtgtggtgttggctctagaaggaggacatgatctcacagccatctgtgatgcatcagaagcctgtgtaaatgcccttctaggaaatgagctggagccacttgcagaagatattctccaccaaagcccgaatatgaatgctgttatttctttacagaagatcattgaaattcaaagtatgtctttaaagttctcttaaaaattctaagcaggtaaaactaactaaaattatattgaaaattatagtacaaagaaacattta

SEQ ID NO: 141119 - DNA, 545 bp, Homo sapiens
  Payload ID: 7723
  Gene Symbol: HDAC9
  Gene Name: histone deacetylase 9
  ENST ID: ENST00000430454
  CDS Start-End: 334-545
agccaacttgagctgagagagactgagaaagggggaagagaggcacagacacagataggagaagggcaccggctggagccacttgcaggactgagggtttttgcaacaaaaccctagcagcctgaagaactctaagccagatggggtggctggacgagagcagctcttggctcagcaaagaatgcacagtatgatcagctcagttgaactatgggtgttgactttcttttcatgaagataatatatctgtttaaatactaattggatgtgaagtcagaagttcctgtgggcctggagcccatctcacctttagacctaaggacagacctcaggatgatgatgcccgtggtggaccctgttgtccgtgagaagcaattgcagcaggaattacttcttatccagcagcagcaacaaatccagaagcagcttctgatagcagagtttcagaaacagcatgagaacttgacacggcagcaccaggctcagcttcaggagcatatcaagttgcaacaggaacttctagccataaaacagcaacaagaact

SEQ ID NO: 141120 - DNA, 550 bp, Homo sapiens
  Payload ID: 7723
  Gene Symbol: HDAC9
  Gene Name: histone deacetylase 9
  ENST ID: ENST00000413509
  CDS Start-End: 136-550
aatattataacggatacagaaaagttcagaaggactgagctagtttgcgaaaccacagcacactttggcaaagagggaatgcacaacaaaacggatggggtggctggacgagagcagctcttggctcagcaaagaatgcacagtatgatcagctcagtggatgtgaagtcagaagttcctgtgggcctggagcccatctcacctttagacctaaggacagacctcaggatgatgatgcccgtggtggaccctgttgtccgtgagaagcaattgcagcaggaattacttcttatccagcagcagcaacaaatccagaagcagcttctgatagcagagtttcagaaacagcatgagaacttgacacggcagcaccaggctcagcttcaggagcatatcaagttgcaacaggaacttctagccataaaacagcaacaagaactcctagaaaaggagcagaaactggagcagcagaggcaagaacaggaagtagagaggcatcgcagagaacagcagcttcctcctctcagaggcaaagatagaggacgagaaa

SEQ ID NO: 141121 - DNA, 560 bp, Homo sapiens
  Payload ID: 7723
  Gene Symbol: HDAC9
  Gene Name: histone deacetylase 9
  ENST ID: ENST00000446646
  CDS Start-End: 128-244
agtgatgaatgtttcatgtagctgaagtaagagtgactggaatatgctgcagacaatttacgagagtgactcctgtttttcctcagatggggtggctggacgagagcagctcttggctcagcaaagaatgcacagtatgatcagctcagtcagaagttcctgtgggcctggagcccatctcacctttagacctaaggacagacctcaggatgatgatgcccgtggtggaccctgttgtccgtgagaagcaattgcagcaggaattacttcttatccagcagcagcaacaaatccagaagcagcttctgatagcagagtttcagaaacagcatgagaacttgacacggcagcaccaggctcagcttcaggagcatatcaagttgcaacaggaacttctagccataaaacagcaacaagaactcctagaaaaggagcagaaactggagcagcagaggcaagaacaggaagtagagaggcatcgcagagaacagcagcttcctcctctcagaggcaaagatagaggacgagaaagggcagtggcaagtacagaagtaaagcag

SEQ ID NO: 141122 - DNA, 2199 bp, Homo sapiens
  Payload ID: 7723
  Gene Symbol: HDAC9
  Gene Name: histone deacetylase 9
  Uniprot ID: Q9UKV0
  ENST ID: ENST00000524023
  CDS Start-End: 206-1747
tttatcaatgggtaggtgggagaaccaggggaagactgtcagctacgattttctctagcctcaagaagactgagaccgagccaaactcctggccaacgtgctttgtggattcacagtgtagcttgagaaaaatgtggatgtgaagtcagaagttcctgtgggcctggagcccatctcacctttagacctaaggacagacctcaggatgatgatgcccgtggtggaccctgttgtccgtgagaagcaattgcagcaggaattacttcttatccagcagcagcaacaaatccagaagcagcttctgatagcagagtttcagaaacagcatgagaacttgacacggcagcaccaggctcagcttcaggagcatatcaaggaacttctagccataaaacagcaacaagaactcctagaaaaggagcagaaactggagcagcagaggcaagaacaggaagtagagaggcatcgcagagaacagcagcttcctcctctcagaggcaaagatagaggacgagaaagggcagtggcaagtacagaagtaaagcagaagcttcaagagttcctactgagtaaatcagcaacgaaagacactccaactaatggaaaaaatcattccgtgagccgccatcccaagctctgggctgcccaccacacatcattggatcaaagctctccaccccttagtggaacatctccatcctacaagtacacattaccaggagcacaagatgcaaaggatgatttcccccttcgaaaaactgaatcctcagtcagtagcagttctccaggctctggtcccagttcaccaaacaatgggccaactggaagtgttactgaaaatgagacttcggttttgccccctacccctcatgccgagcaaatggtttcacagcaacgcattctaattcatgaagattccatgaacctgctaagtctttatacctctccttctttgcccaacattaccttggggcttcccgcagtgccatcccagctcaatgcttcgaattcactcaaagaaaagcagaagtgtgagacgcagacgcttaggcaaggtgttcctctgcctgggcagtatggaggcagcatcccggcatcttccagccaccctcatgttactttagagggaaagccacccaacagcagccaccaggctctcctgcagcatttattattgaaagaacaaatgcgacagcaaaagcttcttgtagctggtggagttcccttacatcctcagtctcccttggcaacaaaagagagaatttcacctggcattagaggtacccacaaattgccccgtcacagacccctgaaccgaacccagtctgcacctttgcctcagagcacgttggctcagctggtcattcaacagcaacaccagcaattcttggagaagcagaagcaataccagcagcagatccacatgaacaaactgctttcgaaatctattgaacaactgaagcaaccaggcagtcaccttgaggaagcagaggaagagcttcagggggaccaggcgatgcaggaagacagagcgccctctagtggcaacagcactaggagcgacagcagtgcttgtgtggatgacacactgggacaagttggggctgtgaaggtcaaggaggaaccagtggacagtgatgaagatgctcagatccaggaaatggaatctggggagcaggctgcttttatgcaacaggtaataggcaaagatttagctccaggatttgtaattaaagtcattatctgaacatgaaatgcattgcaggtttggtaaatggatatgatttcctatcagtttatatttctctatgatttgagttcagtgtttaaggattctacctaatgcagatatatgtatatatctatatagaggtctttctatatactgatctctatatagatatcaatgtttcattgaaaatccactggtaaggaaatacctgttatactaaaattatgatacataatatctgagcagttaataggctttaaatttatcccaaagcctgctacaccaattacttctaaagaaaacaaattcactgttattttgagtttatgtgttgagatcagtgactgctggatagtctcccagtctgatcaatgaagcattcgattagtttttgattttttgcaacatctagaatttaattttcacatcactgtacataatgtatcatactatagtcttgaacactg

SEQ ID NO: 141123 - DNA, 4279 bp, Homo sapiens
  Payload ID: 7723
  Gene Symbol: HDAC9
  Gene Name: histone deacetylase 9
  ENST ID: ENST00000622668
  CDS Start-End: 320-1969
ggggaagagaggcacagacacagataggagaagggcaccggctggagccacttgcaggactgagggtttttgcaacaaaaccctagcagcctgaagaactctaagccaggtttaattggtttctttttctcgtgggtagacttaataattttctacgtattctgacaaagaaataaccccgaagcacgttcctatttcccacctgcttgtagtttccgggataacctaaactccagagagctatagcatccactctgtcctttctgctttgcacacagatggggtggctggacgagagcagctcttggctcagcaaagaatgcacagtatgatcagctcagtggatgtgaagtcagaagttcctgtgggcctggagcccatctcacctttagacctaaggacagacctcaggatgatgatgcccgtggtggaccctgttgtccgtgagaagcaattgcagcaggaattacttcttatccagcagcagcaacaaatccagaagcagcttctgatagcagagtttcagaaacagcatgagaacttgacacggcagcaccaggctcagcttcaggagcatatcaagttgcaacaggaacttctagccataaaacagcaacaagaactcctagaaaaggagcagaaactggagcagcagaggcaagaacaggaagtagagaggcatcgcagagaacagcagcttcctcctctcagaggcaaagatagaggacgagaaagggcagtggcaagtacagaagtaaagcagaagcttcaagagttcctactgagtaaatcagcaacgaaagacactccaactaatggaaaaaatcattccgtgagccgccatcccaagctctggtacacggctgcccaccacacatcattggatcaaagctctccaccccttagtggaacatctccatcctacaagtacacattaccaggagcacaagatgcaaaggatgatttcccccttcgaaaaactgaatcctcagtcagtagcagttctccaggctctggtcccagttcaccaaacaatgggccaactggaagtgttactgaaaatgagacttcggttttgccccctacccctcatgccgagcaaatggtttcacagcaacgcattctaattcatgaagattccatgaacctgctaagtctttatacctctccttctttgcccaacattaccttggggcttcccgcagtgccatcccagctcaatgcttcgaattcactcaaagaaaagcagaagtgtgagacgcagacgcttaggcaaggtgttcctctgcctgggcagtatggaggcagcatcccggcatcttccagccaccctcatgttactttagagggaaagccacccaacagcagccaccaggctctcctgcagcatttattattgaaagaacaaatgcgacagcaaaagcttcttgtagctggtggagttcccttacatcctcagtctcccttggcaacaaaagagagaatttcacctggcattagaggtacccacaaattgccccgtcacagacccctgaaccgaacccagtctgcacctttgcctcagagcacgttggctcagctggtcattcaacagcaacaccagcaattcttggagaagcagaagcaataccagcagcagatccacatgaacaaactgctttcgaaatctattgaacaactgaagcaaccaggcagtcaccttgaggaagcagaggaagagcttcagggggaccaggcgatgcaggaagacagagcgccctctagtggcaacagcactaggagcgacagcagtgcttgtgtggatgacacactgggacaagttggggctgtgaaggtcaaggaggaaccagtggacagtgatgaagatgctcagatccaggaaatggaatctggggagcaggctgcttttatgcaacaggtaataggcaaagatttagctccaggatttgtaattaaagtcattatctgaacatgaaatgcattgcaggtttggtaaatggatatgatttcctatcagtttatatttctctatgatttgagttcagtgtttaaggattctacctaatgcagatatatgtatatatctatatagaggtctttctatatactgatctctatatagatatcaatgtttcattgaaaatccactggtaaggaaatacctgttatactaaaattatgatacataatatctgagcagttaataggctttaaatttatcccaaagcctgctacaccaattacttctaaagaaaacaaattcactgttattttgagtttatgtgttgagatcagtgactgctggatagtctcccagtctgatcaatgaagcattcgattagtttttgattttttgcaacatctagaatttaattttcacatcactgtacataatgtatcatactatagtcttgaacactgttaaaggtagtctgccccttccttcctctctctttttttagttaagtagaaatgttctggtcaccatgccagtagtcctaggttattgtgtaggttgcaattgaacatattaggaatacaggtggttttaaatatatagatgcaaattgcagcactactttaaatattagattatgtctcacatagcactgctcattttacttttattttgtgtaatttgatgacactgtctatcaaaaaagagcaaatgaagcagatgcaaatgttagtgagaagtaatgtgcagcattatggtccaatcagatacaatattgtgtctacaattgcaaaaaacacagtaacaggatgaatattatctgatatcaagtcaaaatcagtttgaaaagaaggtgtatcatattttatattgtcactagaatctcttaagtataattccataatgacatgggcatataccgtaacattctggcaaataacaattagaaaagataggtttaacaaaaaaatttacttgtatataatgcaccttcaggaggactatgtcctttgatgctataaaatacaaacaactttgaaggcaacagaagacactgtttattcaagtcagttctttgtcaggttcctgctgttctcctacagaaaagtgattctgtgagggtgaacaggaaatgccttgtggaaacaggaagtccaagtgattcatgtactgaggaatgtaggaaaaaaaatctgaggatagtgctttactctttctgtttttaaagggcactctatgaattgatttattgtctaagaaaataacaccacaagtagggaaattgttacggaagcttttcactggaacatttccttcatattcccttttgatatgtttaccttgttttataggtttacttttgttaagctagttaaaggttcgttgtattaagacccctttaatatggataatccaaattgacctagaatctttgtgaggttttttctattaaaatatttatatttctaaatccgaggtatttcaaggtgtagtatcctatttcaaaggagatatagcagttttgccaaatgtagacattgttcaactgtatgttattggcacgtgttgtttacattttgctgtgacatttaaaaatatttctttaaaaatgttactgctaaagatacattatccttttttaaaaagtctccattcaaattaaattaacataactagaagttagaaagtttaaaagttttccacataatgaaagtccttctgataatttgacaaatagctataataggaacactccctatcaccaacatattttggttagtatattccttcatattaaaatgactttttgtcagttgttttgcattaaaaatatggcatgcctaagataaaattgtatattttttccatctcataaatattcattttcttcaaagtcttttttcaatctcataaaaaagggatagtgcatcttttaaaatacattttatttggggaggaacatgtggctgagcagacttttgtataatattacttcaaagatatgtaatcacaaacaaaaaaaactattttttataatgtcatttgagagagtttcatcagtacagttggtggacgttaattgtttgaatttgatagtctttgaatttaatcaagaaactacctggaaccagtgaaaaggaaagctggacttaaataatcttagaattaattgataaatgtctcttttaaaatctactgtatttattataatttacacccttgaaggtgatctcttgttttgtgttgtaaatatattgtttgtatgtttcccttcttgccttctgttataagtctcttcctttctcaaataaagtttttttt

SEQ ID NO: 141124 - DNA, 3163 bp, Homo sapiens
  Payload ID: 7724
  Gene Symbol: HINFP
  Gene Name: histone H4 transcription factor
  Uniprot ID: Q9BQA5
  ENST ID: ENST00000350777
  CDS Start-End: 64-1617
cggagatggtctgaggtgggagaagagctgaagagacctggagccgacagacgggtgaaggccatgccgcctcctgggaaagttccccgaaaggagaatctgtggctacagtgtgagtgggggtcctgctcctttgtgtgctcaaccatggaaaagttctttgagcatgtcactcagcacctgcagcagcacctgcatggctctggggaggaggaggaagaggaagaggaggatgacccacttgaggaagaattctcctgcttgtggcaggaatgtggcttttgttctctggacagttctgctgacctcatccgccatgtctacttccactgctaccacaccaagctgaaacagtgggggctgcaggccttgcaaagccaggctgaccttggcccctgcatcctggacttccagagccggaacgtcatccctgatatccctgaccacttcctgtgtctgtgggagcactgtgagaattccttcgacaatcctgagtggttttatcggcatgtggaagcacacagtctgtgctgtgaatacgaagcagtcggcaaggacaacccggtggtgctgtgtggctggaaaggctgtacctgcaccttcaaggaccgcagtaaacttcgagagcacctccgcagccatacccaggagaaagtggtagcctgccccacctgtgggggcatgtttgccaacaataccaagttcttagatcacatccgtcgccagacctcattggatcagcagcacttccagtgttctcactgttccaagagatttgccacagagcggctattgcgggaccacatgcgcaaccatgtgaatcactataagtgccctctgtgtgacatgacctgcccgctgccttcctccctccgcaaccacatgcgctttcgtcacagtgaggaccggccctttaaatgtgactgttgtgactacagctgcaagaatcttattgacctccagaagcacctggatacccacagcgaggagccagcctacaggtgtgattttgagaactgcaccttcagtgcccgatccctctgctctatcaagtcccattaccgcaaagtacatgaaggagactctgagccaaggtacaaatgtcatgtgtgtgacaaatgcttcacacggggcaacaacctcaccgtgcaccttcgcaagaagcaccagttcaagtggccctcagggcatccccgttttcggtacaaggaacatgaagatggctatatgcggctgcagctggttcgctacgagagtgtagagctgacacagcaactgctgcggcaaccacaagagggatcgggcctgggaacgtcgctgaacgagagcagcctgcagggcattattctagaaacagtgccaggggagccaggacgtaaggaagaggaagaggagggcaagggtagcgaagggacagccctctcagcctctcaggacaaccccagttctgtcatccacgtggtgaatcagaccaatgcccaaggccagcaagagatcgtctactatgtgctgtctgaagccccaggggagcctcccccagcccctgagccaccttcagggggcatcatggaaaagcttcaaggaatagctgaggagccagagatccagatggtttgaaggccgcagagccagaccatttcttccccaggtcctgaagtttgagccaggcaagtggcagtgcccctagtgggcagccgttgccaatggatgcctttaggagtggtgccgagagcagtgtggtccactctggcctgggtttgcatcattctgcagactctaaagacttcccttttctgccagactacattttgtggggagcctgaggactctggattctttgaggggatcctggatgtgtgtgttcttgttaaagaggctgttatcaggcttaaccataaccctcaagatctgcttgacagtgattaaatccttagctcacatccattcccatctttcgggctccttaggcccaaggatggcatgtgactggtccctgcaagggtcctttctttgtcaccagccaaggcattgataaccaagtagccattttcctcttaaggtttcctctacaaccccaaggactttcatgattatcctcagggacaggattggaggcattgagcgtgtttattaacaaattgtttttggtaataaaataaatgcttggactcttatttatttcttcttacatttggtggcagtttactaggtaatgaggagatacagccacccagaagaggagctgaatagttaggcttgttccccttctggtgactcaggtggtttgttttttgtttgcttaactgtcctgttgtcttctcctcctccccttggtgaaacttcgctattctcagagcgtatgccatttccatggaggtcccaggtgtttggctgtgagtgggcagtagtggtgctatagaatgaacaagaatgggctcactgggaggatagggcagctgaccatggcctcactctgaatactgattagaacccagtgcctctagggtaggggttctttacctgggagtgggaaggaagctggggggtggagaggattgggaagcctcccagggaagggaggcaatcaagtggtccaggaaccaaactagaaaattgtgtgtctgaatgtgcattttcctggggaaaggatctgttttttgctagattatcaaagagattgaaacctcccaaaataagaatcatcatttcgtctggttcagctgcttctcagcaccctgtgtccatttttatggtctactgctatgctggagaggtcaaggaaatagtcttggggacaggaagctgcccaaaaaggatctctgggcctttttttgtaagacctaattctattactagaaaaactaaggctgaatgcagtggttcacgcctgtaatcccaacactttgggaggctgaggcgggcggatcacaaggtcaagagatggagaccatcctggccaacatggtgaaaccccgtctctactaaaaatataaaaatcagctgggcatggtggcacacatctgtagtcccagctactcgggaggctgaggcaggagaattgcttgaacccgggaggctgaggttgcagtgagccgagatcatgccactgcactccagcctggcgacacagtgagactccgtctcaaataaataaataaataaa

SEQ ID NO: 141125 - DNA, 572 bp, Homo sapiens
  Payload ID: 7724
  Gene Symbol: HINFP
  Gene Name: histone H4 transcription factor
  ENST ID: ENST00000529988
  CDS Start-End: 273-572
aagagctgaagagacctggagccgacagacgtctaggggcttcgctgcggctgagactcggtcgccgccacgccttagcgtgaaggattccgggaagcctgcgggactgcgagtggagaggttttgcccaacgggacggtctccttccttctgtccaaattctacctgtccttcgaggcgtggtgcgggccccactgcttaggggagacttccttttcgcctgaccgcggaggtgtctctctgtcctggtctccctcatcggggtgaaggccatgccgcctcctgggaaagttccccgaaaggagaatctgtggctacagtgtgagtgggggtcctgctcctttgtgtgctcaaccatggaaaagttctttgagcatgtcactcagcacctgcagcagcacctgcatggctctggggaggaggaggaagaggaagaggaggatgacccacttgaggaagaattctcctgcttgtggcaggaatgtggcttttgttctctggacagttctgctgacctcatccgccatgtctacttccactgctaccacaccaagctgaaacagtgggggctg

SEQ ID NO: 141126 - DNA, 676 bp, Homo sapiens
  Payload ID: 7724
  Gene Symbol: HINFP
  Gene Name: histone H4 transcription factor
  ENST ID: ENST00000530678
  CDS Start-End: 515-676
agattgaatcttgctctgtcactaggctggagtgcaatggtgcgatctcggctcactgcaacctctgtctcccgggttcaagtgattcccctgcctcagcctccatagtagctgggactacaggcgtgtgccaccatacctagctaattttttgtatttggccaggatggtctcaatctcctgaccttgtgatcccctcgcctcggcctcccaaagtgctgggattacaggcataagccactgcgcccggctgatttttgtatttttagtagagacggaattttgccatgttgcccaggctggtcacaaactcctgagctcaagccatttgctcacctcagcctcccaaagtgctaagatcgtgagccactgcactcggcccagcagtcaatatttgtaatagggattcactagtagtctgtgagcagctcagcaaccctatatgcaccccagagtgttaaggatgactggattcttctctgaggaggagaaaaggctatgtagggtgaaggccatgccgcctcctgggaaagttccccgaaaggagaatctgtggctacagtgtgagtgggggtcctgctcctttgtgtgctcaaccatggaaaagttctttgagcatgtcactcagcacctgcagcagcacctgcatggctctggggaggaggaggaagaggaa

SEQ ID NO: 141127 - DNA, 1466 bp, Homo sapiens
  Payload ID: 7724
  Gene Symbol: HINFP
  Gene Name: histone H4 transcription factor
  Uniprot ID: Q9BQA5
  ENST ID: ENST00000527410
  CDS Start-End: 35-1294
gaagagacctggagccgacagacgggtgaaggccatgccgcctcctgggaaagttccccgaaaggagaatctgtggctacagtgtgagtgggggtcctgctcctttgtgtgctcaaccatggaaaagttctttgagcatgtcactcagcacctgcagcagcacctgcatggctctggggaggaggaggaagaggaagaggaggatgacccacttgaggaagaattctcctgcttgtggcaggaatgtggcttttgttctctggacagttctgctgacctcatccgccatgtctacttccactgctaccacaccaagctgaaacagtgggggctgcaggccttgcaaagccaggctgaccttggcccctgcatcctggacttccagagccggaacgtcatccctgatatccctgaccacttcctgtgtctgtgggagcactgtgagaattccttcgacaatcctgagtggttttatcggcatgtggaagcacacagtctgtgctgtgaatacgaagcagtcggcaaggacaacccggtggtgctgtgtggctggaaaggctgtacctgcaccttcaaggaccgcagtaaacttcgagagcacctccgcagccatacccaggagaaagtggtagcctgccccacctgtgggggcatgtttgccaacaataccaagttcttagatcacatccgtcgccagacctcattggatcagcagcacttccagtgttctcactgttccaagagatttgccacagagcggctattgcgggaccacatgcgcaaccatgtgaatcactataagtgccctctgtgtgacatgacctgcccgctgccttcctccctccgcaaccacatgcgctttcgtcacagtgaggaccggccctttaaatgtgactgttgtgactacagctgcaagaatcttattgacctccagaagcacctggatacccacagcgaggagccagcctacaggtgtgattttgagaactgcaccttcagtgcccgatccctctgctctatcaagtcccattaccgcaaagtacatgaaggagactctgagccaaggtacaaatgtcatgtgtgtgacaaatgcttcacacggggcaacaacctcaccgtgcaccttcgcaagaagcaccagttcaagtggccctcagggcatccccgttttcgcctcggccatttctgtatccccctgcctgggtttgctgccctttatgctcctacctcaccaggtacaaggaacatgaagatggctatatgcggctgcagctggttcgctacgagagtgtagagctgacacagcaactgctgcggcaaccacaagagggatcgggcctgggaacgtcgctgaacgagagcagcctgcagggcattattctagaaacagtgccaggggagccaggacgtaaggaagaggaagaggagggcaagggtagcgaagggacagccctctcagcctctca

SEQ ID NO: 141128 - DNA, 967 bp, Homo sapiens
  Payload ID: 7725
  Gene Symbol: HTATIP2
  Gene Name: HIV-1 Tat interactive protein 2, 30kDa
  Uniprot ID: Q9BUP3
  ENST ID: ENST00000443524
  CDS Start-End: 76-804
gaggccacccggaagaccaagccgggtaggcgctgtctccgtcgcctccaacccccccggtccgaccagggaagcatggccgaaacagaagccctgtcgaagcttcgggaagacttcaggatgcagaataaatccgtctttattttgggcgccagcggagaaaccggcagagtgctcttaaaggaaatcctggagcagggcctgttttccaaagtcacgctcattggccggaggaagctcaccttcgacgaggaagcttataaaaatgtgaatcaagaagtggtggactttgaaaagttggatgactacgcctctgcctttcaaggtcatgatgttggattctgttgcctgggtaccaccagagggaaagctggggcggagggatttgttcgtgttgaccgagattatgtgctgaagtctgcagagctggcaaaagctggagggtgcaaacatttcaacttgctatcctctaaaggagctgataaatcaagcaattttttatatctacaagttaagggagaagtagaagccaaggttgaagaattaaaatttgatcgttactctgtatttaggcctggagttctgttatgtgataggcaagaatctcgcccaggtgaatggctggttagaaagttctttggctccttaccagactcttgggccagtgggcattctgtgcctgtggtgaccgtggttagagcaatgctgaacaatgtggtgagaccaagagacaagcagatggaactgctggagaacaaggccatccatgacctggggaaagcgcatggctctctcaagccatgaccacattggagaaatggtttttattgtcaaccttaacacccatcaccaaatcggtaatttcagggtctaaaaaaagtcagcatgttttaactttgttgttttactatcctcaggcatccattccaatcaagaaatgatggtgctctgcatcagtggttcagag

SEQ ID NO: 141129 - DNA, 1477 bp, Homo sapiens
  Payload ID: 7725
  Gene Symbol: HTATIP2
  Gene Name: HIV-1 Tat interactive protein 2, 30kDa
  Uniprot ID: Q9BUP3
  ENST ID: ENST00000419348
  CDS Start-End: 70-900
aagccgggtaggcgctgtctccgtcgcctccaacccccccggtccgaccagggaaggtgggatgctctgatggccgggcctgcggcgctgagcgcggcggcggcggctgctctggcggccgccctgctcctgctgcgtcgtgaggacccggggccgggggctggccccagcatggccgaaacagaagccctgtcgaagcttcgggaagacttcaggatgcagaataaatccgtctttattttgggcgccagcggagaaaccggcagagtgctcttaaaggaaatcctggagcagggcctgttttccaaagtcacgctcattggccggaggaagctcaccttcgacgaggaagcttataaaaatgtgaatcaagaagtggtggactttgaaaagttggatgactacgcctctgcctttcaaggtcatgatgttggattctgttgcctgggtaccaccagagggaaagctggggcggagggatttgttcgtgttgaccgagattatgtgctgaagtctgcagagctggcaaaagctggagggtgcaaacatttcaacttgctatcctctaaaggagctgataaatcaagcaattttttatatctacaagttaagggagaagtagaagccaaggttgaagaattaaaatttgatcgttactctgtatttaggcctggagttctgttatgtgataggcaagaatctcgcccaggtgaatggctggttagaaagttctttggctccttaccagactcttgggccagtgggcattctgtgcctgtggtgaccgtggttagagcaatgctgaacaatgtggtgagaccaagagacaagcagatggaactgctggagaacaaggccatccatgacctggggaaagcgcatggctctctcaagccatgaccacattggagaaatggtttttattgtcaaccttaacacccatcaccaaatcggtaatttcagggtctaaaaaaagtcagcatgttttaactttgttgttttactatcctcaggcatccattccaatcaagaaatgatggtgctctgcatcagtggttcagagcctggttatacatatagatcactcagggagctttggaaaaataaagatttgtcagccctatctcaaacttgaatcaaaatttctggggtgtgggcacaataatctgtaattttctttgtttatacttcccctgatgccactggttccgatgccactggctggggggcctgctttgaaatgcttgtctgcagagtcacagcagccatgaaaaccttatgaccgtgcaaatgagctctgctctaaaattgttgacattcatgtctctgagttacaaaagtgctaattcactacatgtaattgtgtaagtaaacattgtgcctttactacttctttatgtaatagaagttatatacctaagcttatataatacatggggaggattaaataaaggaataaagatgaatggacaactcc

SEQ ID NO: 141130 - DNA, 1748 bp, Homo sapiens
  Payload ID: 7725
  Gene Symbol: HTATIP2
  Gene Name: HIV-1 Tat interactive protein 2, 30kDa
  Uniprot ID: Q9BUP3
  ENST ID: ENST00000451739
  CDS Start-End: 442-1170
aggtgggatgctctgatggccgggcctgcggcgctgagcgcggcggcggcggctgctctggcggccgccctgctcctgctgcgtcgtgaggacccggggccgggggctggccccaggtaacccctccgcgtatgggaccgagctgggccaggtctcctggccgggccggggataccgtggggtatgcccagtgatgccagcagcttgtggcacctgggcgcaccctccagctcgggccccttccgatgggtctgctggctcaggtgcgggcgatggccggggagccgcgccccgcacgtgactcagcactttccccagagcccggactgcggagaacaatatcctcctccctaacagataaacagcccttgttcctcgggataaggactggcagtcccctgacaccctaagaccggcatctgtcgatgttatttccccagcatggccgaaacagaagccctgtcgaagcttcgggaagacttcaggatgcagaataaatccgtctttattttgggcgccagcggagaaaccggcagagtgctcttaaaggaaatcctggagcagggcctgttttccaaagtcacgctcattggccggaggaagctcaccttcgacgaggaagcttataaaaatgtgaatcaagaagtggtggactttgaaaagttggatgactacgcctctgcctttcaaggtcatgatgttggattctgttgcctgggtaccaccagagggaaagctggggcggagggatttgttcgtgttgaccgagattatgtgctgaagtctgcagagctggcaaaagctggagggtgcaaacatttcaacttgctatcctctaaaggagctgataaatcaagcaattttttatatctacaagttaagggagaagtagaagccaaggttgaagaattaaaatttgatcgttactctgtatttaggcctggagttctgttatgtgataggcaagaatctcgcccaggtgaatggctggttagaaagttctttggctccttaccagactcttgggccagtgggcattctgtgcctgtggtgaccgtggttagagcaatgctgaacaatgtggtgagaccaagagacaagcagatggaactgctggagaacaaggccatccatgacctggggaaagcgcatggctctctcaagccatgaccacattggagaaatggtttttattgtcaaccttaacacccatcaccaaatcggtaatttcagggtctaaaaaaagtcagcatgttttaactttgttgttttactatcctcaggcatccattccaatcaagaaatgatggtgctctgcatcagtggttcagagcctggttatacatatagatcactcagggagctttggaaaaataaagatttgtcagccctatctcaaacttgaatcaaaatttctggggtgtgggcacaataatctgtaattttctttgtttatacttcccctgatgccactggttccgatgccactggctggggggcctgctttgaaatgcttgtctgcagagtcacagcagccatgaaaaccttatgaccgtgcaaatgagctctgctctaaaattgttgacattcatgtctctgagttacaaaagtgctaattcactacatgtaattgtgtaagtaaacattgtgcctttactacttctttatgtaatagaagttatatacctaagcttatataatacatggggaggattaaataaaggaataaagatgaatggacaactcct

SEQ ID NO: 141131 - DNA, 886 bp, Homo sapiens
  Payload ID: 7725
  Gene Symbol: HTATIP2
  Gene Name: HIV-1 Tat interactive protein 2, 30kDa
  Uniprot ID: Q9BUP3
  ENST ID: ENST00000421577
  CDS Start-End: 29-757
gcgaggccacccggaagaccaagccggcatggccgaaacagaagccctgtcgaagcttcgggaagacttcaggatgcagaataaatccgtctttattttgggcgccagcggagaaaccggcagagtgctcttaaaggaaatcctggagcagggcctgttttccaaagtcacgctcattggccggaggaagctcaccttcgacgaggaagcttataaaaatgtgaatcaagaagtggtggactttgaaaagttggatgactacgcctctgcctttcaaggtcatgatgttggattctgttgcctgggtaccaccagagggaaagctggggcggagggatttgttcgtgttgaccgagattatgtgctgaagtctgcagagctggcaaaagctggagggtgcaaacatttcaacttgctatcctctaaaggagctgataaatcaagcaattttttatatctacaagttaagggagaagtagaagccaaggttgaagaattaaaatttgatcgttactctgtatttaggcctggagttctgttatgtgataggcaagaatctcgcccaggtgaatggctggttagaaagttctttggctccttaccagactcttgggccagtgggcattctgtgcctgtggtgaccgtggttagagcaatgctgaacaatgtggtgagaccaagagacaagcagatggaactgctggagaacaaggccatccatgacctggggaaagcgcatggctctctcaagccatgaccacattggagaaatggtttttattgtcaaccttaacacccatcaccaaatcggtaatttcagggtctaaaaaaagtcagcatgttttaactttgttgttttactatcctcaggcatccattccaatca

SEQ ID NO: 141132 - DNA, 774 bp, Homo sapiens
  Payload ID: 7725
  Gene Symbol: HTATIP2
  Gene Name: HIV-1 Tat interactive protein 2, 30kDa
  Uniprot ID: Q9BUP3
  ENST ID: ENST00000532081
  CDS Start-End: 98-499
tcctccctaacagataaacagcccttgttcctcgggataaggactggcagtcccctgacaccctaagaccggcatctgtcgatgttatttccccagcatggccgaaacagaagccctgtcgaagcttcgggaagacttcaggatgcagaataaatccgtctttattttgggcgccagcggagaaaccggcagagtgctcttaaaggaaatcctggagcagggcctgttttccaaagtcacgctcattggccggaggaagctcaccttcgacgaggaagcttataaaaatgtgaatcaagaagtggtggactttgaaaagttggatgactacgcctctgcctttcaaggtcatgatgttggattctgttgcctgggtaccaccagagggaaagctggggcggtaaggaaggcatatgctcttttccctttttgctggccagtaatatcaaggattcttttcttgctcactctttttctttgtgcctgttgcaatgcttaaatgtgaataagcctttattgtttaagattctatatgctgcactaacctttggtatccttttaatagtactgataagttcgtctttcaaagtaatccttgagttcaggccccagtgctggagacgtcgtaaatatttacatgattttgcctattgtgattatcgctatcactacatcccctgactaagggaaaccatgatgtctgagtaaaactaattggtttatgctgttaacaatcagctgtttttccccttaataaatgtttgaaatttgaaa

SEQ ID NO: 141133 - DNA, 595 bp, Homo sapiens
  Payload ID: 7725
  Gene Symbol: HTATIP2
  Gene Name: HIV-1 Tat interactive protein 2, 30kDa
  Uniprot ID: Q9BUP3
  ENST ID: ENST00000532505
  CDS Start-End: 61-462
ctggcggccgccctgctcctgctgcgtcgtgaggacccggggccgggggctggccccagcatggccgaaacagaagccctgtcgaagcttcgggaagacttcaggatgcagaataaatccgtctttattttgggcgccagcggagaaaccggcagagtgctcttaaaggaaatcctggagcagggcctgttttccaaagtcacgctcattggccggaggaagctcaccttcgacgaggaagcttataaaaatgtgaatcaagaagtggtggactttgaaaagttggatgactacgcctctgcctttcaaggtcatgatgttggattctgttgcctgggtaccaccagagggaaagctggggcggtaaggaaggcatatgctcttttccctttttgctggccagtaatatcaaggattcttttcttgctcactctttttctttgtgcctgttgcaatgcttaaatgtgaataagcctttattgtttaagattctatatgctgcactaacctttggtatccttttaatagtactgataagttcgtctttcaaagtaatccttgagttcaggccccagtgctggagacgtcgtaaata

SEQ ID NO: 141134 - DNA, 713 bp, Homo sapiens
  Payload ID: 7725
  Gene Symbol: HTATIP2
  Gene Name: HIV-1 Tat interactive protein 2, 30kDa
  Uniprot ID: Q9BUP3
  ENST ID: ENST00000530266
  CDS Start-End: 67-468
aggtcccgcccctgtgggcggggcgaggcagcgtcgccgcgaggccacccggaagaccaagccggcatggccgaaacagaagccctgtcgaagcttcgggaagacttcaggatgcagaataaatccgtctttattttgggcgccagcggagaaaccggcagagtgctcttaaaggaaatcctggagcagggcctgttttccaaagtcacgctcattggccggaggaagctcaccttcgacgaggaagcttataaaaatgtgaatcaagaagtggtggactttgaaaagttggatgactacgcctctgcctttcaaggtcatgatgttggattctgttgcctgggtaccaccagagggaaagctggggcggtaaggaaggcatatgctcttttccctttttgctggccagtaatatcaaggattcttttcttgctcactctttttctttgtgcctgttgcaatgcttaaatgtgaataagcctttattgtttaagattctatatgctgcactaacctttggtatccttttaatagtactgataagttcgtctttcaaagtaatccttgagttcaggccccagtgctggagacgtcgtaaatatttacatgattttgcctattgtgattatcgctatcactacatcccctgactaagggaaaccatgatgtctgagtaaaactaattggtttatgctgttaacaatcagctgttt

SEQ ID NO: 141135 - DNA, 1060 bp, Homo sapiens
  Payload ID: 7725
  Gene Symbol: HTATIP2
  Gene Name: HIV-1 Tat interactive protein 2, 30kDa
  ENST ID: ENST00000531058
  CDS Start-End: 59-649
aggactggcagtcccctgacaccctaagaccggcatctgtcgatgttatttccccagcatggccgaaacagaagccctgtcgaagcttcgggaagacttcaggatgcagaataaatccgtctttattttgggcgccagcggagaaaccggcagagtgctcttaaaggaaatcctggagcagggcctgttttccaaagtcacgctcattggccggaggaagctcaccttcgacgaggaagcttataaaaatgtgaatcaagaagtggtggactttgaaaagttggatgactacgcctctgcctttcaaggtcatgatgttggattctgttgcctgggtaccaccagagggaaagctggggcgggagaagtagaagccaaggttgaagaattaaaatttgatcgttactctgtatttaggcctggagttctgttatgtgataggcaagaatctcgcccaggtgaatggctggttagaaagttctttggctccttaccagactcttgggccagtgggcattctgtgcctgtggtgaccgtggttagagcaatgctgaacaatgtggtgagaccaagagacaagcagatggaactgctggagaacaaggccatccatgacctggggaaagcgcatggctctctcaagccatgaccacattggagaaatggtttttattgtcaaccttaacacccatcaccaaatcggtaatttcagggtctaaaaaaagtcagcatgttttaactttgttgttttactatcctcaggcatccattccaatcaagaaatgatggtgctctgcatcagtggttcagagcctggttatacatatagatcactcagggagctttggaaaaataaagatttgtcagccctatctcaaacttgaatcaaaatttctggggtgtgggcacaataatctgtaattttctttgtttatacttcccctgatgccactggttccgatgccactggctggggggcctgctttgaaatgcttgtctgcagagtcacagcagccatgaaaaccttatgaccgtgcaaatgagctctgctctaaaattg

SEQ ID NO: 141136 - DNA, 2775 bp, Homo sapiens
  Payload ID: 7726
  Gene Symbol: HTATSF1
  Gene Name: HIV-1 Tat specific factor 1
  Uniprot ID: O43719
  ENST ID: ENST00000218364
  CDS Start-End: 175-2442
gcagccgccgagcggccgcgatttcccggggactgctggggcgcagcggggaggcgggccggggggcggcggggcgcgagcagagcgcggttgacctccctttctctgctcagctccagcgtcatttcggcctcttagttcttctgaaccctgctcctgagctaggtaggaaacatgagcggcaccaacttggatgggaacgatgagtttgatgagcagttgcgaatgcaagaattgtacggagacggcaaggatggtgacacccagaccgatgccggcggagaacccgattctctcgggcagcagccgacggacactccctacgagtgggacctggacaaaaaggcttggttccccaagattactgaagatttcattgctacatatcaggccaattatggcttctctaacgatggcgcatctagttctaccgcaaatgttgaagatgtccatgctaggactgcagaggaacctccacaagaaaaagccccggaacccactgatgccagaaagaagggagaaaaaagaaaggctgagtcaggatggtttcatgttgaagaagacagaaatacaaatgtatacgtgtctggtttgcctccagatattacagtggatgaatttatacaacttatgtccaagtttggcattattatgagagatcctcagacagaagaatttaaggtcaaactttacaaagataatcaaggaaatcttaaaggagacggtctttgctgttatttgaaaagagaatctgtggaacttgcattaaaacttttggatgaagatgaaattagaggctacaaattacatgttgaggtggcaaagtttcaactgaagggagaatatgatgcctcaaagaagaagaagaagtgcaaagactataagaagaagctgtctatgcaacaaaagcagttggattggagacctgagaggcgagccggaccatcccggatgcgccatgagcgagttgtcatcatcaagaatatgtttcatcctatggattttgaggatgatccgttggtgctgaatgagatcagagaagaccttcgagtagagtgttcgaagtttggacaaattaggaaactccttctctttgataggcacccagatggtgtggcctctgtgtcctttcgggatccagaggaagctgattattgtattcagactctcgatggaagatggtttggtggccgtcaaatcactgcccaggcatgggatgggactacagattatcaggtggaggaaacctcaagagaaagggaggaaaggctgagaggatgggaggctttcctcaatgctcctgaggccaacagaggccttaggcgttcagattctgtctctgcttccgaaagggcagggccttctagagcaaggcatttttcagagcaccccagcacatctaaaatgaatgctcaagaaactgcaactggaatggcgtttgaagaacctatagatgagaagaagtttgaaaagacagaagatgggggagaatttgaagaaggtgcttctgaaaacaatgctaaggaaagtagccccgaaaaagaggctgaagaaggctgccctgaaaaagaatctgaagagggctgccccaaaagagggtttgaaggcagctgctcccaaaaagagtctgaagaaggcaatcccgtaagaggatctgaagaggatagtcctaaaaaagagtctaaaaagaagacactcaaaaatgattgtgaagagaatggccttgcaaaggaatctgaagatgacctcaacaaggagtctgaagaggaggttggccccacaaaagagtccgaagaagatgactcagagaaagagtctgatgaagactgctctgaaaaacagtctgaagatggctccgaaagagaatttgaagaaaatggtctcgagaaagatttggacgaggaaggttctgaaaaggagcttcatgaaaatgttcttgacaaagagttagaagaaaatgactctgaaaactccgaatttgaagatgacggctctgaaaaagtgttagatgaggaaggctctgagagagagtttgacgaagattcagatgaaaaggaagaagaggaggatacatatgaaaaagtatttgatgatgagtctgatgagaaagaggatgaagaatatgcagatgaaaaggggcttgaagctgctgataaaaaggcggaagaaggtgatgcagatgaaaagctgtttgaagagtcagatgacaaggaagatgaagatgcagatggaaaggaagttgaagatgctgacgaaaagttgttcgaagatgatgattccaatgagaagttgtttgatgaggaggaagattccagtgagaagttgtttgacgattctgatgagagggggactttgggtggttttgggagtgttgaagaagggcccctatccactggcagcagctttattctcagtagcgatgatgatgacgatgatatttaatcccttaaacttgctttttagggagagtcctccatctacatttgcctgtgcttcagggtaattactagtagtgttacatgaacatgtgcatagtggtaggatgccatcagattaaagcattgaagtgtttcattgttacctgtacctaatggttttaaatatatgttaattgattgtttagttaaaatgtcatagttacaatgcaagtaaactggatacttgttcttttgtcagatttgttaaatgcatgcagaataatatttttaagagtattgattgaagtttgtgatattcatcaataaaaatgagttgataatatgcagaaactgaaaa

SEQ ID NO: 141137 - DNA, 1014 bp, Homo sapiens
  Payload ID: 7726
  Gene Symbol: HTATSF1
  Gene Name: HIV-1 Tat specific factor 1
  ENST ID: ENST00000448450
  CDS Start-End: 281-1014
gtcggcgcgacccgcgacgtcgccacgcgccgacaatggcggctgcgtcggcctgagcagggcttagtttagaagtaatttcctgacgttgccgagggagccgcagtcgcctcagatccggtcggcggcggcggcggtggcggcggcggcagcgcgcctgcgcgctcccgcagcgccctggacctagcggcggtgccgaggcccggcggagcaagccagctccagcgtcatttcggcctcttagttcttctgaaccctgctcctgagctaggtaggaaacatgagcggcaccaacttggatgggaacgatgagtttgatgagcagttgcgaatgcaagaattgtacggagacggcaaggatggtgacacccagaccgatgccggcggagaacccgattctctcgggcagcagccgacggacactccctacgagtgggacctggacaaaaaggcttggttccccaagattactgaagatttcattgctacatatcaggccaattatggcttctctaacgatggcgcatctagttctaccgcaaatgttgaagatgtccatgctaggactgcagaggaacctccacaagaaaaagccccggaacccactgatgccagaaagaagggagaaaaaagaaaggctgagtcaggatggtttcatgttgaagaagacagaaatacaaatgtatacgtgtctggtttgcctccagatattacagtggatgaatttatacaacttatgtccaagtttggcattattatgagagatcctcagacagaagaatttaaggtcaaactttacaaagataatcaaggaaatcttaaaggagacggtctttgctgttatttgaaaagagaatctgtggaacttgcattaaaacttttggatgaagatgaaattagaggctacaaattacatgttgaggtggcaaagtttcaactgaagggagaatatgatgcctcaaagaagaagaagaagtgcaaagactataagaagaagctgtctatgcaacaaaa

SEQ ID NO: 141138 - DNA, 885 bp, Homo sapiens
  Payload ID: 7726
  Gene Symbol: HTATSF1
  Gene Name: HIV-1 Tat specific factor 1
  ENST ID: ENST00000425695
  CDS Start-End: 216-885
gcgacgtcgccacgcgccgacaatggcggctgcgtcggcctgagcagggcttagtttagaagtaatttcctgacgttgccgagggagccgcagtcgcctcagatccggtcggcggcggcggcggtggcggcggcggcagcgcgcctgcgcgctcccgcagcgccctggacctagcggcggtgccgaggcccggcggagcaagccaggtaggaaacatgagcggcaccaacttggatgggaacgatgagtttgatgagcagttgcgaatgcaagaattgtacggagacggcaaggatggtgacacccagaccgatgccggcggagaacccgattctctcgggcagcagccgacggacactccctacgagtgggacctggacaaaaaggcttggttccccaagattactgaagatttcattgctacatatcaggccaattatggcttctctaacgatggcgcatctagttctaccgcaaatgttgaagatgtccatgctaggactgcagaggaacctccacaagaaaaagccccggaacccactgatgccagaaagaagggagaaaaaagaaaggctgagtcaggatggtttcatgttgaagaagacagaaatacaaatgtatacgtgtctggtttgcctccagatattacagtggatgaatttatacaacttatgtccaagtttggcattattatgagagatcctcagacagaagaatttaaggtcaaactttacaaagataatcaaggaaatcttaaaggagacggtctttgctgttatttgaaaagagaatctgtggaacttgcattaaaacttttggatgaagatgaaattagaggctacaaattacatgttgaggtggcaaagtttcaactgaagggagaat

SEQ ID NO: 141139 - DNA, 3019 bp, Homo sapiens
  Payload ID: 7726
  Gene Symbol: HTATSF1
  Gene Name: HIV-1 Tat specific factor 1
  Uniprot ID: O43719
  ENST ID: ENST00000535601
  CDS Start-End: 423-2690
agtggccctcgccccgccccaaacccgaccccggtgggcgtcgacgcgcagcagcagcgggtccccccaaccccggcgccccgcctccccgggcctcgcgccgcatgccggcgtcggcgctttttgacgccatagtgggcgtgtcggcgcgacccgcgacgtcgccacgcgccgacaatggcggctgcgtcggcctgagcagggcttagtttagaagtaatttcctgacgttgccgagggagccgcagtcgcctcagatccggtcggcggcggcggcggtggcggcggcggcagcgcgcctgcgcgctcccgcagcgccctggacctagcggcggtgccgaggcccggcggagcaagccagctccagcgtcatttcggcctcttagttcttctgaaccctgctcctgagctaggtaggaaacatgagcggcaccaacttggatgggaacgatgagtttgatgagcagttgcgaatgcaagaattgtacggagacggcaaggatggtgacacccagaccgatgccggcggagaacccgattctctcgggcagcagccgacggacactccctacgagtgggacctggacaaaaaggcttggttccccaagattactgaagatttcattgctacatatcaggccaattatggcttctctaacgatggcgcatctagttctaccgcaaatgttgaagatgtccatgctaggactgcagaggaacctccacaagaaaaagccccggaacccactgatgccagaaagaagggagaaaaaagaaaggctgagtcaggatggtttcatgttgaagaagacagaaatacaaatgtatacgtgtctggtttgcctccagatattacagtggatgaatttatacaacttatgtccaagtttggcattattatgagagatcctcagacagaagaatttaaggtcaaactttacaaagataatcaaggaaatcttaaaggagacggtctttgctgttatttgaaaagagaatctgtggaacttgcattaaaacttttggatgaagatgaaattagaggctacaaattacatgttgaggtggcaaagtttcaactgaagggagaatatgatgcctcaaagaagaagaagaagtgcaaagactataagaagaagctgtctatgcaacaaaagcagttggattggagacctgagaggcgagccggaccatcccggatgcgccatgagcgagttgtcatcatcaagaatatgtttcatcctatggattttgaggatgatccgttggtgctgaatgagatcagagaagaccttcgagtagagtgttcgaagtttggacaaattaggaaactccttctctttgataggcacccagatggtgtggcctctgtgtcctttcgggatccagaggaagctgattattgtattcagactctcgatggaagatggtttggtggccgtcaaatcactgcccaggcatgggatgggactacagattatcaggtggaggaaacctcaagagaaagggaggaaaggctgagaggatgggaggctttcctcaatgctcctgaggccaacagaggccttaggcgttcagattctgtctctgcttccgaaagggcagggccttctagagcaaggcatttttcagagcaccccagcacatctaaaatgaatgctcaagaaactgcaactggaatggcgtttgaagaacctatagatgagaagaagtttgaaaagacagaagatgggggagaatttgaagaaggtgcttctgaaaacaatgctaaggaaagtagccccgaaaaagaggctgaagaaggctgccctgaaaaagaatctgaagagggctgccccaaaagagggtttgaaggcagctgctcccaaaaagagtctgaagaaggcaatcccgtaagaggatctgaagaggatagtcctaaaaaagagtctaaaaagaagacactcaaaaatgattgtgaagagaatggccttgcaaaggaatctgaagatgacctcaacaaggagtctgaagaggaggttggccccacaaaagagtccgaagaagatgactcagagaaagagtctgatgaagactgctctgaaaaacagtctgaagatggctccgaaagagaatttgaagaaaatggtctcgagaaagatttggacgaggaaggttctgaaaaggagcttcatgaaaatgttcttgacaaagagttagaagaaaatgactctgaaaactccgaatttgaagatgacggctctgaaaaagtgttagatgaggaaggctctgagagagagtttgacgaagattcagatgaaaaggaagaagaggaggatacatatgaaaaagtatttgatgatgagtctgatgagaaagaggatgaagaatatgcagatgaaaaggggcttgaagctgctgataaaaaggcggaagaaggtgatgcagatgaaaagctgtttgaagagtcagatgacaaggaagatgaagatgcagatggaaaggaagttgaagatgctgacgaaaagttgttcgaagatgatgattccaatgagaagttgtttgatgaggaggaagattccagtgagaagttgtttgacgattctgatgagagggggactttgggtggttttgggagtgttgaagaagggcccctatccactggcagcagctttattctcagtagcgatgatgatgacgatgatatttaatcccttaaacttgctttttagggagagtcctccatctacatttgcctgtgcttcagggtaattactagtagtgttacatgaacatgtgcatagtggtaggatgccatcagattaaagcattgaagtgtttcattgttacctgtacctaatggttttaaatatatgttaattgattgtttagttaaaatgtcatagttacaatgcaagtaaactggatacttgttcttttgtcagatttgttaaatgcatgcagaataatatttttaagagtattgattgaagtttgtgatattcatcaataaaaatgagttgataatatgcagaaactg

SEQ ID NO: 141140 - DNA, 2929 bp, Homo sapiens
  Payload ID: 7727
  Gene Symbol: HKR1
  Gene Name: HKR1, GLI-Kruppel zinc finger family member
  Uniprot ID: P10072
  ENST ID: ENST00000324411
  CDS Start-End: 270-2249
gctggttgggacccgggaaggcctccctcttaaggtctttcccacacctctgcaccttgttacctgactttcggcttcaggatccgcagcgtgcacccgcgttccatctgtcttctgagactttgcccttctccaggaagagcactcaggagaccaggaaaatggccacagggctcctgagagccaaaaaagagctggcaagcagatgaattaactcccccaagcttctagctgtgtttctactcagtgggagagatttggagtgaatcatgagggtcaaccacacagtgtctacaatgctccctacatgcatggttcacagacaaaccatgagttgttccggggctggaggaataacggcgttcgtggcattcagggatgtggctgtgtacttcacccaggaggagtggaggttgttgagccctgctcagaggaccctgcacagggaggtgatgctggagacttataaccatctggtctcactggaaattccatcttctaaaccaaaactcattgctcagctggagcgaggggaagcgccctggagagaggagagaaaatgtccactggacctctgtccagaatcgaagccagaaattcaacttagtccctcctgccctctgattttctccagtcagcaagctctcagccaacatgtgtggctgagtcatctctctcagctgttttcaagtttatgggcaggaaatcctctccacctgggaaaacactatccagaagatcagaaacaacagcaggatccattctgctttagtggcaaagcagaatggattcaagagggagaagactccagactcctgtttgggagagtaagcaaaaatggcacttcaaaggcactttccagcccacctgaagaacaacagccagcacagtccaaggaagacaacacagtggtggatatagggtccagccctgaacggagggcagatctagaggaaacagacaaagtattgcatggtttagaagtctcaggatttggagaaatcaaatatgaagagtttgggccaggctttatcaaggagtcaaacctccttagcctccagaagacacaaactggggagacaccttacatgtacactgagtggggagacagctttggcagtatgtcagtcctcatcaaaaacccaaggacacactctgggggaaagccttatgtgtgcagggaatgtgggcgaggctttacgtggaagtcaaacctgatcacacatcagaggacacactcaggggagaaaccttatgtgtgcaaggattgtggacgaggctttacttggaagtcgaacctctttacacatcagcggacacactcagggctcaagccttatgtgtgcaaggaatgtgggcagagctttagcctgaagtcaaacctcattacccaccagagggcgcacactggggagaagccttatgtttgcagggaatgtgggcgtggctttcgccagcattcacacctggtcagacacaagaggacacattcaggagagaagccttacatttgcagggagtgtgagcaaggctttagccagaagtcacacctcatcagacacttaaggacacacacaggagagaagccttatgtatgcacagaatgtgggcgtcactttagctggaaatcaaacctcaaaacacaccagaggacacactcaggggttaaaccttatgtctgcctggagtgcgggcagtgctttagcctgaagtcaaaccttaacaaacaccagaggtcacacacgggggagaagccatttgtatgtacggagtgtgggcgaggctttacccggaaatcaaccctgagcacgcaccagaggacacactcaggggagaagccatttgtatgtgctgagtgtggacgaggctttaatgataagtccaccctcatttcacaccagaggacacattcaggggaaaagccttttatgtgcagggagtgtggcagaaggtttcggcagaagcctaacctgtttaggcacaagagggcacactcaggtgcctttgtgtgcagggagtgtgggcaaggcttttgtgctaagttaactctcattaaacaccagagagcacacgcaggggggaagcctcatgtgtgcagggagtgtgggcaaggctttagccggcagtcacacctcattagacaccagaggacacattcaggagagaagccttatatttgcagaaagtgtggacggggctttagtcggaagtccaaccttatcagacatcagaggacacactcaggatagaaactttatgtgtatagggaatgtggtacagcctttagccaggagtcatacttcatcagacaccagaggacacacacagtgctgtggctttttcagccattgctagataccaaagtggagacattctgtgtgtgattatgcatgagactgtactggtaagacttgtatctccatccacctgaaggagaattgctggctcattttcaggagccctgcccttcctcactgtggatggtgggttgtggaaacccggtcaggtaatgatagtggcaggaggcagtcaaatgcccaggcagataggggtgggtacctggtgaaacccaaccttaaagctgaagacagtcccggctaaatcctcatactgaattgagaacctgtcttcccatttggtgtgctttcctccgattgatcccaacccttcacctattttacgtatacctgccctttcctaattggtttttacactgctgtgcccaccttttgagtggtgcctttgcatacttacaaatcagtcaacgtgtattcccctattctgagcccataaaagacccagactcagctgcagtgaggagagaaatcaccctgctgtgggggttggggaccactccctgcatcccctctccactgagagctgttcttttgctcaataaaattcttttctacccatcctcacccttcaa

SEQ ID NO: 141141 - DNA, 2772 bp, Homo sapiens
  Payload ID: 7727
  Gene Symbol: HKR1
  Gene Name: HKR1, GLI-Kruppel zinc finger family member
  Uniprot ID: P10072
  ENST ID: ENST00000392153
  CDS Start-End: 174-2096
caggcgcgttaagctggttgggacccgggaaggcctccctcttaaggtctttcccacacctctgcaccttgttacctgactttcggcttcaggatccgcagcgtgcacccgcgttccatctgtcttctgagactttgcccttctccaggaagagcactcaggagaccaggaaaatggccacagggctcctgagagccaaaaaagaggcgttcgtggcattcagggatgtggctgtgtacttcacccaggaggagtggaggttgttgagccctgctcagaggaccctgcacagggaggtgatgctggagacttataaccatctggtctcactggaaattccatcttctaaaccaaaactcattgctcagctggagcgaggggaagcgccctggagagaggagagaaaatgtccactggacctctgtccagaatcgaagccagaaattcaacttagtccctcctgccctctgattttctccagtcagcaagctctcagccaacatgtgtggctgagtcatctctctcagctgttttcaagtttatgggcaggaaatcctctccacctgggaaaacactatccagaagatcagaaacaacagcaggatccattctgctttagtggcaaagcagaatggattcaagagggagaagactccagactcctgtttgggagagtaagcaaaaatggcacttcaaaggcactttccagcccacctgaagaacaacagccagcacagtccaaggaagacaacacagtggtggatatagggtccagccctgaacggagggcagatctagaggaaacagacaaagtattgcatggtttagaagtctcaggatttggagaaatcaaatatgaagagtttgggccaggctttatcaaggagtcaaacctccttagcctccagaagacacaaactggggagacaccttacatgtacactgagtggggagacagctttggcagtatgtcagtcctcatcaaaaacccaaggacacactctgggggaaagccttatgtgtgcagggaatgtgggcgaggctttacgtggaagtcaaacctgatcacacatcagaggacacactcaggggagaaaccttatgtgtgcaaggattgtggacgaggctttacttggaagtcgaacctctttacacatcagcggacacactcagggctcaagccttatgtgtgcaaggaatgtgggcagagctttagcctgaagtcaaacctcattacccaccagagggcgcacactggggagaagccttatgtttgcagggaatgtgggcgtggctttcgccagcattcacacctggtcagacacaagaggacacattcaggagagaagccttacatttgcagggagtgtgagcaaggctttagccagaagtcacacctcatcagacacttaaggacacacacaggagagaagccttatgtatgcacagaatgtgggcgtcactttagctggaaatcaaacctcaaaacacaccagaggacacactcaggggttaaaccttatgtctgcctggagtgcgggcagtgctttagcctgaagtcaaaccttaacaaacaccagaggtcacacacgggggagaagccatttgtatgtacggagtgtgggcgaggctttacccggaaatcaaccctgagcacgcaccagaggacacactcaggggagaagccatttgtatgtgctgagtgtggacgaggctttaatgataagtccaccctcatttcacaccagaggacacattcaggggaaaagccttttatgtgcagggagtgtggcagaaggtttcggcagaagcctaacctgtttaggcacaagagggcacactcaggtgcctttgtgtgcagggagtgtgggcaaggcttttgtgctaagttaactctcattaaacaccagagagcacacgcaggggggaagcctcatgtgtgcagggagtgtgggcaaggctttagccggcagtcacacctcattagacaccagaggacacattcaggagagaagccttatatttgcagaaagtgtggacggggctttagtcggaagtccaaccttatcagacatcagaggacacactcaggatagaaactttatgtgtatagggaatgtggtacagcctttagccaggagtcatacttcatcagacaccagaggacacacacagtgctgtggctttttcagccattgctagataccaaagtggagacattctgtgtgtgattatgcatgagactgtactggtaagacttgtatctccatccacctgaaggagaattgctggctcattttcaggagccctgcccttcctcactgtggatggtgggttgtggaaacccggtcaggtaatgatagtggcaggaggcagtcaaatgcccaggcagataggggtgggtacctggtgaaacccaaccttaaagctgaagacagtcccggctaaatcctcatactgaattgagaacctgtcttcccatttggtgtgctttcctccgattgatcccaacccttcacctattttacgtatacctgccctttcctaattggtttttacactgctgtgcccaccttttgagtggtgcctttgcatacttacaaatcagtcaacgtgtattcccctattctgagcccataaaagacccagactcagctgcagtgaggagagaaatcaccctgctgtgggggttggggaccactccctgcatcccctctccactgagagctgttcttttgctcaataaaattcttttctacccatcctcaccct

SEQ ID NO: 141142 - DNA, 2854 bp, Homo sapiens
  Payload ID: 7727
  Gene Symbol: HKR1
  Gene Name: HKR1, GLI-Kruppel zinc finger family member
  ENST ID: ENST00000544914
  CDS Start-End: 1023-2183
gggtctgcagatggcgtccgagtgcacagtggccagtgtgattccgcagtcttgggctgttcggccaagcgcccaccggacgtgggacgctggagggtcagcagcgtggagtcctggccttcagcgtccgcggctgggaaatcggccatcgccacggcgggaactaggactggctgcgtcccggcccttccccatccgtccaccggactcgtgggcgcccgcactgactgtgatgtagtttcctgacctctgacacgtattgtctcaagattaaaggaatcaggagcttcttttgctgttcttctgttttggatgcattggaaggtccagatttggaacaagtctctctagagattgaacagagctgcgcctggaacccgccgcagggaggagacctgaagaccagaggaaacacagcaaaaattccatcttctaaaccaaaactcattgctcagctggagcgaggggaagcgccctggagagaggagagaaaatgtccactggacctctgtccagaatcgaagccagaaattcaacttagtccctcctgccctctgattttctccagtcagcaagctctcagccaacatgtgtggctgagtcatctctctcagctgttttcaagtttatgggcaggaaatcctctccacctgggaaaacactatccagaagatcagaaacaacagcaggatccattctgctttagtggcaaagcagaatggattcaagagggagaagactccagactcctgtttgggagagtaagcaaaaatggcacttcaaaggcactttccagcccacctgaagaacaacagccagcacagtccaaggaagacaacacagtggtggatatagggtccagccctgaacggagggcagatctagaggaaacagacaaagtattgcatggtttagaagtctcaggatttggagaaatcaaatatgaagagtttgggccaggctttatcaaggagtcaaacctccttagcctccagaagacacaaactggggagacaccttacatgtacactgagtggggagacagctttggcagtatgtcagtcctcatcaaaaacccaaggacacactctgggggaaagccttatgtgtgcagggaatgtgggcgaggctttacgtggaagtcaaacctgatcacacatcagaggacacactcaggggagaaaccttatgtgtgcaaggattgtggacgaggctttacttggaagtcgaacctctttacacatcagcggacacactcagggctcaagccttatgtgtgcaaggaatgtgggcagagctttagcctgaagtcaaacctcattacccaccagagggcgcacactggggagaagccttatgtttgcagggaatgtgggcgtggctttcgccagcattcacacctggtcagacacaagaggacacattcaggagagaagccttacatttgcagggagtgtgagcaaggctttagccagaagtcacacctcatcagacacttaaggacacacacaggagagaagccttatgtatgcacagaatgtgggcgtcactttagctggaaatcaaacctcaaaacacaccagaggacacactcaggggttaaaccttatgtctgcctggagtgcgggcagtgctttagcctgaagtcaaaccttaacaaacaccagaggtcacacacgggggagaagccatttgtatgtacggagtgtgggcgaggctttacccggaaatcaaccctgagcacgcaccagaggacacactcaggggagaagccatttgtatgtgctgagtgtggacgaggctttaatgataagtccaccctcatttcacaccagaggacacattcaggggaaaagccttttatgtgcagggagtgtggcagaaggtttcggcagaagcctaacctgtttaggcacaagagggcacactcaggtgcctttgtgtgcagggagtgtgggcaaggcttttgtgctaagttaactctcattaaacaccagagagcacacgcaggggggaagcctcatgtgtgcagggagtgtgggcaaggctttagccggcagtcacacctcattagacaccagaggacacattcaggagagaagccttatatttgcagaaagtgtggacggggctttagtcggaagtccaaccttatcagacatcagaggacacactcaggatagaaactttatgtgtatagggaatgtggtacagcctttagccaggagtcatacttcatcagacaccagaggacacacacagtgctgtggctttttcagccattgctagataccaaagtggagacattctgtgtgtgattatgcatgagactgtactggtaagacttgtatctccatccacctgaaggagaattgctggctcattttcaggagccctgcccttcctcactgtggatggtgggttgtggaaacccggtcaggtaatgatagtggcaggaggcagtcaaatgcccaggcagataggggtgggtacctggtgaaacccaaccttaaagctgaagacagtcccggctaaatcctcatactgaattgagaacctgtcttcccatttggtgtgctttcctccgattgatcccaacccttcacctattttacgtatacctgccctttcctaattggtttttacactgctgtgcccaccttttgagtggtgcctttgcatacttacaaatcagtcaacgtgtattcccctattctgagcccataaaagacccagactcagctgcagtgaggagagaaatcaccctgctgtgggggttggggaccactccctgcatcccctctccactgagagctgttcttttgctcaataaaattcttttctacccatcctc

SEQ ID NO: 141143 - DNA, 2758 bp, Homo sapiens
  Payload ID: 7727
  Gene Symbol: HKR1
  Gene Name: HKR1, GLI-Kruppel zinc finger family member
  ENST ID: ENST00000541583
  CDS Start-End: 290-2086
aactgacgtgctgagcagctaattcagtgcctgaggttacactagttgtggacagagatgggttccaaatccagatagtatgggttgaatccacgctcttcatcaccacccactttccctccttaggcctgagcaggcacgtggcagcatttggtagaggaaggagtgagccctgctgtaggaactatatatattggcgttcgtggcattcagggatgtggctgtgtacttcacccaggaggagtggaggttgttgagccctgctcagaggaccctgcacagggaggtgatgctggagacttataaccatctggtctcactggaaattccatcttctaaaccaaaactcattgctcagctggagcgaggggaagcgccctggagagaggagagaaaatgtccactggacctctgtccagaatcgaagccagaaattcaacttagtccctcctgccctctgattttctccagtcagcaagctctcagccaacatgtgtggctgagtcatctctctcagctgttttcaagtttatgggcaggaaatcctctccacctgggaaaacactatccagaagatcagaaacaacagcaggatccattctgctttagtggcaaagcagaatggattcaagagggagaagactccagactcctgtttgggagagtaagcaaaaatggcacttcaaaggcactttccagcccacctgaagaacaacagccagcacagtccaaggaagacaacacagtggtggatatagggtccagccctgaacggagggcagatctagaggaaacagacaaagtattgcatggtttagaagtctcaggatttggagaaatcaaatatgaagagtttgggccaggctttatcaaggagtcaaacctccttagcctccagaagacacaaactggggagacaccttacatgtacactgagtggggagacagctttggcagtatgtcagtcctcatcaaaaacccaaggacacactctgggggaaagccttatgtgtgcagggaatgtgggcgaggctttacgtggaagtcaaacctgatcacacatcagaggacacactcaggggagaaaccttatgtgtgcaaggattgtggacgaggctttacttggaagtcgaacctctttacacatcagcggacacactcagggctcaagccttatgtgtgcaaggaatgtgggcagagctttagcctgaagtcaaacctcattacccaccagagggcgcacactggggagaagccttatgtttgcagggaatgtgggcgtggctttcgccagcattcacacctggtcagacacaagaggacacattcaggagagaagccttacatttgcagggagtgtgagcaaggctttagccagaagtcacacctcatcagacacttaaggacacacacaggagagaagccttatgtatgcacagaatgtgggcgtcactttagctggaaatcaaacctcaaaacacaccagaggacacactcaggggttaaaccttatgtctgcctggagtgcgggcagtgctttagcctgaagtcaaaccttaacaaacaccagaggtcacacacgggggagaagccatttgtatgtacggagtgtgggcgaggctttacccggaaatcaaccctgagcacgcaccagaggacacactcaggggagaagccatttgtatgtgctgagtgtggacgaggctttaatgataagtccaccctcatttcacaccagaggacacattcaggggaaaagccttttatgtgcagggagtgtggcagaaggtttcggcagaagcctaacctgtttaggcacaagagggcacactcaggtgcctttgtgtgcagggagtgtgggcaaggcttttgtgctaagttaactctcattaaacaccagagagcacacgcaggggggaagcctcatgtgtgcagggagtgtgggcaaggctttagccggcagtcacacctcattagacaccagaggacacattcaggagagaagccttatatttgcagaaagtgtggacggggctttagtcggaagtccaaccttatcagacatcagaggacacactcaggatagaaactttatgtgtatagggaatgtggtacagcctttagccaggagtcatacttcatcagacaccagaggacacacacagtgctgtggctttttcagccattgctagataccaaagtggagacattctgtgtgtgattatgcatgagactgtactggtaagacttgtatctccatccacctgaaggagaattgctggctcattttcaggagccctgcccttcctcactgtggatggtgggttgtggaaacccggtcaggtaatgatagtggcaggaggcagtcaaatgcccaggcagataggggtgggtacctggtgaaacccaaccttaaagctgaagacagtcccggctaaatcctcatactgaattgagaacctgtcttcccatttggtgtgctttcctccgattgatcccaacccttcacctattttacgtatacctgccctttcctaattggtttttacactgctgtgcccaccttttgagtggtgcctttgcatacttacaaatcagtcaacgtgtattcccctattctgagcccataaaagacccagactcagctgcagtgaggagagaaatcaccctgctgtgggggttggggaccactccctgcatcccctctccactgagagctgttcttttgctcaataaaattcttttctacccatcctca

SEQ ID NO: 141144 - DNA, 527 bp, Homo sapiens
  Payload ID: 7727
  Gene Symbol: HKR1
  Gene Name: HKR1, GLI-Kruppel zinc finger family member
  ENST ID: ENST00000589188
  CDS Start-End: 460-527
gcagatggcgtccgagtgcacagtggccagtgtgattccgcagtcttgggctgttcggccaagcgcccaccggacgtgggacgctggagggtcagcagcgtggagtcctggccttcagcgtccgcggctgggaaatcggccatcgccacggcgggaactaggactggctgcgtcccggcccttccccatccgtccaccggactcgtgggcgcccgcactgactgtgatgtagtttcctgacctctgacacgtattgtctcaagattaaaggtccagatttggaacaagtctctctagagattgaacagagctgcgcctggaacccgccgcagggaggagacctgaagaccagaggaaacacagcaagcgttcgtggcattcagggatgtggctgtgtacttcacccaggaggagtggaggttgttgagccctgctcagaggaccctgcacagggaggtgatgctggagacttataaccatctggtctcactggaaattccatcttctaaaccaaaactcattgctca

SEQ ID NO: 141145 - DNA, 510 bp, Homo sapiens
  Payload ID: 7727
  Gene Symbol: HKR1
  Gene Name: HKR1, GLI-Kruppel zinc finger family member
  ENST ID: ENST00000586897
  CDS Start-End: 94-369
gcgttcgtggcattcagggatgtggctgtgtacttcacccaggaggagtggaggttgttgagccctgctcagaggaccctgcacagggaggtgatgctggagacttataaccatctggtctcactggaaattccatcttctaaaccaaaactcattgctcagctggagcgaggggaagcgccctggagagaggagagaaaatgtccactggacctctgtccagatgaagtctcactctgttgcctaggctggagtgcagtggcgcgatctcggctcactgcaacctccacctcctggtttcaagcagttctctgcctcagcctcccgattagctgggactacagaatcgaagccagaaattcaacttagtccctcctgccctctgattttctccagtcagcaagctctcagccaacatgtgtggctgagtcatctctctcagctgttttcaagtttatgggcaggaaatcctctccacctgggaaaacactatccagaagatcagaaaca

SEQ ID NO: 141146 - DNA, 573 bp, Homo sapiens
  Payload ID: 7727
  Gene Symbol: HKR1
  Gene Name: HKR1, GLI-Kruppel zinc finger family member
  ENST ID: ENST00000592768
  CDS Start-End: 253-573
agtgtgtagcgttgacgtcagaaacacttccggtcggtggcccaggcgcgttaagctggttgggacccgggaaggcctccctcttaaggtctttcccacacctctgcaccttgttacctgactttcggcttcaggatccgcagcgtgcacccgcgttccgcgttcgtggcattcagggatgtggctgtgtacttcacccaggaggagtggaggttgttgagccctgctcagaggaccctgcacagggaggtgatgctggagacttataaccatctggtctcactggaaattccatcttctaaaccaaaactcattgctcagctggagcgaggggaagcgccctggagagaggagagaaaatgtccactggacctctgtccagaatcgaagccagaaattcaacttagtccctcctgccctctgattttctccagtcagcaagctctcagccaacatgtgtggctgagtcatctctctcagctgttttcaagtttatgggcaggaaatcctctccacctgggaaaacactatccagaagatcagaaacaacagcaggatccattctgctttagt

SEQ ID NO: 141147 - DNA, 525 bp, Homo sapiens
  Payload ID: 7727
  Gene Symbol: HKR1
  Gene Name: HKR1, GLI-Kruppel zinc finger family member
  ENST ID: ENST00000591417
  CDS Start-End: 237-512
gtcagaaacacttccggtcggtggcccaggcgcgttaagctggttgggacccgggaaggcctccctcttaaggtctttcccacacctctgcaccttgttacctgactttcggcttcaggatccgcagcgtgcacccgcgttccgcgttcgtggcattcagggatgtggctgtgtacttcacccaggaggagtggaggttgttgagccctgctcagaggaccctgcacagggaggtgatgctggagacttataaccatctggtctcactggaaattccatcttctaaaccaaaactcattgctcagctggagcgaggggaagcgccctggagagaggagagaaaatgtccactggacctctgtccagatggagccttgctctgttgccaggctggaatacagtggtgttatatcggctcactgcaacctctgcctcctgggttcaagcaattcccctgcctcagcctcctgagtagctgggactacagaatcgaagccagaaattcaacttagtccctcctgccct

SEQ ID NO: 141148 - DNA, 568 bp, Homo sapiens
  Payload ID: 7727
  Gene Symbol: HKR1
  Gene Name: HKR1, GLI-Kruppel zinc finger family member
  ENST ID: ENST00000585623
  CDS Start-End: 338-568
gtcggtggcccaggcgcgttaagctggttgggacccgggaaggcctccctcttaaggtctttcccacacctctgcaccttgttacctgactttcggcttcaggatccgcagcgtgcacccgcgttccatctgtcttctgagactttgcccttctccaggaagagcactcaggagaccaggaaaatggccacagggctcctgagagccaaaaaagaggcctgagcaggcacgtggcagcatttggtagaggaaggagtgagccctgctgtaggaactatatatattggaggagtggaggttgttgagccctgctcagaggaccctgcacagggaggtgatgctggagacttataaccatctggtctcactggaaattccatcttctaaaccaaaactcattgctcagctggagcgaggggaagcgccctggagagaggagagaaaatgtccactggacctctgtccagaatcgaagccagaaattcaacttagtccctcctgccctctgattttctccagtcagcaagctctcagccaacatgtgtggctgagtcatctctctcagctg

SEQ ID NO: 141149 - DNA, 3472 bp, Homo sapiens
  Payload ID: 7727
  Gene Symbol: HKR1
  Gene Name: HKR1, GLI-Kruppel zinc finger family member
  ENST ID: ENST00000591471
  CDS Start-End: 1642-2802
aggtcccgcctccgccagcctctcacagcccggaggcacctcccattggcgcctgacgggttggttagggcggcttttcttccggctgtgacaaatccagcctgaggagcgctcctgtgtctttcttagttgtttcttcccgcccacctgcccctcaaagccacaacccacttgcacaccaccgtgtggacacctaaaagcgaccgtctagatctgaaccgcgctgagggaatggtcagcttctctcccattagatggcttggcccaaaggacctagcgactgcccagacaaaaatttcttctgacatgctgcatgtgtctgtggtctctaagagtcaaaaccaaagccaaaagaaaaagacaaccccgccccccgcgaaacaacaacaacaacaacaacaacaacaacaaacaccaccaccaacccacctttcacgagaggagtccttgagaagagcctctccagccagaaccaggtccagatttggaacaagtctctctagagattgaacagagctgcgcctggaacccgccgcagggaggagacctgaagaccagaggaaacacagcaaacagagtctcgctctgttgcccaggctggagtgtagtatggcgatctctgctcactgcaagctctgccttccgggttcacaccattctcccacctcagcccctggagtagttgggactacaggctcatgctaccacacctggcgttcgtggcattcagggatgtggctgtgtacttcacccaggaggagtggaggttgttgagccctgctcagaggaccctgcacagggaggtgatgctggagacttataaccatctggtctcactggaaattccatcttctaaaccaaaactcattgctcagctggagcgaggggaagcgccctggagagaggagagaaaatgtccactggacctctgtccagggggaatggtttcagctttcgcccattcagtatgaagttggctgtaggtctgtcacagataactcttcttattttgagatgaagtctcactctgttgcctaggctggagtgcagtggcgcgatctcggctcactgcaacctccacctcctggtttcaagcagttctctgcctcagcctcccgattagctgggactacagaatcgaagccagaaattcaacttagtccctcctgccctctgattttctccagtcagcaagctctcagccaacatgtgtggctgagtcatctctctcagctgttttcaagtttatgggcaggaaatcctctccacctgggaaaacactatccagaagatcagaaacaacagcaggatccattctgctttagtggcaaagcagaatggattcaagagggagaagactccagactcctgtttgggagagtaagcaaaaatggcacttcaaaggcactttccagcccacctgaagaacaacagccagcacagtccaaggaagacaacacagtggtggatatagggtccagccctgaacggagggcagatctagaggaaacagacaaagtattgcatggtttagaagtctcaggatttggagaaatcaaatatgaagagtttgggccaggctttatcaaggagtcaaacctccttagcctccagaagacacaaactggggagacaccttacatgtacactgagtggggagacagctttggcagtatgtcagtcctcatcaaaaacccaaggacacactctgggggaaagccttatgtgtgcagggaatgtgggcgaggctttacgtggaagtcaaacctgatcacacatcagaggacacactcaggggagaaaccttatgtgtgcaaggattgtggacgaggctttacttggaagtcgaacctctttacacatcagcggacacactcagggctcaagccttatgtgtgcaaggaatgtgggcagagctttagcctgaagtcaaacctcattacccaccagagggcgcacactggggagaagccttatgtttgcagggaatgtgggcgtggctttcgccagcattcacacctggtcagacacaagaggacacattcaggagagaagccttacatttgcagggagtgtgagcaaggctttagccagaagtcacacctcatcagacacttaaggacacacacaggagagaagccttatgtatgcacagaatgtgggcgtcactttagctggaaatcaaacctcaaaacacaccagaggacacactcaggggttaaaccttatgtctgcctggagtgcgggcagtgctttagcctgaagtcaaaccttaacaaacaccagaggtcacacacgggggagaagccatttgtatgtacggagtgtgggcgaggctttacccggaaatcaaccctgagcacgcaccagaggacacactcaggggagaagccatttgtatgtgctgagtgtggacgaggctttaatgataagtccaccctcatttcacaccagaggacacattcaggggaaaagccttttatgtgcagggagtgtggcagaaggtttcggcagaagcctaacctgtttaggcacaagagggcacactcaggtgcctttgtgtgcagggagtgtgggcaaggcttttgtgctaagttaactctcattaaacaccagagagcacacgcaggggggaagcctcatgtgtgcagggagtgtgggcaaggctttagccggcagtcacacctcattagacaccagaggacacattcaggagagaagccttatatttgcagaaagtgtggacggggctttagtcggaagtccaaccttatcagacatcagaggacacactcaggatagaaactttatgtgtatagggaatgtggtacagcctttagccaggagtcatacttcatcagacaccagaggacacacacagtgctgtggctttttcagccattgctagataccaaagtggagacattctgtgtgtgattatgcatgagactgtactggtaagacttgtatctccatccacctgaaggagaattgctggctcattttcaggagccctgcccttcctcactgtggatggtgggttgtggaaacccggtcaggtaatgatagtggcaggaggcagtcaaatgcccaggcagataggggtgggtacctggtgaaacccaaccttaaagctgaagacagtcccggctaaatcctcatactgaattgagaacctgtcttcccatttggtgtgctttcctccgattgatcccaacccttcacctattttacgtatacctgccctttcctaattggtttttacactgctgtgcccaccttttgagtggtgcctttgcatacttacaaatcagtcaacgtgtattcccctattctgagcccataaaagacccagactcagctgcagtgaggagagaaatcaccctgctgtgggggttggggaccactccctgcatcccctctccactgagagctgttcttttgctcaataaaattcttttctacccatcct

SEQ ID NO: 141150 - DNA, 734 bp, Homo sapiens
  Payload ID: 7727
  Gene Symbol: HKR1
  Gene Name: HKR1, GLI-Kruppel zinc finger family member
  ENST ID: ENST00000591259
  CDS Start-End: 128-643
gtctttcccacacctctgcaccttgttacctgactttcggcttcaggatccgcagcgtgcacccgcgttccatctgtcttctgagactttgcccttctccaggaagagcactcaggagaccaggaaaatggccacagggctcctgagagccaaaaaagaggcgttcgtggcattcagggatgtggctgtgtacttcacccaggaggagtggaggttgttgagccctgctcagaggaccctgcacagggaggtgatgctggagacttataaccatctggtctcactggaaattccatcttctaaaccaaaactcattgctcagctggagcgaggggaagcgccctggagagaggagagaaaatgtccactggacctctgtccagatggagccttgctctgttgccaggctggaatacagtggtgttatatcggctcactgcaacctctgcctcctgggttcaagcaattcccctgcctcagcctcctgagtagctgggactacaggtgcacaccaccacacctggctaattttttgtattttagtagagacggggtttcaccatgttggccaggatggtctcaatctcctgaccttgtgatccacccgcctcagcctcccaaagtgctgggattacaggcatgagccaccatgcctggcccttttcattgtttattaaccatttgcatatcttttttagtaaaatgcctattcaattcttttctttattttaaaa

SEQ ID NO: 141151 - DNA, 704 bp, Homo sapiens
  Payload ID: 7727
  Gene Symbol: HKR1
  Gene Name: HKR1, GLI-Kruppel zinc finger family member
  ENST ID: ENST00000590582
  CDS Start-End: 309-704
tgcaccttgttacctgactttcggcttcaggatccgcagcgtgcacccgcgttccgtgagtgccctataggcagtcagcatgcccctctgcgtgtccctgtgttacggggacgccggctgggagccgcagagctatctcagaactagggcgctctcctttgggcacctccaggccattttcctttcattcgagcccacagggttagagataaaccctcactccgttgcttggggacaagggcttcactccctgtcccgagcttgcggctgagcttgagggtggctgggtcatcctggccccccactggatgggaattggctgctctggtgatttctgtgacatcccagaccccaactgtggggctctggagcggactgcgcttcacttcgtggggagggtgtttccacctaggccactcttatttctcttcacatccccagatctgtcttctgagactttgcccttctccaggaagagcactcaggagaccaggaaaatggccacagggctcctgagagccaaaaaagagaaattccatcttctaaaccaaaactcattgctcagctggagcgaggggaagcgccctggagagaggagagaaaatgtccactggacctctgtccagggggaatggtttcagctttcgcccattcagtatgaagttggctgtaggtctgtcacagataactcttcttattttgag

SEQ ID NO: 141152 - DNA, 556 bp, Homo sapiens
  Payload ID: 7727
  Gene Symbol: HKR1
  Gene Name: HKR1, GLI-Kruppel zinc finger family member
  ENST ID: ENST00000587437
  CDS Start-End: 169-294
gcgttaagctggttgggacccgggaaggcctccctcttaaggtctttcccacacctctgcaccttgttacctgactttcggcttcaggatccgcagcgtgcacccgcgttccatctgtcttctgagactttgcccttctccaggaagagcactcaggagaccaggaaaatggccacagggctcctgagagccaaaaaagagagttttgctcttgttgcccaggctggagtgcaatggcgcaatctcggcttaccgcaagtaactgggattacaggcatgcgccaccacacctgactaattttgtatttttagtagagacggggtttctccatattggtcaggctgatctcaaactctcgacctcaggcgttcgtggcattcagggatgtggctgtgtacttcacccaggaggagtggaggttgttgagccctgctcagaggaccctgcacagggaggtgatgctggagacttataaccatctggtctcactggaaattccatcttctaaaccaaaactcattgctcagctggagcgaggggaagcgccctggagag

SEQ ID NO: 141153 - DNA, 547 bp, Homo sapiens
  Payload ID: 7727
  Gene Symbol: HKR1
  Gene Name: HKR1, GLI-Kruppel zinc finger family member
  ENST ID: ENST00000591134
  CDS Start-End: 231-371
gggttccaaatccagatagtatgggttgaatccacgctcttcatcaccacccactttccctccttaggcctgagcaggcacgtggcagcatttggtagaggaaggagtgagccctgctgtaggaactatatatattggcgttcgtggcattcagggatgtggctgtgtacttcacccaggaggagtggaggttgttgagccctgctcagaggaccctgcacagggaggtgatgctggagacttataaccatctggtctcactggaaattccatcttctaaaccaaaactcattgctcagctggagcgaggggaagcgccctggagagaggagagaaaatgtccactggacctctgtccagacacagaatgaagacattgtgtgaggacctgagctgctgcagctaccttgcaaccacataaagcaacactgccaatacattgaggactgcagagcaggaggaaggattcttgctacaattggtcacctgctaagccaactgaacttcttgctaagtggggaaataaatatctttactgtataagcta

SEQ ID NO: 141154 - DNA, 2152 bp, Homo sapiens
  Payload ID: 7727
  Gene Symbol: HKR1
  Gene Name: HKR1, GLI-Kruppel zinc finger family member
  ENST ID: ENST00000589392
  CDS Start-End: 138-2063
gcgttaagctggttgggacccgggaaggcctccctcttaaggtctttcccacacctctgcaccttgttacctgactttcggcttcaggatccgcagcgtgcacccgcgttccgaagagcactcaggagaccaggaaaatggccacagggctcctgagagccaaaaaagaggcgttcgtggcattcagggatgtggctgtgtacttcacccaggaggagtggaggttgttgagccctgctcagaggaccctgcacagggaggtgatgctggagacttataaccatctggtctcactggaaattccatcttctaaaccaaaactcattgctcagctggagcgaggggaagcgccctggagagaggagagaaaatgtccactggacctctgtccagcagaatcgaagccagaaattcaacttagtccctcctgccctctgattttctccagtcagcaagctctcagccaacatgtgtggctgagtcatctctctcagctgttttcaagtttatgggcaggaaatcctctccacctgggaaaacactatccagaagatcagaaacaacagcaggatccattctgctttagtggcaaagcagaatggattcaagagggagaagactccagactcctgtttgggagagtaagcaaaaatggcacttcaaaggcactttccagcccacctgaagaacaacagccagcacagtccaaggaagacaacacagtggtggatatagggtccagccctgaacggagggcagatctagaggaaacagacaaagtattgcatggtttagaagtctcaggatttggagaaatcaaatatgaagagtttgggccaggctttatcaaggagtcaaacctccttagcctccagaagacacaaactggggagacaccttacatgtacactgagtggggagacagctttggcagtatgtcagtcctcatcaaaaacccaaggacacactctgggggaaagccttatgtgtgcagggaatgtgggcgaggctttacgtggaagtcaaacctgatcacacatcagaggacacactcaggggagaaaccttatgtgtgcaaggattgtggacgaggctttacttggaagtcgaacctctttacacatcagcggacacactcagggctcaagccttatgtgtgcaaggaatgtgggcagagctttagcctgaagtcaaacctcattacccaccagagggcgcacactggggagaagccttatgtttgcagggaatgtgggcgtggctttcgccagcattcacacctggtcagacacaagaggacacattcaggagagaagccttacatttgcagggagtgtgagcaaggctttagccagaagtcacacctcatcagacacttaaggacacacacaggagagaagccttatgtatgcacagaatgtgggcgtcactttagctggaaatcaaacctcaaaacacaccagaggacacactcaggggttaaaccttatgtctgcctggagtgcgggcagtgctttagcctgaagtcaaaccttaacaaacaccagaggtcacacacgggggagaagccatttgtatgtacggagtgtgggcgaggctttacccggaaatcaaccctgagcacgcaccagaggacacactcaggggagaagccatttgtatgtgctgagtgtggacgaggctttaatgataagtccaccctcatttcacaccagaggacacattcaggggaaaagccttttatgtgcagggagtgtggcagaaggtttcggcagaagcctaacctgtttaggcacaagagggcacactcaggtgcctttgtgtgcagggagtgtgggcaaggcttttgtgctaagttaactctcattaaacaccagagagcacacgcaggggggaagcctcatgtgtgcagggagtgtgggcaaggctttagccggcagtcacacctcattagacaccagaggacacattcaggagagaagccttatatttgcagaaagtgtggacggggctttagtcggaagtccaaccttatcagacatcagaggacacactcaggatagaaactttatgtgtatagggaatgtggtacagcctttagccaggagtcatacttcatcagacaccagaggacacacacagtgctgtggct

SEQ ID NO: 141155 - DNA, 566 bp, Homo sapiens
  Payload ID: 7727
  Gene Symbol: HKR1
  Gene Name: HKR1, GLI-Kruppel zinc finger family member
  ENST ID: ENST00000592168
  CDS Start-End: 290-454
tcggtggcccaggcgcgttaagctggttgggacccgggaaggcctccctcttaaggtctttcccacacctctgcaccttgttacctgactttcggcttcaggatccgcagcgtgcacccgcgttccgcctgagcaggcacgtggcagcatttggtagaggaaggagtgagccctgctgtaggaactatatatattggcgttcgtggcattcagggatgtggctgtgtacttcacccaggaggagtggaggttgttgagccctgctcagaggaccctgcacagggaggtgatgctggagacttataaccatctggtctcactggaaattccatcttctaaaccaaaactcattgctcagctggagcgaggggaagcgccctggagagaggagagaaaatgtccactggacctctgtccagggggaatggtttcagctttcgcccattcagtatgaagttggctgtaggtctgtcacagataactcttcttattttgagcagaatcgaagccagaaattcaacttagtccctcctgccctctgattttctccagtcagcaagctctca

SEQ ID NO: 141156 - DNA, 563 bp, Homo sapiens
  Payload ID: 7727
  Gene Symbol: HKR1
  Gene Name: HKR1, GLI-Kruppel zinc finger family member
  ENST ID: ENST00000591391
  CDS Start-End: 182-563
cggtggcccaggcgcgttaagctggttgggacccgggaaggcctccctcttaaggtctttcccacacctctgcaccttgttacctgactttcggcttcaggatccgcagcgtgcacccgcgttccatctgtcttctgagactttgcccttctccaggaagagcactcaggagaccaggaaaatggccacagggctcctgagagccaaaaaagaggaggagtggaggttgttgagccctgctcagaggaccctgcacagggaggtgatgctggagacttataaccatctggtctcactggaaattccatcttctaaaccaaaactcattgctcagctggagcgaggggaagcgccctggagagaggagagaaaatgtccactggacctctgtccagcagaatcgaagccagaaattcaacttagtccctcctgccctctgattttctccagtcagcaagctctcagccaacatgtgtggctgagtcatctctctcagctgttttcaagtttatgggcaggaaatcctctccacctgggaaaacactatccagaagatcagaaac

SEQ ID NO: 141157 - DNA, 480 bp, Homo sapiens
  Payload ID: 7727
  Gene Symbol: HKR1
  Gene Name: HKR1, GLI-Kruppel zinc finger family member
  ENST ID: ENST00000589801
  CDS Start-End: 368-480
cgcggctgggaaatcggccatcgccacggcgggaactaggactggctgcgtcccggcccttccccatccgtccaccggactcgtgggcgcccgcactgactgtgatgtagtttcctgacctctgacacgtattgtctcaagattaaaggaatcaggagcttcttttgctgttcttctgttttggatgcattggaaggtccagatttggaacaagtctctctagagattgaacagagctgcgcctggaacccgccgcagggaggagacctgaagaccagaggaaacacagcaactggcaagcagatgaattaactcccccaagcttctagctgtgtttctactcagtgggagagatttggagtgaatcatgagggtcaaccacacagtgtctacaatgctccctacatgcatggttcacagacaaaccatgagttgttccggggctggaggaataacggttgtattaaatgtgttaaagta

SEQ ID NO: 141158 - DNA, 576 bp, Homo sapiens
  Payload ID: 7727
  Gene Symbol: HKR1
  Gene Name: HKR1, GLI-Kruppel zinc finger family member
  ENST ID: ENST00000590166
  CDS Start-End: 512-576
tggtctttcactccttggtgccaaggtcacaatccaaagtagggtctagaaatctttcctacttccctcagggaagccttttgacctctcattctttttttttttttttgagacagagttttgctcttgttgcccaggctggagtgcaatggcgcaatctcggcttaccgcaagtaactgggattacaggcatgcgccaccacacctgactaattttgtatttttagtagagacggggtttctccatattggtcaggctgatctcaaactctcgacctcaggtgatccgcccaccttggcctcccaaagtgctgggattacaggcatgaaccaccgggcctggccttgacctctcattctaaagtgtgggagggaaagacaggctcctgggtgagcagaggtgtgttttgtgttaaaggcgttcgtggcattcagggatgtggctgtgtacttcacccaggaggagtggaggttgttgagccctgctcagaggaccctgcacagggaggtgatgctggagacttataaccatctggtctcactggaaattccatcttctaaaccaaaactcattgc

SEQ ID NO: 141159 - DNA, 1720 bp, Homo sapiens
  Payload ID: 7728
  Gene Symbol: HCG27
  Gene Name: HLA complex group 27 (non-protein coding)
  ENST ID: ENST00000383331
  CDS Start-End: 1-569
atttctctactcacctgtctccgaatccgtcgtggtgtttcaagcgagtcaagattccagatcgcgccccaggctggactcggaattactgccccgcgggtctgcattttcacagcggcaggtggcttgtggtccctgacaaggaggaccctgagggcaaccacaccttgccatgcagagcacctggcttctcatctgccaagctcactctgacccggctgcaggaagggaaggagccaaccccggactcaagactcaaggggaccagaaccagggagatgagacataccagggctgggcagctgtgggggtccttccagagaggagctgagatacgcctacctggaggggcccctgggcctggaggggctcctcagtgtgactgggtgaagtgttttcagaggaccagggttgaggttgggggcatctcatccagaccctgccggcatctgccccagaacccaagggcccctccttcctccctcctcaatggaaatgctggagatgtcctcagtcaccctctgagcactcacacatcaccccttatttggaaatttttctcactctaaccttccttcctgccgcaccttctgccccatccccaggctctggcctctctctctcctcttctaccctttagcaggtaatgactcagttcccactgaggagccagctgtaggtgagagtttgggctctcggtgaggttgggagaaggaaaaggcttatgggccagggggtgggagggagaatgggcacagccagagcagagtggaagggttgggggaggcgataaagacagatgtttccgtattaccatttttctttcatggtccgagggagctgcccttcccccaagcccaggaaagtgaaaagagaagcaggaacagtaaaatactccacaggaaagaaaaatcttagtgatccctcctgctgtctctttccttttgcctattctggcaaattttgtaagtgaaatttgttaccaagatgtgaaaatcttataagaaagtctctaaatatttgagaataaaattatcaatgtctcagctctgcaggctgaaaaaacggaggctttacaaaataaaatcatgcttggaaaacttctcctctgagggatgtcaaaggctgcactgaataagctctaaggtggtgctgaaatgagtcatttatttgcctgtgtaagctcaggcaggtgttggaattgaggaagtataggtaatgaaaaaagtaaacatgtcctcgggacatagcgactggtgatgaccacacaatcaacacaataaactctagcattcacattgtagtccagctcattcaagcaaagctatctccaatagggagtttaccctgtacagaacacgtgcatttccacctgttctcagactgaccctttgctcatcacaatagtgaaaaaaaacacagccctgggtggagatttaagatgctaatgagtcatgagatgtatgaacaagcatgtacagctactgcacacgtgcacccagaagaccgcccagaacatgcttgctagtaacacctcttcccacccacctcctgtgaataatcatgtaagactcccataaagggagtttctccagcagtgatcaatgctgtctcatccttaggagcagcccaccctgaatcctctcagggtgtacagtttattttgcacttaactttcaaaataatatttttcctttgtaataaattgctttgtacttca

SEQ ID NO: 141160 - DNA, 895 bp, Homo sapiens
  Payload ID: 7728
  Gene Symbol: HCG27
  Gene Name: HLA complex group 27 (non-protein coding)
  ENST ID: ENST00000424675
  CDS Start-End: 1-490
gcagtggcgcctaaagtctgcaaggaggaggtcgcctctgtgctggcttgtggtccctgacaaggaggaccctgagggcaaccacaccttgccatgcagagcacctggcttctcatctgccaagctcactctgacccggctgcaggaagggaaggagccaaccccggactcaagactcaaggggaccagaaccagggagatgagacataccagggctgggcagctgtgggggtccttccagagaggagctgagatacgcctacctggaggggcccctgggcctggaggggctcctcagtgtgactgggtgaagtgttttcagaggaccagggttgaggttgggggcatctcatccagaccctgccggcatctgccccagaacccaagggcccctccttcctccctcctcaatggaaatgctggagatgtcctcagtcaccctctgagcactcacacatcaccccttatttggaaatttttctcactctaaccttccttcctgccgcaccttctgccccatccccaggctctggcctctctctctcctcttctaccctttagcaggtaatgactcagttcccactgaggagccagctgtaggtgagagtttgggctctcggtgaggttgggagaaggaaaaggcttatgggccagggggtgggagggagaatgggcacagccagagcagagtggaagggttgggggaggcgataaagacagatgtttccgtattaccatttttctttcatggtccgagggagctgcccttcccccaagcccaggaaagtgaaaagagaagcaggaacagtaaaatactccacaggaaagaaaaatcttagtgatccctcctgctgtctctttccttttgcctattctggcaaattttgtaagtgaa

SEQ ID NO: 141161 - DNA, 1184 bp, Homo sapiens
  Payload ID: 7729
  Gene Symbol:
  Gene Name: HLA-DRB4
  ENST ID: ENST00000457451
  CDS Start-End: 64-864
atagttctccctgattgagacttgcctgctgctgtgaccactggtcttgtcctcttctccagcatggtgtgtctgaagctccctggaggctcctgtatggcagcgctgacagtgacattgacggtgctgagctccccactggctttggctggggacacccaaccacgtttcttggagcaggctaagtgtgagtgtcatttcctcaatgggacggagcgagtgtggaacctgatcagatacatctataaccaagaggagtacgcgcgctacaacagtgacctgggggagtaccaggcggtgacggagctggggcggcctgacgctgagtactggaacagccagaaggacctcctggagcggaggcgggccgaggtggacacctactgcagatacaactacggggttgtggagagcttcacagtgcagcggcgagtccaacctaaggtgactgtgtatccttcaaagacccagcccctgcagcaccacaacctcctggtctgctctgtgaatggtttctatccaggcagcattgaagtcaggtggttccggaacggccaggaagagaaggctggggtggtgtccacaggcctgatccagaatggagactggaccttccagaccctggtgatgctggaaacagttcctcggagtggagaggtttacacctgccaagtggagcatccaagcatgatgagccctctcacggtgcaatggagtgcacggtctgaatctgcacagagcaagatgctgagtggagtcgggggctttgtgctgggcctgctcttccttgggacagggctgttcatctacttcaggaatcagaaaggacactctggacttcagccaacaggactcttgagctgaagtgcagatgaccacattcaaggaagaaccttctgccccagctttgcaagatgaaaagctttcccacttggctcttattcttccacaagagctttgtcaggaccaggttgttactggttcagcaactctgcagaaaatgtcctcccttgtggcttccttagctcctgttcttggcctgaagcctcacagctttgatggcagtgcctcatcttcaacttttgtgcttccctttacctaaactgtcctgcctcccgtgcatctgtactccccttgtgccacacattgcattattaaatgtttctcaaacatggagttaaaaa

SEQ ID NO: 141162 - DNA, 878 bp, Homo sapiens
  Payload ID: 7729
  Gene Symbol:
  Gene Name: HLA-DRB4
  ENST ID: ENST00000618157
  CDS Start-End: 24-833
ctacttttcccttcgtctcaattatgtcttggaaaaaggctttgcggatccccggaggccttcgggcagcaactgttaccttgatgctggcgatgctgagcaccccagtggctgagggcagagactctcccgaggatttcgtgtaccagtttaaggccatgtgctacttcaccaacgggacggagcgcgtgcgttatgtgaccagatacatctataaccgagaggagtacgcacgcttcgacagcgacgtggaggtgtaccgggcggtgacgccgctggggccgcctgacgccgagtactggaacagccagaaggaagtcctggagaggacccgggcggagttggacacggtgtgcagacacaactaccagttggagctccgcacgaccttgcagcggcgaggtgagcctaaggtgactgtgtatccttcaaagacccagcccctgcagcaccacaacctcctggtctgctctgtgaatggtttctatccaggcagcattgaagtcaggtggttccggaacggccaggaagagaaggctggggtggtgtccacaggcctgatccagaatggagactggaccttccagaccctggtgatgctggaaacagttcctcggagtggagaggtttacacctgccaagtggagcatccaagcatgatgagccctctcacggtgcaatggagtgcacggtctgaatctgcacagagcaagatgctgagtggagtcgggggctttgtgctgggcctgctcttccttgggacagggctgttcatctacttcaggaatcagaaaggacactctggacttcagccaacaggactcttgagctgaagtgcagatgaccacattcaaggaagaaccttctgccccagcttt

SEQ ID NO: 141163 - DNA, 4974 bp, Homo sapiens
  Payload ID: 7730
  Gene Symbol: HMGXB3
  Gene Name: HMG box domain containing 3
  Uniprot ID: Q12766
  ENST ID: ENST00000502717
  CDS Start-End: 465-4343
gccgggacgggtctccctggcgatccgtggtgtgccgctactgccggtgcagccgccaaaccggtgcctcggtgacgaccgtgtccctgccgtcttcctcgagctccccggggcttgacccccggggccctcggcaggcatcggtgaggagcctgcggagcgaacctgtgctcctattcttgcccttcaggaccccatatcgcgactccgaggaggggaagcgagaggggctgtcgcgactccgcgccgtgtgtcgccgggcggggccgcggggccggggctccttcagcccccgggatgcgcgcgcgagccctcgcctccacttccttgttgctgctgtcacgactggagccgcctctcgccgacagcggggagcgcgagtgcgccagccatccccctcgtccagccgccgggccaagcgcctccgggaatgtgagcggcgcagcttgcacgctcctccggccatggacgcatcatatgatggtactgaggtaactgtcgtgatggaggaaattgaggaagcctattgttacacctctcctgggccacccaagaagaagaaaaagtataaaatacatggagaaaagacaaagaaacccaggtctgcttaccttctgtactattacgacatctacctgaaagtgcagcaggagctcccccacctccctcagtctgagatcaataagaagattagtgagagttggaggcttctcagcgtggccgagaggagttactacttggagaaagccaaactagagaaggaaggtttggatcctaactctaagctctctgcactgactgctgtggttccggacatcccaggtttccgcaagatcctcccacgctcagattatatcatcatccccaagagcagcctgcaggaggaccggagctgccctcagctagagctatgtgtggctcagaaccagatgtccccgaaaggacctcctcttgtgtccaacactgccccggagacagtgcccagccatgcaggcatggcagagcagtgcctggctgtggaggccctggctgaggaggtgggagcccttacccagtcaggtgctgtacaggagattgccacctcagagatcctcagccaggatgtgctcctagaggacgcttccctagaagtaggggagagccaccaaccttaccagacaagcctggtaattgaagagaccttggtgaatggctcaccagacctccccactggaagcctggctgtgccccacccccaggttggggagagtgtatcagtggtaacagtcatgagggattccagtgagagtagctcctctgcaccagccacacagttcatcatgttgcctctgcctgcctactcggttgtggagaaccccacctccatcaaactgaccactacatatacccgccggggccatgggacatgcaccagcccagggtgctcctttacatatgtcaccaggcacaagccacctaagtgccctacctgtggtaacttcctaggagggaagtggatcccaaaggaaaagccagccaaagtaaaagtggaattggcttctggcgtctcttccaaaggctctgtggtgaaaagaaatcagcaacctgtcaccactgagcaaaattcctctaaggaaaatgcctccaaactgactctggagaattcggaagctgtaagccagctcctgaacgtagctcctcccagagaagtaggtgaggagagtgagtgggaggaagtgatcatctccgatgcccatgttttggttaaggaagctcccgggaattgtggtacagcagtcactaagacgccagtcgtcaaaagtggtgtgcagcctgaggtcactctggggacaactgacaatgacagtcctggagcagacgtaccaacaccatccgaggggacaagtacctccagtccactccctgctcctaaaaaacctacaggagctgacctgcttacccctgggtccagagctccagagcttaaaggcagagcacggggcaagccctcattactggctgcagcaagacccatgagagcaattttgccagccccagttaacgtggggcgaggcagcagcatgggactgcccagggccaggcaggccttttccctgagtgataagactccctctgtgaggacttgtggtctgaagccaagcacactgaagcagctgggccagcccattcaacagccatctggccctggtgaggtgaagctaccaagtggcccatccaacaggacttctcaggtgaaagttgtggaggtcaagcccgatatgtttcctccatataagtacagctgcactgtcacattggatttgggcctggctacatcaagaggccggggaaagtgcaagaatccctcttgtagctatgtctacaccaacaggcacaaacctcgaatttgtcccagctgtggtgttaaccttgccaaagaccggactgagaaaaccaccaaggctatcgaggtgagctcaccactcccagatgtactgaatgccacagagcccctgagcacagcccagagggagatccagcgccagtccacactgcagctgctgcgcaaagtcctgcagattcctgagaatgagtcagagctggctgaggtcttcgccttgattcatgaactcaacagctctcgacttatcttgtccaacgtgagtgaggagacagtcaccatcgagcaaacctcttggtcgaattattatgagtctccgtccacgcagtgccttctctgtagcagcccattattcaaagggggacaaaactccctggctgggccccaggagtgctggctgctgacagccagccgtctgcagacagtgactgcccaggtgaagatgtgtctgaacccccattgtctggccctgcacagcttcatagacatctacacaggtctctttaatgtggggaacaagctgctggtaagcctggacttgctttttgcaatcagaaatcagatcaagctcggagaggaccccagagtgtccatcaatgttgttctgaagtcggtgcaggagcagacagagaagactctgacctcggaggagctgagccagctgcaggagctgctgtgcaatggctattgggcctttgagtgcctcactgtccgagactacaatgacatgatctgtggcatctgtggtgtggcccccaaagtggaaatggctcagaggagtgaagagaatgtgctagcactgaagagcgtggagttcacctggcctgaattcctgggctctaatgaggtaaatgtggaggacttttgggccacgatggagacagaggtgattgagcaggtggcatttcctgccagcatccctatcaccaaatttgatgcgtctgttattgcccccttcttcccaccactcatgagaggagctgtggtcgtcaacactgagaaagacaaaaacctggatgtgcagccagtacctggcagtggcagtgccttggtgaggctgctccaggagggcacctgcaagcttgatgagattggctcctacagtgaagagaagctgcagcacctgctaaggcagtgtggaatcccctttggggcagaagactccaaggaccagctctgcttctccttgttggccctctacgaatctgtacagaatggagctagagctatacggcccccacgtcacttcacaggtggtaaaatctacaaggtgtgcccccatcaggtggtctgcggctccaagtatcttgtgcgaggtgagagtgcccgtgaccatgtggacctgcttgcctcttcccgccactggccgcctgtctatgtggtagatatggccacgtcagtggccctgtgtgctgacctctgctacccagagctgactaaccagatgtgggggaggaaccagggctgtttctctagccccacagagccacctgtgagtgtgtcctgcccagagctcttggaccagcattatactgtggacatgacagaaactgagcactctatccagcacccagtcaccaagactgccacgcggcgcatcgtccatgcaggcctacagcccaatcctggtgaccccagtgctgggcaccactccttggccctgtgccctgaattggcaccttacgcaaccatcctggcctccatcgtggacagcaaaccaaacggtgtccgccagcggcccattgccttcgacaatgccactcactattacctctacaaccgcctcatggacttcctcaccagccgcgaaattgtcaatcgtcagatccatgacattgtacagagctgccagcctggtgaggtggtcattcgtgacaccctctaccgccttggggttgctcagatcaagacagagacagaggaggagggtgaggaagaggaggtggccgcagtggcagaataagccaggctgttgtacagggactacaccatctctcaagccatagtaaggcccttgcctgaggcagagctatccaggggacctgcagaagtggtctcctgtggggagggcctctgactgctgggactgaccaaagagcttccattccctgagcatggtgggacccagggtcctcagttctcaaccctccaggggtcaggagtggtaccaggaaacctcttctggccccgagagagcacttgggggacacggtatgtttaatggaggggaggctgagggaaaggctcgtagctggtgggttccgtggggcctgcggtgtgggtcagggtggaggtcctgggtgggctaaggcgtgagccccagcactaggtgggaaggctgctgaggtctctcccacccctgaggagccctggtttcagccccctcagtctgatgaattgcttagcctgttgcctttgactaggggcctgggtggcctcattaactctaggggtccctttgggctcttgattctccctgaaggagggatgcatttctctcttgctcttcctgtacccacatttgggggaagctgaggagggaggaacagtcagccacagctctcttccagcactgtcctctccaccccaagctt

SEQ ID NO: 141164 - DNA, 5275 bp, Homo sapiens
  Payload ID: 7730
  Gene Symbol: HMGXB3
  Gene Name: HMG box domain containing 3
  ENST ID: ENST00000503427
  CDS Start-End: 862-4644
atgagagggaaagactgagacaggctgaggtcaggccttgaacgtcgtgctgaggagagggtggtattgtaggcttcccagcgcccgacgtggctctgaaaggtgaggcggggcctagatccctcacgctcagcacagccccgcccctgttacctgaacgccccacagcagtgcccgggggctgagcggccggggcgtcccaccgccggcagccacagcttcctcctccgcccgggacctctggccggaagcagtccgttcgccttactagacccgctccaagcctttgagcagttcgtgtgggtccgctcccaagctagggctgggctgttgcgcttgcgccaggggtcgcatgcagtcacgcgctgccgaccgcttccggtgcgccgcgagggccgccgggacgggtctccctggcgatccgtggtgtgccgctactgccggtgcagccgccaaaccggtgcctcggtgacgaccgtgtccctgccgtcttcctcgagctccccggggcttgacccccggggccctcggcaggcatcggtgaggagcctgcggagcgaacctgtgctcctattcttgcccttcaggaccccatatcgcgactccgaggaggggaagcgagaggggctgtcgcgactccgcgccgtgtgtcgccgggcggggccgcggggccggggctccttcagcccccgggatgcgcgcgcgagccctcgcctccacttccttgttgctgctgtcacgactggagccgcctctcgccgacagcggggagcgcgagtgcgccagccatccccctcgtccagccgccgggccaagcgcctccgggaatgtgagcggcgcagcttgcacgctcctccggccatggacgcatcatatgatggtactgaggtaactgtcgtgatggaggaaattgaggaagcctattgttacacctctcctgggccacccaagaagaagaaaaagtataaaatacatggagaaaagacaaagaaacccaggtctgcttaccttctgtactattacgacatctacctgaaagtgcagcaggagctcccccacctccctcagtctgagatcaataagaagattagtgagagttggaggcttctcagcgtggccgagaggagttactacttggagaaagccaaactagagaaggaaggtttggatcctaactctaagctctctgcactgactgctgtggttccggacatcccaggtttccgcaagatcctcccacgctcagattatatcatcatccccaagagcagcctgcaggaggaccggagctgccctcagctagagctatgtgtggctcagaaccagatgtccccgaaaggacctcctcttgtgtccaacactgccccggagacagtgcccagccatgcaggcatggcagagcagtgcctggctgtggaggccctggctgaggaggtgggagcccttacccagtcaggtgctgtacaggagattgccacctcagagatcctcagccaggatgtgctcctagaggacgcttccctagaagtaggggagagccaccaaccttaccagacaagcctggtaattgaagagaccttggtgaatggctcaccagacctccccactggaagcctggctgtgccccacccccaggttggggagagtgtatcagtggtaacagtcatgagggattccagtgagagtagctcctctgcaccagccacacagttcatcatgttgcctctgcctgcctactcggttgtggagaaccccacctccatcaaactgaccactacatatacccgccggggccatgggacatgcaccagcccagggtgctcctttacatatgtcaccaggcacaagccacctaagtgccctacctgtggtaacttcctaggagggaagtggatcccaaaggaaaagccagccaaagtaaaagtggaattggcttctggcgtctcttccaaaggctctgtggtgaaaagaaatcagcaacctgtcaccactgagcaaaattcctctaaggaaaatgcctccaaactgactctggagaattcggaagctgaagctcccgggaattgtggtacagcagtcactaagacgccagtcgtcaaaagtggtgtgcagcctgaggtcactctggggacaactgacaatgacagtcctggagcagacgtaccaacaccatccgaggggacaagtacctccagtccactccctgctcctaaaaaacctacaggagctgacctgcttacccctgggtccagagctccagagcttaaaggcagagcacggggcaagccctcattactggctgcagcaagacccatgagagcaattttgccagccccagttaacgtggggcgaggcagcagcatgggactgcccagggccaggcaggccttttccctgagtgataagactccctctgtgaggacttgtggtctgaagccaagcacactgaagcagctgggccagcccattcaacagccatctggccctggtgaggtgaagctaccaagtggcccatccaacaggacttctcaggtgaaagttgtggaggtcaagcccgatatgtttcctccatataagtacagctgcactgtcacattggatttgggcctggctacatcaagaggccggggaaagtgcaagaatccctcttgtagctatgtctacaccaacaggcacaaacctcgaatttgtcccagctgtggtgttaaccttgccaaagaccggactgagaaaaccaccaaggctatcgaggtgagctcaccactcccagatgtactgaatgccacagagcccctgagcacagcccagagggagatccagcgccagtccacactgcagctgctgcgcaaagtcctgcagattcctgagaatgagtcagagctggctgaggtcttcgccttgattcatgaactcaacagctctcgacttatcttgtccaacgtgagtgaggagacagtcaccatcgagcaaacctcttggtcgaattattatgagtctccgtccacgcagtgccttctctgtagcagcccattattcaaagggggacaaaactccctggctgggccccaggagtgctggctgctgacagccagccgtctgcagacagtgactgcccaggtgaagatgtgtctgaacccccattgtctggccctgcacagcttcatagacatctacacaggtctctttaatgtggggaacaagctgctggtaagcctggacttgctttttgcaatcagaaatcagatcaagctcggagaggaccccagagtgtccatcaatgttgttctgaagtcggtgcaggagcagacagagaagactctgacctcggaggagctgagccagctgcaggagctgctgtgcaatggctattgggcctttgagtgcctcactgtccgagactacaatgacatgatctgtggcatctgtggtgtggcccccaaagtggaaatggctcagaggagtgaagagaatgtgctagcactgaagagcgtggagttcacctggcctgaattcctgggctctaatgaggtaaatgtggaggacttttgggccacgatggagacagaggtgattgagcaggtggcatttcctgccagcatccctatcaccaaatttgatgcgtctgttattgcccccttcttcccaccactcatgagaggagctgtggtcgtcaacactgagaaagacaaaaacctggatgtgcagccagtacctggcagtggcagtgccttggtgaggctgctccaggagggcacctgcaagcttgatgagattggctcctacagtgaagagaagctgcagcacctgctaaggcagtgtggaatcccctttggggcagaagactccaaggaccagctctgcttctccttgttggccctctacgaatctgtacagaatggagctagagctatacggcccccacgtcacttcacaggtggtaaaatctacaaggtgtgcccccatcaggtggtctgcggctccaagtatcttgtgcgaggtgagagtgcccgtgaccatgtggacctgcttgcctcttcccgccactggccgcctgtctatgtggtagatatggccacgtcagtggccctgtgtgctgacctctgctacccagagctgactaaccagatgtgggggaggaaccagggctgtttctctagccccacagagccacctgtgagtgtgtcctgcccagagctcttggaccagcattatactgtggacatgacagaaactgagcactctatccagcacccagtcaccaagactgccacgcggcgcatcgtccatgcaggcctacagcccaatcctggtgaccccagtgctgggcaccactccttggccctgtgccctgaattggcaccttacgcaaccatcctggcctccatcgtggacagcaaaccaaacggtgtccgccagcggcccattgccttcgacaatgccactcactattacctctacaaccgcctcatggacttcctcaccagccgcgaaattgtcaatcgtcagatccatgacattgtacagagctgccagcctggtgaggtggtcattcgtgacaccctctaccgccttggggttgctcagatcaagacagagacagaggaggagggtgaggaagaggaggtggccgcagtggcagaataagccaggctgttgtacagggactacaccatctctcaagccatagtaaggcccttgcctgaggcagagctatccaggggacctgcagaagtggtctcctgtggggagggcctctgactgctgggactgaccaaagagcttccattccctgagcatggtgggacccagggtcctcagttctcaaccctccaggggtcaggagtggtaccaggaaacctcttctggccccgagagagcacttgggggacacggtatgtttaatggaggggaggctgagggaaaggctcgtagctggtgggttccgtggggcctgcggtgtgggtcagggtggaggtcctgggtgggctaaggcgtgagccccagcactaggtgggaaggctgctgaggtctctcccacccctgaggagccctggtttcagccccctcagtctgatgaattgcttagcctgttgcctttgactaggggcctgggtggcctcattaactctaggggtccctttgggctcttgattctccctgaaggagggatgcatttctctcttgctcttcctgtacccacatttgggggaagctgaggagggaggaacagtcagccacagctctcttccagcactgtcctctccaccccaagctt

SEQ ID NO: 141165 - DNA, 975 bp, Homo sapiens
  Payload ID: 7730
  Gene Symbol: HMGXB3
  Gene Name: HMG box domain containing 3
  ENST ID: ENST00000514469
  CDS Start-End: 1-337
actgaagcagctgggccagcccattcaacagccatctggccctggtgaggtgaagctaccaagtggcccatccaacaggacttctcaggtgaaagttgtggaggtcaagcccgatatgtttcctccatataagtacagctgcactgtcacattggatttgggcctggctacatcaagaggccggggaaagtgcaagaatccctcttgtagctatgtctacaccaacaggcacaaacctcgaatttgtcccagctgtggtgttaaccttgccaaagaccggactgagaaaaccaccaaggctatcgtctctttaatgtggggaacaagctgctggtaagcctggacttgctttttgcaatcagaaatcagatcaagctcggagaggaccccagagtgtccatcaatgttgttctgaagtcggtgcaggagcagacagagaagactctgacctcggaggagctgagccagctgcaggagctgctgtgcaatggctattgggcctttgagtgcctcactgtccgagactacaatgacatgatctgtggcatctgtggtgtggcccccaaagtggaaatggctcagaggagtgaagagaatgtgctagcactgaagagcgtggagttcacctggcctgaattcctgggctctaatgaggtaaatgtggaggacttttgggccacgatggagacagaggtgattgagcaggtggcatttcctgccagcatccctatcaccaaatttgatgcgtctgttattgcccccttcttcccaccactcatgagaggagctgtggtcgtcaacactgagaaagacaaaaacctggatgtgcagccagtacctggcagtggcagtgccttggtgaggctgctccaggagggcacctgcaagcttgatgagattggctcctacagtgaagagaagctgcagcacctgctaaggcagtgtggaatcccctttggggcagaagactccaag

SEQ ID NO: 141166 - DNA, 5567 bp, Homo sapiens
  Payload ID: 7730
  Gene Symbol: HMGXB3
  Gene Name: HMG box domain containing 3
  Uniprot ID: Q12766
  ENST ID: ENST00000613459
  CDS Start-End: 1-4617
atgcagagaacacagccccgcccctgttacctgaacgccccacagcagtgcccgggggctgagcggccggggcgtcccaccgccggcagccacagcttcctcctccgcccgggacctctggccggaagcagtccgttcgccttactagacccgctccaagcctttgagcagttcgtgtgggtccgctcccaagctagggctgggctgttgcgcttgcgccaggggtcgcatgcagtcacgcgctgccgaccgcttccggtgcgccgcgagggccgccgggacgggtctccctggcgatccgtggtgtgccgctactgccggtgcagccgccaaaccggtgcctcggtgacgaccgtgtccctgccgtcttcctcgagctccccggggcttgacccccggggccctcggcaggcatcggtgaggagcctgcggagcgaacctgtgctcctattcttgcccttcaggaccccatatcgcgactccgaggaggggaagcgagaggggctgtcgcgactccgcgccgtgtgtcgccgggcggggccgcggggccggggctccttcagcccccgggatgcgcgcgcgagccctcgcctccacttccttgttgctgctgtcacgactggagccgcctctcgccgacagcggggagcgcgagtgcgccagccatccccctcgtccagccgccgggccaagcgcctccgggaatgtgagcggcgcagcttgcacgctcctccggccatggacgcatcatatgatggtactgaggtaactgtcgtgatggaggaaattgaggaagcctattgttacacctctcctgggccacccaagaagaagaaaaagtataaaatacatggagaaaagacaaagaaacccaggtctgcttaccttctgtactattacgacatctacctgaaagtgcagcaggagctcccccacctccctcagtctgagatcaataagaagattagtgagagttggaggcttctcagcgtggccgagaggagttactacttggagaaagccaaactagagaaggaaggtttggatcctaactctaagctctctgcactgactgctgtggttccggacatcccaggtttccgcaagatcctcccacgctcagattatatcatcatccccaagagcagcctgcaggaggaccggagctgccctcagctagagctatgtgtggctcagaaccagatgtccccgaaaggacctcctcttgtgtccaacactgccccggagacagtgcccagccatgcaggcatggcagagcagtgcctggctgtggaggccctggctgaggaggtgggagcccttacccagtcaggtgctgtacaggagattgccacctcagagatcctcagccaggatgtgctcctagaggacgcttccctagaagtaggggagagccaccaaccttaccagacaagcctggtaattgaagagaccttggtgaatggctcaccagacctccccactggaagcctggctgtgccccacccccaggttggggagagtgtatcagtggtaacagtcatgagggattccagtgagagtagctcctctgcaccagccacacagttcatcatgttgcctctgcctgcctactcggttgtggagaaccccacctccatcaaactgaccactacatatacccgccggggccatgggacatgcaccagcccagggtgctcctttacatatgtcaccaggcacaagccacctaagtgccctacctgtggtaacttcctaggagggaagtggatcccaaaggaaaagccagccaaagtaaaagtggaattggcttctggcgtctcttccaaaggctctgtggtgaaaagaaatcagcaacctgtcaccactgagcaaaattcctctaaggaaaatgcctccaaactgactctggagaattcggaagctgtaagccagctcctgaacgtagctcctcccagagaagtaggtgaggagagtgagtgggaggaagtgatcatctccgatgcccatgttttggttaaggaagctcccgggaattgtggtacagcagtcactaagacgccagtcgtcaaaagtggtgtgcagcctgaggtcactctggggacaactgacaatgacagtcctggagcagacgtaccaacaccatccgaggggacaagtacctccagtccactccctgctcctaaaaaacctacaggagctgacctgcttacccctgggtccagagctccagagcttaaaggcagagcacggggcaagccctcattactggctgcagcaagacccatgagagcaattttgccagccccagttaacgtggggcgaggcagcagcatgggactgcccagggccaggcaggccttttccctgagtgataagactccctctgtgaggacttgtggtctgaagccaagcacactgaagcagctgggccagcccattcaacagccatctggccctggtgaggtgaagctaccaagtggcccatccaacaggacttctcaggtgaaagttgtggaggtcaagcccgatatgtttcctccatataagtacagctgcactgtcacattggatttgggcctggctacatcaagaggccggggaaagtgcaagaatccctcttgtagctatgtctacaccaacaggcacaaacctcgaatttgtcccagctgtggtgttaaccttgccaaagaccggactgagaaaaccaccaaggctatcgaggtgagctcaccactcccagatgtactgaatgccacagagcccctgagcacagcccagagggagatccagcgccagtccacactgcagctgctgcgcaaagtcctgcagattcctgagaatgagtcagagctggctgaggtcttcgccttgattcatgaactcaacagctctcgacttatcttgtccaacgtgagtgaggagacagtcaccatcgagcaaacctcttggtcgaattattatgagtctccgtccacgcagtgccttctctgtagcagcccattattcaaagggggacaaaactccctggctgggccccaggagtgctggctgctgacagccagccgtctgcagacagtgactgcccaggtgaagatgtgtctgaacccccattgtctggccctgcacagcttcatagacatctacacaggtctctttaatgtggggaacaagctgctggtaagcctggacttgctttttgcaatcagaaatcagatcaagctcggagaggaccccagagtgtccatcaatgttgttctgaagtcggtgcaggagcagacagagaagactctgacctcggaggagctgagccagctgcaggagctgctgtgcaatggctattgggcctttgagtgcctcactgtccgagactacaatgacatgatctgtggcatctgtggtgtggcccccaaagtggaaatggctcagaggagtgaagagaatgtgctagcactgaagagcgtggagttcacctggcctgaattcctgggctctaatgaggtaaatgtggaggacttttgggccacgatggagacagaggtgattgagcaggtggcatttcctgccagcatccctatcaccaaatttgatgcgtctgttattgcccccttcttcccaccactcatgagaggagctgtggtcgtcaacactgagaaagacaaaaacctggatgtgcagccagtacctggcagtggcagtgccttggtgaggctgctccaggagggcacctgcaagcttgatgagattggctcctacagtgaagagaagctgcagcacctgctaaggcagtgtggaatcccctttggggcagaagactccaaggaccagctctgcttctccttgttggccctctacgaatctgtacagaatggagctagagctatacggcccccacgtcacttcacaggtggtaaaatctacaaggtgtgcccccatcaggtggtctgcggctccaagtatcttgtgcgaggtgagagtgcccgtgaccatgtggacctgcttgcctcttcccgccactggccgcctgtctatgtggtagatatggccacgtcagtggccctgtgtgctgacctctgctacccagagctgactaaccagatgtgggggaggaaccagggctgtttctctagccccacagagccacctgtgagtgtgtcctgcccagagctcttggaccagcattatactgtggacatgacagaaactgagcactctatccagcacccagtcaccaagactgccacgcggcgcatcgtccatgcaggcctacagcccaatcctggtgaccccagtgctgggcaccactccttggccctgtgccctgaattggcaccttacgcaaccatcctggcctccatcgtggacagcaaaccaaacggtgtccgccagcggcccattgccttcgacaatgccactcactattacctctacaaccgcctcatggacttcctcaccagccgcgaaattgtcaatcgtcagatccatgacattgtacagagctgccagcctggtgaggtggtcattcgtgacaccctctaccgccttggggttgctcagatcaagacagagacagaggaggagggtgaggaagaggaggtggccgcagtggcagaataagccaggctgttgtacagggactacaccatctctcaagccatagtaaggcccttgcctgaggcagagctatccaggggacctgcagaagtggtctcctgtggggagggcctctgactgctgggactgaccaaagagcttccattccctgagcatggtgggacccagggtcctcagttctcaaccctccaggggtcaggagtggtaccaggaaacctcttctggccccgagagagcacttgggggacacggtatgtttaatggaggggaggctgagggaaaggctcgtagctggtgggttccgtggggcctgcggtgtgggtcagggtggaggtcctgggtgggctaaggcgtgagccccagcactaggtgggaaggctgctgaggtctctcccacccctgaggagccctggtttcagccccctcagtctgatgaattgcttagcctgttgcctttgactaggggcctgggtggcctcattaactctaggggtccctttgggctcttgattctccctgaaggagggatgcatttctctcttgctcttcctgtacccacatttgggggaagctgaggagggaggaacagtcagccacagctctcttccagcactgtcctctccaccccaagctttgaggaagagcatccccttcctcctttccctggccactgctgctgcagccaatatcctctctgggcctgggaccctctccacagaggggatgtggtccctggtcatgacataacctagcagcagtaggaaaaactcccttctatgaaggggaagcagactgggccataaggaaacagcaggactggctcaagtgcccaaggtttgtttagggcctgggaattggccatgtgttaatttattgagtggagtaggtggctttttttccctccctcttcccccaacaagaataaagtttattaaattatctggttttggtgt

SEQ ID NO: 141167 - DNA, 4047 bp, Homo sapiens
  Payload ID: 7731
  Gene Symbol: HMGXB4
  Gene Name: HMG box domain containing 4
  Uniprot ID: Q9UGU5
  ENST ID: ENST00000216106
  CDS Start-End: 129-1934
cttctccaagatggcggcgatcggcggcgttgaggcgggatccgggcgagccgagtgaagacctggtcctgtagacgggaaggagcctggacacagtgacacattctcaaaggccctgcaggaccaccatggcttatgatgactccgtgaagaaagaagattgttttgatggtgatcatacctttgaggacataggacttgcagctggccgaagccaacgagagaaaaaacgttcttacaaagattttttaagggaagaggaagaaattgctgctcaggtcaggaattcttccaagaagaagttgaaggatagtgaactttacttcttggggacggacacacacaagaagaagaggaagcactcctctgatgattactactatggagatatttcgtctttggaatcgtcacagaagaaaaagaaaaagtccagcccacagtctactgatacagctatggacctgttgaaagctatcacttccccactggcagcaggctccaagccctccaaaaagactggggagaaatcctctggctcttcaagccattcggagagtaaaaaggagcaccacaggaagaaagtcagtggaagcagtggggaactacccctagaggatggtggctcccacaaatcgaaaaaaatgaaacctctctatgtgaacacagagacactgacccttcgggagcctgatggtttaaaaatgaaacttattctgtcaccaaaggagaagggaagcagctctgttgatgaggagtcttttcaatatccctcccaacaagcgactgtgaaaaaatcctcaaagaaatcagctcgggatgagcagggtgctttactcctaggacatgagttacagagctttctgaaaacagcccggaaaaagcacaagtcatcctcagacgcacattcatctcctggccctgaaggctgtgggtctgacgcctcccagttcgcagagtcccacagtgctaaccttgatctttcagggcttgaacctattctggtagaatcagactcatcctctggtggggaactagaggctggggagttagtgatagatgattcttaccgagaaatcaagaagaaaaagaagtcaaagaagagcaaaaagaagaaagacaaggagaagcataaagagaagcgacactccaagtccaagagaagtttaggactttctgccgtgccagtgggagaggtcacagtgacatctggccctcctcccagcatcccatacgctggagcagcagcacctcccctgccacttcctggcctccacacagatgggcatagtgaaaaaaaaaagaaaaaagaagagaaggacaaagagagagagagaggagaaaagccaaaaaagaagaacatgtcggcctaccaggtgttctgtaaagagtatcgcgtgaccattgtggctgaccatccaggtatagattttggggaacttagtaaaaaactggctgaggtgtggaagcaattaccagaaaaagacaaactgatttggaagcaaaaagctcagtatctgcagcacaaacagaacaaagcagaagccacaactgtgaaaaggaaagcatccagctcagaaggttccatgaaagtcaaagcctcttctgtaggagtactgtcaccccagaagaagtccccacccaccaccatgctgttaccagcctcaccagccaaagcccctgagacagagcccattgatgttgctgctcatcttcagctgttgggagagtccctaagcctcattggacaccgtctgcaggaaactgagggtatggtggctgtgtctggcagtttgtcagtgcttctggattccattatctgtgcccttggccccttggcatgtctcaccacacaactacctgaattgaatggctgtcccaaacaggtcttgtcaaacacattagacaacattgcttacatcatgccgggactgtgacagcaaagaatcctgggacagaaaccttatcctacaccattgctggtttgtgtatatatgactgttgcagattccttcagtggcctctggctgtaggttttaaatttttatatctatacatacatatatacatatatatataatgtacaatatatacatagactgtaactactttgcttttaataattttatgaaatggcaaaggtttagccaagaggaaattttggcatgaatacaggcttgggattcttttttctcctgtggtggataaatctgccttaaaaatcaatgtaacttgggggctgggggcttgttctgggtgccaagcgcatctctttatggacagctaaaatgtgattattttccaagctcagttggacctccagacccatcactgaccatttgccttacctgtcttagtctgaaatgtaataggaaagataacgggaagatgccagttgactgaaaattcaaagcctttcaatttgaagtgacctaggtgggaggtgataaaatttgttccctttatagttatggaagtggcttaggtgaattgagtagagggttcattccaattcctactgtataggtgtctgtgtctcaaaatttattgtaatcattggtaccattggtggcctcaacagaggccaaggagttctgtgagccctggcagcaaaaaacaccttggggggtgaagctgtcaatgccaccagttggacctccatacattctgagctaacccagaatctttagtcggcagaattaagtgctggtgtctttcactggcagcatgaagttagccaccaagtcctcacaagccgtgctgcttagttgctcggtggttatggataaactttgcccagcatgatttttgggttcatcttatcagttcccctggtgggcagatacacagtgttctgcattccacatgtaagtgaattgcaaaaacaaaacaaaactcactctcttgtaggtttatttatgtgtgtgtgaatgtgtattttaattatgtgtatttaactctttaaaatctcttagattttaatttatcctgtaaatttctgtatatataatttaataacagaagcctccaccagcaacagcatgtggaagatacagatttgtcatttctcccttccgccctcccttctttccttccttccttccctgtttccttccctctttccttccttcctcctggtctgttccaaaaactctgaatcatctacattttaaggtattttacctcaaaaatgaatcattgtgttaggattctaattctttataaagaacttcatgggcttcaataatgtctagaaagtaaaataaagaggaatgttaccatccccagctgcccttatttccagagaaccagacgtttgtttcccagttggaaagaagacagttgagcacttcaggatggtttttaaatttggtatgagattctctgccaacaccaagctctgagttaactgtgctttcttctcctggccctgacagagcactacagcatcaaagtaaatctttggggacagtgtagcccatctgcatcctatttaatttcttcccttctccccaccagtgttgtcacagggctatgttgcttaaaggtagtctggctgctgaatccctttctcagctcagagcagttttaagatttaattgggaatacagagaaacaggattgtttgagaaccaaaatcaagaggaacagaaatcttaacttgatttcatgtgttagaacattgtaccatgcctcttctgtatctgtggaagtttcctgtttgacacagggtatctaggaggggcggggaagacatggatagtataggaagacattaatcctagcattgtcatttatatacattaatgaaatcctgatgaggacctgctttttgtttgttttcctttgaaacccagccctattgtatttgtatttaaaatttgtacacatttgtataataatctgtaccttgtggtatttggtactattagaggaaaaactttggattcagaccttcttgcagtttttatatcattgttttattttgttttttaaataaattctagtggtttgatccaaatcccattacagttgtataaagaaataaaa

SEQ ID NO: 141168 - DNA, 4216 bp, Homo sapiens
  Payload ID: 7731
  Gene Symbol: HMGXB4
  Gene Name: HMG box domain containing 4
  ENST ID: ENST00000418170
  CDS Start-End: 140-418
gcttttctctccttctccaagatggcggcgatcggcggcgttgaggcgggatccgggcgagccgagtgaagacctggtcctgtagacgggaaggagcctggacacagtgacacattctcaaaggccctgcaggaccaccatggcttatgatgactccgtgaagaaagaagattgttttgatggtgatcatacctttgaggacataggacttgcagctggccgaagccaacgagagaaaaaacgttcttacaaagattttttaagggaagaggaagaaattgctgctcaggtcaggaattcttccaagaagaagttgaaggatagtgaactttacttcttggggacggacacacacaagaagaagaggaagcactcctctgatgattactactatggaggacagtggttcttgttctgagtgccgataaaccagtgtgaaggaggagagaggtggagggctggtattttggaggattcagcatagaagaacagtctgcatttgtgatacaccagatatttcgtctttggaatcgtcacagaagaaaaagaaaaagtccagcccacagtctactgatacagctatggacctgttgaaagctatcacttccccactggcagcaggctccaagccctccaaaaagactggggagaaatcctctggctcttcaagccattcggagagtaaaaaggagcaccacaggaagaaagtcagtggaagcagtggggaactacccctagaggatggtggctcccacaaatcgaaaaaaatgaaacctctctatgtgaacacagagacactgacccttcgggagcctgatggtttaaaaatgaaacttattctgtcaccaaaggagaagggaagcagctctgttgatgaggagtcttttcaatatccctcccaacaagcgactgtgaaaaaatcctcaaagaaatcagctcgggatgagcagggtgctttactcctaggacatgagttacagagctttctgaaaacagcccggaaaaagcacaagtcatcctcagacgcacattcatctcctggccctgaaggctgtgggtctgacgcctcccagttcgcagagtcccacagtgctaaccttgatctttcagggcttgaacctattctggtagaatcagactcatcctctggtggggaactagaggctggggagttagtgatagatgattcttaccgagaaatcaagaagaaaaagaagtcaaagaagagcaaaaagaagaaagacaaggagaagcataaagagaagcgacactccaagtccaagagaagtttaggactttctgccgtgccagtgggagaggtcacagtgacatctggccctcctcccagcatcccatacgctggagcagcagcacctcccctgccacttcctggcctccacacagatgggcatagtgaaaaaaaaaagaaaaaagaagagaaggacaaagagagagagagaggagaaaagccaaaaaagaagaacatgtcggcctaccaggtgttctgtaaagagtatcgcgtgaccattgtggctgaccatccaggtatagattttggggaacttagtaaaaaactggctgaggtgtggaagcaattaccagaaaaagacaaactgatttggaagcaaaaagctcagtatctgcagcacaaacagaacaaagcagaagccacaactgtgaaaaggaaagcatccagctcagaaggttccatgaaagtcaaagcctcttctgtaggagtactgtcaccccagaagaagtccccacccaccaccatgctgttaccagcctcaccagccaaagcccctgagacagagcccattgatgttgctgctcatcttcagctgttgggagagtccctaagcctcattggacaccgtctgcaggaaactgagggtatggtggctgtgtctggcagtttgtcagtgcttctggattccattatctgtgcccttggccccttggcatgtctcaccacacaactacctgaattgaatggctgtcccaaacaggtcttgtcaaacacattagacaacattgcttacatcatgccgggactgtgacagcaaagaatcctgggacagaaaccttatcctacaccattgctggtttgtgtatatatgactgttgcagattccttcagtggcctctggctgtaggttttaaatttttatatctatacatacatatatacatatatatataatgtacaatatatacatagactgtaactactttgcttttaataattttatgaaatggcaaaggtttagccaagaggaaattttggcatgaatacaggcttgggattcttttttctcctgtggtggataaatctgccttaaaaatcaatgtaacttgggggctgggggcttgttctgggtgccaagcgcatctctttatggacagctaaaatgtgattattttccaagctcagttggacctccagacccatcactgaccatttgccttacctgtcttagtctgaaatgtaataggaaagataacgggaagatgccagttgactgaaaattcaaagcctttcaatttgaagtgacctaggtgggaggtgataaaatttgttccctttatagttatggaagtggcttaggtgaattgagtagagggttcattccaattcctactgtataggtgtctgtgtctcaaaatttattgtaatcattggtaccattggtggcctcaacagaggccaaggagttctgtgagccctggcagcaaaaaacaccttggggggtgaagctgtcaatgccaccagttggacctccatacattctgagctaacccagaatctttagtcggcagaattaagtgctggtgtctttcactggcagcatgaagttagccaccaagtcctcacaagccgtgctgcttagttgctcggtggttatggataaactttgcccagcatgatttttgggttcatcttatcagttcccctggtgggcagatacacagtgttctgcattccacatgtaagtgaattgcaaaaacaaaacaaaactcactctcttgtaggtttatttatgtgtgtgtgaatgtgtattttaattatgtgtatttaactctttaaaatctcttagattttaatttatcctgtaaatttctgtatatataatttaataacagaagcctccaccagcaacagcatgtggaagatacagatttgtcatttctcccttccgccctcccttctttccttccttccttccctgtttccttccctctttccttccttcctcctggtctgttccaaaaactctgaatcatctacattttaaggtattttacctcaaaaatgaatcattgtgttaggattctaattctttataaagaacttcatgggcttcaataatgtctagaaagtaaaataaagaggaatgttaccatccccagctgcccttatttccagagaaccagacgtttgtttcccagttggaaagaagacagttgagcacttcaggatggtttttaaatttggtatgagattctctgccaacaccaagctctgagttaactgtgctttcttctcctggccctgacagagcactacagcatcaaagtaaatctttggggacagtgtagcccatctgcatcctatttaatttcttcccttctccccaccagtgttgtcacagggctatgttgcttaaaggtagtctggctgctgaatccctttctcagctcagagcagttttaagatttaattgggaatacagagaaacaggattgtttgagaaccaaaatcaagaggaacagaaatcttaacttgatttcatgtgttagaacattgtaccatgcctcttctgtatctgtggaagtttcctgtttgacacagggtatctaggaggggcggggaagacatggatagtataggaagacattaatcctagcattgtcatttatatacattaatgaaatcctgatgaggacctgctttttgtttgttttcctttgaaacccagccctattgtatttgtatttaaaatttgtacacatttgtataataatctgtaccttgtggtatttggtactattagaggaaaaactttggattcagaccttcttgcagtttttatatcattgttttattttgttttttaaataaattctagtggtttgatccaaatcccattacagttgtataaagaaataaaattttgtacttatattattaaaaatcacatttttaatatttgta

SEQ ID NO: 141169 - DNA, 1257 bp, Homo sapiens
  Payload ID: 7731
  Gene Symbol: HMGXB4
  Gene Name: HMG box domain containing 4
  ENST ID: ENST00000420166
  CDS Start-End: 403-1257
gctctgggctcgactgaggctccctggccgctcgcgcttttctctccttctccaagatggcggcgatcggcggcgttgaggcgggatccgggcgagccgagtgaagattgttttgatggtgatcatacctttgaggacataggacttgcagctggccgaagccaacgagagaaaaaacgttcttacaaagattttttaagggaagaggaagaaattgctgctcaggtcaggaattcttccaagaagaagttgaaggatagtgaactttacttcttggggacggacacacacaagaagaagaggaagcactcctctgatgattactactatggagatatttcgtctttggaatcgtcacagaagaaaaagaaaaagtccagcccacagtctactgatacagctatggacctgttgaaagctatcacttccccactggcagcaggctccaagccctccaaaaagactggggagaaatcctctggctcttcaagccattcggagagtaaaaaggagcaccacaggaagaaagtcagtggaagcagtggggaactacccctagaggatggtggctcccacaaatcgaaaaaaatgaaacctctctatgtgaacacagagacactgacccttcgggagcctgatggtttaaaaatgaaacttattctgtcaccaaaggagaagggaagcagctctgttgatgaggagtcttttcaatatccctcccaacaagcgactgtgaaaaaatcctcaaagaaatcagctcgggatgagcagggtgctttactcctaggacatgagttacagagctttctgaaaacagcccggaaaaagcacaagtcatcctcagacgcacattcatctcctggccctgaaggctgtgggtctgacgcctcccagttcgcagagtcccacagtgctaaccttgatctttcagggcttgaacctattctggtagaatcagactcatcctctggtggggaactagaggctggggagttagtgatagatgattcttaccgagaaatcaagaagaaaaagaagtcaaagaagagcaaaaagaagaaagacaaggagaagcataaagagaagcgacactccaagtccaagagaagtttaggactttctgccgtgccagtgggagaggtcacagtgacatctggccctcctcccagcatcccatacgctggagcagcagcacctcccctgccacttcctggcctccacacagatgggcatagtgaaaaaaaaaagaaaaaagaa

SEQ ID NO: 141170 - DNA, 1325 bp, Homo sapiens
  Payload ID: 7731
  Gene Symbol: HMGXB4
  Gene Name: HMG box domain containing 4
  ENST ID: ENST00000455359
  CDS Start-End: 474-1325
tccttctccaagatggcggcgatcggcggcgttgaggcgggatccgggcgagccgagtgaagattgttttgatggtgatcatacctttgaggacataggacttgcagctggccgaagccaacgagagaaaaaacgttcttacaaagattttttaagggaagaggaagaaattgctgctcaggtcaggaattcttccaagaagaagttgaaggatagtgaactttacttcttggggacggacacacacaagaagaagaggaagcactcctctgatgattactactatggaggacagtggttcttgttctgagtgccgataaaccagtgtgaaggaggagagaggtggagggctggtattttggaggattcagcatagaagaacagtctgcatttgtgatacaccagatatttcgtctttggaatcgtcacagaagaaaaagaaaaagtccagcccacagtctactgatacagctatggacctgttgaaagctatcacttccccactggcagcaggctccaagccctccaaaaagactggggagaaatcctctggctcttcaagccattcggagagtaaaaaggagcaccacaggaagaaagtcagtggaagcagtggggaactacccctagaggatggtggctcccacaaatcgaaaaaaatgaaacctctctatgtgaacacagagacactgacccttcgggagcctgatggtttaaaaatgaaacttattctgtcaccaaaggagaagggaagcagctctgttgatgaggagtcttttcaatatccctcccaacaagcgactgtgaaaaaatcctcaaagaaatcagctcgggatgagcagggtgctttactcctaggacatgagttacagagctttctgaaaacagcccggaaaaagcacaagtcatcctcagacgcacattcatctcctggccctgaaggctgtgggtctgacgcctcccagttcgcagagtcccacagtgctaaccttgatctttcagggcttgaacctattctggtagaatcagactcatcctctggtggggaactagaggctggggagttagtgatagatgattcttaccgagaaatcaagaagaaaaagaagtcaaagaagagcaaaaagaagaaagacaaggagaagcataaagagaagcgacactccaagtccaagagaagtttaggactttctgccgtgccagtgggagaggtcacagtgacatctggccctcctcccagcatcccatacgctggagcagcagcacctcccctgccacttcctggcctccacacagatgggcatagtgaaaaaaaaaagaaaaaa

SEQ ID NO: 141171 - DNA, 2829 bp, Homo sapiens
  Payload ID: 7732
  Gene Symbol: HBP1
  Gene Name: HMG-box transcription factor 1
  Uniprot ID: O60381
  ENST ID: ENST00000222574
  CDS Start-End: 187-1731
ggcgacgggtttggtaagtaggaaagtttcggttgaggagtaagagctgccgcgggagcagtaacccgcgcgggggaggccgacgtcggtcggagagggggtacgagagctgctggtggtgttgtcgtggccggagcggcccgcgcctgggctgccggcacttcgcggcagtcagagcaccataacatggtgtgggaagtgaagacaaatcagatgcctaatgcagtacagaaactcctgttggtgatggacaagagagcctcaggaatgaatgactcattggagttgctgcagtgtaatgagaatttgccatcttcacctggatataactcctgtgatgaacacatggagcttgatgaccttcctgaacttcaggcagttcaaagtgatcctacccaatctggcatgtaccagctgagttcagatgtttcacatcaagaatacccaagatcatcttggaaccaaaatacctcagacataccagaaactacttaccgtgaaaatgaggtggactggctaacagaattggcaaatatcgcgaccagtccacaaagtccactgatgcagtgctcattttacaatagatcatctcctgtacacatcatagccactagcaaaagtttacattcctatgcacgccctccaccagtgtcctcttcttcgaagagtgaaccagccttccctcatcaccattggaaggaggaaacaccagtaagacacgaaagggcaaatagtgagtcagaatctggcattttctgcatgtcctccctgtcagatgatgatgatttgggatggtgcaattcctggccttcaactgtctggcactgttttttgaaaggcacacgactgtgctttcataagggaagcaataaggaatggcaagatgttgaagattttgctagagctgaaggctgtgataatgaggaagatcttcaaatgggcattcacaagggctatggttctgatggtctaaagttgttatcacatgaagaaagtgtatcatttggcgagtctgtactgaagttgacttttgatcctggtacagtagaagatggtttacttaccgtagagtgtaagctggaccaccctttctatgttaaaaataaaggttggtcatcattttatccaagcttgactgtggtacagcatggcattccatgttgtgaagttcatattggcgatgtatgtctacctcctggacaccccgatgccattaattttgatgattcaggtgtttttgatacatttaaaagctatgacttcacacctatggattcttctgcagtttatgtgttaagtagtatggctcgccagcgtcgtgcatctttgtcttgtggaggacctggtggtcaagactttgcaagatctggattcagtaaaaactgtggctcacctggatcatcacagctctcttccaattctttgtatgctaaagctgtcaaaaaccacagctcagggactgtgagtgccacttctcctaataagtgcaaaagaccaatgaatgccttcatgctttttgccaaaaaatacagagttgaatatactcagatgtatccagggaaagataacagagccataagtgtgatccttggtgacaggtggaagaaaatgaagaatgaagagagaagaatgtacacattagaagcaaaggctttggctgaagaacagaaacgtttaaatcctgactgttggaagaggaaaagaaccaattcaggctcacaacaacattaaaccaggatgcttatgttcttaagtctatatttgcatatacattgactcttgatggaaagacttaagaagatcaaggtctcaccatttgtcctcaattcgtgtgaccataagatactgatagcattgagtcttgaaatgatttaataatatgagtgaggatttgctttctccattagagcattaagctaaaactatcaacattttaaaccaaattgccttatttttcttccaaacttcatatatgtctatcaggtaataataggcttgaaaattgatatcctgtggtgctaaagtacagtagaaagagaggagaagtgtatacatgttttattttaaattgtacgaaaggggaatttaaaaaatatgtaactgctgtttatacattggctccttactgcttattaatctgtattgtacacatgatgaaatgaagcagaagctgggagtcggcctttcctctagtaaccaccacatggctcagcatctgtgccaaacataggcgctcctagtctggtcagtgccaagaggctaccagaacatggggcaggtggctggtgttggtgtcccagcctaagagccacctgctgcagttaccatggcatgctgagttgatgcaccaggtggcagcagccatccgttattatttccaatggagacctagcccaggccaaggtaaagttagttaatagcattgggatatagtcactgtaatggtgctattaacaaacagtcaacaccattgtattttttaacttcgtgttctgtatctcctcagccatgtatcttaaatatattttgtcatcataatctttatggtgggggcagactttgcacttactgcagtgcaacacttgcactttaattttcctccaactgtctaaaattagagcaaatacattggcaatacagctgcttttgctctgagctacaatcatggcttttcatgttacttaccaagtggtgtttctggttaggaatcacagctgtaaaattgatttcagttcatcacacttcttcatgatgttgcccctaaattttgcacactatattcttgtatattatttcaaataaatggaaaaaaaagttgcttatctctga

SEQ ID NO: 141172 - DNA, 702 bp, Homo sapiens
  Payload ID: 7732
  Gene Symbol: HBP1
  Gene Name: HMG-box transcription factor 1
  ENST ID: ENST00000497535
  CDS Start-End: 378-702
ggggaaaaacaagcccggagtccgggctgcggtcacatgatggggggaagggaggggaacgcgatgaatggcgaaagagggtgggggatggacttggcgtgaaccgggaggcaccgctctgtgtgacccaaagaggaggcttggcaggcgattccagtctccgcctttcaacctatgctgccaccgcaggccgattgaaacaaaacaaaacaaaccaggcgaagtggacagccaggtttttgtagctttaaatgctgcgtgctgtctagggtgtttcactctccgctgtgcactctacactcgagttcattcttagggagttttcagctacagtcgtttttagaaggagcactgacagcgagtcagagcaccataacatggtgtgggaagtgaagacaaatcagatgcctaatgcagtacagaaactcctgttggtgatggacaagagagcctcaggaatgaatgactcattggagttgctgcagtgtaatgagaatttgccatcttcacctggatataactcctgtgatgaacacatggagcttgatgaccttcctgaacttcaggcagttcaaagtgatcctacccaatctggcatgtaccagctgagttcagatgtttcacatcaagaatacccaagatcatcttggaaccaaaatacctcagacataccagaaactacttaccgtgaaaatgaggtgg

SEQ ID NO: 141173 - DNA, 601 bp, Homo sapiens
  Payload ID: 7732
  Gene Symbol: HBP1
  Gene Name: HMG-box transcription factor 1
  ENST ID: ENST00000479011
  CDS Start-End: 269-601
gctcggcgtggtggcatgtgcctgtaatcccccctacttaggtggctgaggcgggagaatcgcttgaacccaggaggtggagtttgcagtgagccgagatcacgccactgcactgcagtctgggtgacagagtgtgactatgtctcaaaaaaaaaacaaaacaacattgtcatgtctctgatttattttaggtttgtgtactgcccaaattgcatggcttgacatcatttcttaatgtcgtttttattttaagtcagagcaccataacatggtgtgggaagtgaagacaaatcagatgcctaatgcagtacagaaactcctgttggtgatggacaagagagcctcaggaatgaatgactcattggagttgctgcagtgtaatgagaatttgccatcttcacctggatataactcctgtgatgaacacatggagcttgatgaccttcctgaacttcaggcagttcaaagtgatcctacccaatctggcatgtaccagctgagttcagatgtttcacatcaagaatacccaagatcatcttggaaccaaaatacctcagacataccagaaactacttaccgtgaaaatgaggtggactggcta

SEQ ID NO: 141174 - DNA, 2332 bp, Homo sapiens
  Payload ID: 7732
  Gene Symbol: HBP1
  Gene Name: HMG-box transcription factor 1
  ENST ID: ENST00000498408
  CDS Start-End: 1-1365
cagatgcctaatgcagtacagaaactcctgttggtgatggacaagagagcctcaggaatgaatgactcattggagttgctgcagtgtaatgagaatttgccatcttcacctggatataactcctgtgatgaacacatggagcttgatgaccttcctgaacttcaggcagttcaaagtgatcctacccaatctggcatgtaccagctgagttcagatgtttcacatcaagaatacccaagatcatcttggaaccaaaatacctcagacataccagaaactacttaccgtgaaaatgaggtggactggctaacagaattggcaaatatcgcgaccagtccacaaagtccactgatgcagtgctcattttacaatagatcatctcctgtacacatcatagccactagcaaaagtttacattcctatgcacgccctccaccagtgtcctcttcttcgaagagtgaaccagccttccctcatcaccattggaaggaggaaacaccagtaagacacgaaagggcaaatagtgagtcagaatctggcattttctgcatgtcctccctgtcagatgatgatgatttgggatggtgcaattcctggccttcaactgtctggcactgttttttgaaaggcacacgactgtgctttcataagggaagcaataaggaatggcaagatgttgaagattttgctagagctgaaggctgtgataatgaggaagatcttcaaatgggcattcacaagggctatggttctgatggtctaaagttgttatcacatgaagaaagtgtatcatttggcgagtctgtactgaagttgacttttgatcctggtacagtagaagatggtttacttaccgtagagtgtaagctggaccaccctttctatgttaaaaataaaggttggtcatcattttatccaagcttgactgtggtacagcatggcattccatgttgtgaagttcatattggcgatgtatgtctacctcctggacaccccgatgccattaattttgatgattcaggtgtttttgatacatttaaaagctatgacttcacacctatggattcttctgcagtttatgtgttaagtagtatggctcgccagcgtcgtgcatctttgtcttgtggaggacctggtggtcaagactttgcaagatctggattcagtaaaaactgtggctcacctggatcatcacagctctcttccaattctttgtatgctaaagctgtcaaaaaccacagctcagggactgtgagtgccacttctcctaataagtgcaaaagaccaatgaatgccttcatgctttttgccaaaaaatacagagttgaatatactcagatgtatccagggaaagataacaggtaaaaatagtgataattctgattacaataaatgagtaacacttcaatacggttcatggtaactggaatagttaagtaaacttattctttaatagcttttattcaactcttaggttgacttttttgtttgtttttgagacggagtctcgctgtgtcacccaagctggagtccagtggtacgatctcagctcactgcaacctccgccttccaggttcaagtgattatcctgcctcagcctctcaagtagctgagactacaggcgcccaccaccatacctggctaattttttgtatttttagtagagacagggtttcaccatgttggccaggctgatctcgaactcctgacctcgtgatccacccaccttggcctcctaaagtgccgtgattacaggcgtgagccactgtgcccggccaggttgactttaaagtaaaaagtttaagtggaatttttagggttatatgtaattattttataatacatagacaattaggttatctaccttagtagtaaggatctaccttttattatttgtgccatagcccaggctgcagtacagcggcgcaactcactgtagcctgtatctcccaggctcaatcctcccacctcagcttcctgaatggctgggattacaggcacatgccaccacacccagttaatttttgtattttttgtagagatagggttgtgccatgttgcccaggctggtctcaaactcctgggttcaagccatctgcctgcctcccaaagtgcaagatctaccttttaaaatcatgttatttatctgttggaggacacggttctaacaattaacagttctatctttatggaacagcttttcacctgagtcaactatggattgtacggggaactggcaatttgtagcaagctgccagagttgtcaaaacggtgaacttaagagctgtcctcagtagaagctggaaataaaaatcaactcaagtccttccta

SEQ ID NO: 141175 - DNA, 563 bp, Homo sapiens
  Payload ID: 7732
  Gene Symbol: HBP1
  Gene Name: HMG-box transcription factor 1
  ENST ID: ENST00000478930
  CDS Start-End: 352-563
gacgaagcttgaaagacttggtaatggcgacgggtttggagttttgggatggtggttgataactaagacaaagtgctgaagaaatgatagaagttgcaaagagacgttagtgtactatacttggtgaatgttggaaactgcaggacctgctgtagggaagaaaaaagttctagctggaaagaatgaggaaaccaaagagctctgcagagggagggggaagacaagacagactgcagctgtgcttctgtggaccccaagaacagcactgttcatacacagaggatagctctgaagagagatacctgtgtagtgcagcttctaaatttcataataaagtcagagcaccataacatggtgtgggaagtgaagacaaatcagatgcctaatgcagtacagaaactcctgttggtgatggacaagagagcctcaggaatgaatgactcattggagttgctgcagtgtaatgagaatttgccatcttcacctggatataactcctgtgatgaacacatggagcttgatgaccttcctgaacttcaggcagttcaaagtgatcctaccca

SEQ ID NO: 141176 - DNA, 2420 bp, Homo sapiens
  Payload ID: 7732
  Gene Symbol: HBP1
  Gene Name: HMG-box transcription factor 1
  Uniprot ID: O60381
  ENST ID: ENST00000485846
  CDS Start-End: 672-2216
aaaaacaagcccggagtccgggctgcggtcacatgatggggggaagggaggggaacgcgatgaatggcgaaagagggtgggggatggacttggcgtgaaccgggaggcaccgctctgtgtgacccaaagaggaggcttggcaggcgattccagtctccgcctttcaacctatgctgccaccgcaggccgattgaaacaaaacaaaacaaaccaggcgaagtggacagccaggtttttgtagctttaaatgctgcgtgctgtctagggtgtttcactctccgctgtgcactctacactcgagttcattcttagggagttttcagctacagtcgtttttagaaggagcactgacagcgaggagttttgggatggtggttgataactaagacaaagtgctgaagaaatgatagaagttgcaaagagacgttagtgtactatacttggtgaatgttggaaactgcaggacctgctgtagggaagaaaaaagttctagctggaaagaatgaggaaaccaaagagctctgcagagggagggggaagacaagacagactgcagctgtgcttctgtggaccccaagaacagcactgttcatacacagaggatagctctgaagagagatacctgtgtagtgcagcttctaaatttcataataaagtcagagcaccataacatggtgtgggaagtgaagacaaatcagatgcctaatgcagtacagaaactcctgttggtgatggacaagagagcctcaggaatgaatgactcattggagttgctgcagtgtaatgagaatttgccatcttcacctggatataactcctgtgatgaacacatggagcttgatgaccttcctgaacttcaggcagttcaaagtgatcctacccaatctggcatgtaccagctgagttcagatgtttcacatcaagaatacccaagatcatcttggaaccaaaatacctcagacataccagaaactacttaccgtgaaaatgaggtggactggctaacagaattggcaaatatcgcgaccagtccacaaagtccactgatgcagtgctcattttacaatagatcatctcctgtacacatcatagccactagcaaaagtttacattcctatgcacgccctccaccagtgtcctcttcttcgaagagtgaaccagccttccctcatcaccattggaaggaggaaacaccagtaagacacgaaagggcaaatagtgagtcagaatctggcattttctgcatgtcctccctgtcagatgatgatgatttgggatggtgcaattcctggccttcaactgtctggcactgttttttgaaaggcacacgactgtgctttcataagggaagcaataaggaatggcaagatgttgaagattttgctagagctgaaggctgtgataatgaggaagatcttcaaatgggcattcacaagggctatggttctgatggtctaaagttgttatcacatgaagaaagtgtatcatttggcgagtctgtactgaagttgacttttgatcctggtacagtagaagatggtttacttaccgtagagtgtaagctggaccaccctttctatgttaaaaataaaggttggtcatcattttatccaagcttgactgtggtacagcatggcattccatgttgtgaagttcatattggcgatgtatgtctacctcctggacaccccgatgccattaattttgatgattcaggtgtttttgatacatttaaaagctatgacttcacacctatggattcttctgcagtttatgtgttaagtagtatggctcgccagcgtcgtgcatctttgtcttgtggaggacctggtggtcaagactttgcaagatctggattcagtaaaaactgtggctcacctggatcatcacagctctcttccaattctttgtatgctaaagctgtcaaaaaccacagctcagggactgtgagtgccacttctcctaataagtgcaaaagaccaatgaatgccttcatgctttttgccaaaaaatacagagttgaatatactcagatgtatccagggaaagataacagagccataagtgtgatccttggtgacaggtggaagaaaatgaagaatgaagagagaagaatgtacacattagaagcaaaggctttggctgaagaacagaaacgtttaaatcctgactgttggaagaggaaaagaaccaattcaggctcacaacaacattaaaccaggatgcttatgttcttaagtctatatttgcatatacattgactcttgatggaaagacttaagaagatcaaggtctcaccatttgtcctcaattcgtgtgaccataagatactgatagcattgagtcttgaaatgatttaataatatgagtgaggatttgctttctccattagagcattaagctaaaactatcaacatttt

SEQ ID NO: 141177 - DNA, 433 bp, Homo sapiens
  Payload ID: 7732
  Gene Symbol: HBP1
  Gene Name: HMG-box transcription factor 1
  ENST ID: ENST00000463790
  CDS Start-End: 1-258
tcacagctctcttccaattctttgtatgctaaagctgtcaaaaaccacagctcagggactgtgagtgccacttctcctaataagtgcaaaagaccaatgaatgccttcatgctttttgccaaaaaatacagagttgaatatactcagatgtatccagggaaagataacagacggagtctcgctgtgtcacccaagctggagtccagtggtacgatctcagctcactgcaacctccgccttccaggttcaaagccataagtgtgatccttggtgacaggtggaagaaaatgaagaatgaagagagaagaatgtacacattagaagcaaaggctttggctgaagaacagaaacgtttaaatcctgactgttggaagaggaaaagaaccaattcaggctcacaacaacattaaaccaggatgcttatgttcttaag

SEQ ID NO: 141178 - DNA, 478 bp, Homo sapiens
  Payload ID: 7732
  Gene Symbol: HBP1
  Gene Name: HMG-box transcription factor 1
  ENST ID: ENST00000464009
  CDS Start-End: 106-478
gaaagacttggtaatggcgacgggtttggtttgtgtactgcccaaattgcatggcttgacatcatttcttaatgtcgtttttattttaagtcagagcaccataacatggtgtgggaagtgaagacaaatcagatgcctaatgcagtacagaaactcctgttggtgatggacaagagagcctcaggaatgaatgactcattggagttgctgcagtgtaatgagaatttgccatcttcacctggatataactcctgtgatgaacacatggagcttgatgaccttcctgaacttcaggcagttcaaagtgatcctacccaatctggcatgtaccagctgagttcagatgtttcacatcaagaatacccaagatcatcttggaaccaaaatacctcagacataccagaaactacttaccgtgaaaatgaggtggactggctaacagaattggcaaatatcgcgaccagtccacaaagtccac

SEQ ID NO: 141179 - DNA, 573 bp, Homo sapiens
  Payload ID: 7732
  Gene Symbol: HBP1
  Gene Name: HMG-box transcription factor 1
  ENST ID: ENST00000468401
  CDS Start-End: 489-573
agttcgaatgaatgggctcccaggcgcctgcgcgctggggctgagccgaggggaaaaacaagcccggagtccgggctgcggtcacatgatggggggaagggaggggaacgcgatgaatggcgaaagagggtgggggatggacttggcgtgaaccgggaggcaccgctctgtgtgacccaaagaggaggcttggcaggcgattccagtctccgcctttcaacctatgctgccaccgcaggccgattgaaacaaaacaaaacaaaccaggcgaagtggacagccaggtttttgtagctttaaatgctgcgtgctgtctagggtgtttcactctccgctgtgcactctacactcgagttcattcttagggagttttcagctacagtcgtttttagaaggagcactgacagcgaggtttgtgtactgcccaaattgcatggcttgacatcatttcttaatgtcgtttttattttaagtcagagcaccataacatggtgtgggaagtgaagacaaatcagatgcctaatgcagtacagaaactcctgttggtgatggacaagagagcctcaggaatga

SEQ ID NO: 141180 - DNA, 2704 bp, Homo sapiens
  Payload ID: 7732
  Gene Symbol: HBP1
  Gene Name: HMG-box transcription factor 1
  Uniprot ID: O60381
  ENST ID: ENST00000468410
  CDS Start-End: 83-1627
aacccccagggggttgaggggagggggaagacgaagcttgaaagacttggtaatggcgacgggtttgtcagagcaccataacatggtgtgggaagtgaagacaaatcagatgcctaatgcagtacagaaactcctgttggtgatggacaagagagcctcaggaatgaatgactcattggagttgctgcagtgtaatgagaatttgccatcttcacctggatataactcctgtgatgaacacatggagcttgatgaccttcctgaacttcaggcagttcaaagtgatcctacccaatctggcatgtaccagctgagttcagatgtttcacatcaagaatacccaagatcatcttggaaccaaaatacctcagacataccagaaactacttaccgtgaaaatgaggtggactggctaacagaattggcaaatatcgcgaccagtccacaaagtccactgatgcagtgctcattttacaatagatcatctcctgtacacatcatagccactagcaaaagtttacattcctatgcacgccctccaccagtgtcctcttcttcgaagagtgaaccagccttccctcatcaccattggaaggaggaaacaccagtaagacacgaaagggcaaatagtgagtcagaatctggcattttctgcatgtcctccctgtcagatgatgatgatttgggatggtgcaattcctggccttcaactgtctggcactgttttttgaaaggcacacgactgtgctttcataagggaagcaataaggaatggcaagatgttgaagattttgctagagctgaaggctgtgataatgaggaagatcttcaaatgggcattcacaagggctatggttctgatggtctaaagttgttatcacatgaagaaagtgtatcatttggcgagtctgtactgaagttgacttttgatcctggtacagtagaagatggtttacttaccgtagagtgtaagctggaccaccctttctatgttaaaaataaaggttggtcatcattttatccaagcttgactgtggtacagcatggcattccatgttgtgaagttcatattggcgatgtatgtctacctcctggacaccccgatgccattaattttgatgattcaggtgtttttgatacatttaaaagctatgacttcacacctatggattcttctgcagtttatgtgttaagtagtatggctcgccagcgtcgtgcatctttgtcttgtggaggacctggtggtcaagactttgcaagatctggattcagtaaaaactgtggctcacctggatcatcacagctctcttccaattctttgtatgctaaagctgtcaaaaaccacagctcagggactgtgagtgccacttctcctaataagtgcaaaagaccaatgaatgccttcatgctttttgccaaaaaatacagagttgaatatactcagatgtatccagggaaagataacagagccataagtgtgatccttggtgacaggtggaagaaaatgaagaatgaagagagaagaatgtacacattagaagcaaaggctttggctgaagaacagaaacgtttaaatcctgactgttggaagaggaaaagaaccaattcaggctcacaacaacattaaaccaggatgcttatgttcttaagtctatatttgcatatacattgactcttgatggaaagacttaagaagatcaaggtctcaccatttgtcctcaattcgtgtgaccataagatactgatagcattgagtcttgaaatgatttaataatatgagtgaggatttgctttctccattagagcattaagctaaaactatcaacattttaaaccaaattgccttatttttcttccaaacttcatatatgtctatcaggtaataataggcttgaaaattgatatcctgtggtgctaaagtacagtagaaagagaggagaagtgtatacatgttttattttaaattgtacgaaaggggaatttaaaaaatatgtaactgctgtttatacattggctccttactgcttattaatctgtattgtacacatgatgaaatgaagcagaagctgggagtcggcctttcctctagtaaccaccacatggctcagcatctgtgccaaacataggcgctcctagtctggtcagtgccaagaggctaccagaacatggggcaggtggctggtgttggtgtcccagcctaagagccacctgctgcagttaccatggcatgctgagttgatgcaccaggtggcagcagccatccgttattatttccaatggagacctagcccaggccaaggtaaagttagttaatagcattgggatatagtcactgtaatggtgctattaacaaacagtcaacaccattgtattttttaacttcgtgttctgtatctcctcagccatgtatcttaaatatattttgtcatcataatctttatggtgggggcagactttgcacttactgcagtgcaacacttgcactttaattttcctccaactgtctaaaattagagcaaatacattggcaatacagctgcttttgctctgagctacaatcatggcttttcatgttacttaccaagtggtgtttctggttaggaatcacagctgtaaaattgatttcagttcatcacacttcttcatgatgttgcccctaaattttgcacactatattcttgtatattatttcaaataaatggaa

SEQ ID NO: 141181 - DNA, 476 bp, Homo sapiens
  Payload ID: 7732
  Gene Symbol: HBP1
  Gene Name: HMG-box transcription factor 1
  ENST ID: ENST00000607681
  CDS Start-End: 1-464
ctatggattcttctgcagtttatgtgttaagtagtatggctcgccagcgtcgtgcatctttgtcttgtggaggacctggtggtcaagactttgcaagatctggattcagtaaaaactgtggctcacctggatcatcacagctctcttccaattctttgtatgctaaagctgtcaaaaaccacagctcagggactgtgagtgccacttctcctaataagtgcaaaagaccaatgaatgccttcatgctttttgccaaaaaatacagagttgaatatactcagatgtatccagggaaagataacagagccataagtgtgatccttggtgacaggtggaagaaaatgaagaatgaagagagaagaatgtacacattagaagcaaaggctttggctgaagaacagaaacgtttaaatcctgactgttggaagaggaaaagaaccaattcagtatgtttcaataaatagtgtttaaaatta

SEQ ID NO: 141182 - DNA, 2452 bp, Homo sapiens
  Payload ID: 7733
  Gene Symbol:
  Gene Name: HMP19 protein [Source:EntrezGene
  Acc:51617]
  Uniprot ID: Q9Y328
  ENST ID: ENST00000303177
  CDS Start-End: 263-778
acagatggtgtgggagcgcgttccccggtaggagggggcgcgagcgagcaagcaggcaggcagctgccaggagctcttccctgctcgctcacgcctgctctcagaagctccgatccagacacacgcgaggcgctgtcctttcagcaccacaagctcgggctgaggagggaggactcctggccgtcctcctcctcttcaaattggcttgaatctgctctgaccccccacgagtgcagcacagtctgggaagaaaggcgtaaggatggtgaagctgaacagtaaccccagcgagaagggaaccaagccgccttcagttgaggatggcttccagaccgtccctctcatcactcccttggaggttaatcacttacagctgcctgctccagaaaaggtgattgtgaagacaagaacggaatatcagccggaacagaagaacaaagggaagttccgggtgccgaaaatcgctgaatttacggtcaccatccttgtcagcctggccctagctttccttgcgtgcatcgtgttcctggtggtttacaaagccttcacctatgatcacagctgcccagagggattcgtctataagcacaaacgctgtatcccagcctccctggatgcttactactcctcccaggaccccaattccagaagccgcttctacacagtcatcagccactacagcgtggccaagcagagcactgcccgggccatcgggccgtggctgtcagcagccgctgtcatccatgagcccaagccgcccaagacccagggccactagaggcctgccccagccagaatggggggcggggtggagaggaggacccccattggctaagccaagctccagttacaagacaacactgtactcctgggatatgggggcgggggcggggcagggcagggtggggggaagaacgcaccaaaaacgtggtgtgtgctggagttgtctgaaccgatatttctttttgttccttggtattgttgattcgtcgccgagtcaggctcatgtacaaaggcatgtttcgtgttgattgttcccatgtaagatatttttaaagccactgcttattctttgttaggaaaatgtaacagcagaaaaggaaagaaacaaagaacatgaacaaaaagcattaaactggctccatcagaagacgttgaagggcagtgaagagcacagactctgtgggcttcttagataagaaaacgtagcttcagtgggggctccagggttgcagagtatgagtgacacagaccgggactattccattagcctgtggtctgcagggtaggcccgcaggaaatgaggaatggccgagctggagagaagagctgattttggcattactaagcccagaacgcacataacccatagtgaaatgtgctggcctctggtgcattttgcaagatgagcacaaactttctgggcctccatcctaggacctgggcagacccacatggcctgggctctgaatgcccaccctgcgacggtgggttctgcatcagcaaacgctgaggagtgggcagattttctttgtcttttgcttgcattttctagatccacacctggatactgcccatgttgacgagacagcagcagggggagagggagggaaggaaggtgcggctgcaagaaggaaggcacgggacaggcatgtgacactaggccacaagcgataagcacaggcacctgacttttaagtttttgtttgtttgttgtttcccaaagtgctgataacaataacaacaacaataggattccaaccaggagcctcaagtgacagccaggaagagacctgaaggttggggccaccacaatgccaaatcgtttctaaaggaagctgaaaaatgggactgtcttttgcccacttcgttgtgttaaaaggggacatttgtccaaactccccaaccgagttctagaagctcctgacaaggaggcagcatccagccttgaccaggcctcccagttccctggaaccgtatcaggcattcgcctgcctctcacaaatgtttcagggaggccagttctgcagggtgtcagctccaggacccacagggccagaaccagctgggagaattggttatttgagatgtggtactgcttcctcacaagtctcccacaggccatgtaaagggtatttttttgtggcttgctgtgttgctgagatcatcgtatgcaacagctgggtaataagactagcatagctcaaactatcctgccaaacgctctcatctgatttttcctcccttctcccccaacctccaatcaccctgagtcacctgtaaattcatttgtcattcaaagcggaataacaagttgtccctagcaaaaccgctgagcgctttataattttgtggtgtatttttgtcagtaggtagcagaggcggaagtattttttggtgtaattcttgaaattttctgacaggaaacaaataaagatagatgtgtctgaga

SEQ ID NO: 141183 - DNA, 603 bp, Homo sapiens
  Payload ID: 7733
  Gene Symbol:
  Gene Name: HMP19 protein [Source:EntrezGene
  Acc:51617]
  ENST ID: ENST00000517587
  CDS Start-End: 161-445
agaagctccgatccagacacacgcgaggcgctgtcctttcagcaccacaagctcgggctgaggagggaggactcctggccgtcctcctcctcttcaaattggcttgaatctgctctgaccccccacgagtgcagcacagtctgggaagaaaggcgtaaggatggtgaagctgaacagtaaccccagcgagaagggaaccaagccgccttcagttgaggatggcttccagaccgtccctctcatcactcccttggaggttaatcacttacagctgcctgctccagaaaaggtgattgtgaagacaagaacggaatatcagccggaacagaagaacaaagggaagttccgggtgccgaaaatcgctgaatttacgtgtctgccacacagcacaggcccagtgaaagtggaccaagacccagctgcgtacaagtacttgcaggaataagcaggtcaccatccttgtcagcctggccctagctttccttgcgtgcatcgtgttcctggtggtttacaaagccttcacctatgatcacagctgcccagagggattcgtctataagcacaaacgctgtatcccagcctccctggatgcttactactcct

SEQ ID NO: 141184 - DNA, 643 bp, Homo sapiens
  Payload ID: 7733
  Gene Symbol:
  Gene Name: HMP19 protein [Source:EntrezGene
  Acc:51617]
  ENST ID: ENST00000519867
  CDS Start-End: 207-643
gatccagacacacgcgaggcgctgtcctttcagcaccacaagctcgggctgaggagggaggactcctggccgtcctcctcctcttcaaattggcttgaatctgctctgaccccccacgagtgcagcacaccctctctttctgcctcacctcctgctgtaaccagaatcccactgcttgccttaggtctgggaagaaaggcgtaaggatggtgaagctgaacagtaaccccagcgagaagggaaccaagccgccttcagttgaggatggcttccagaccgtccctctcatcactcccttggaggttaatcacttacagctgcctgctccagaaaaggtgattgtgaagacaagaacggaatatcagccggaacagaagaacaaagggaagttccgggtgccgaaaatcgctgaatttacggtcaccatccttgtcagcctggccctagctttccttgcgtgcatcgtgttcctggtggtttacaaagccttcacctatgatcacagctgcccagagggattcgtctataagcacaaacgctgtatcccagcctccctggatgcttactactcctcccaggaccccaattccagaagccgcttctacacagtcatcagccactacagcgtggccaagcagagcac

SEQ ID NO: 141185 - DNA, 1260 bp, Homo sapiens
  Payload ID: 7733
  Gene Symbol:
  Gene Name: HMP19 protein [Source:EntrezGene
  Acc:51617]
  ENST ID: ENST00000521585
  CDS Start-End: 123-422
tcagcaccacaagctcgggctgaggagggaggactcctggccgtcctcctcctcttcaaattggcttgaatctgctctgaccccccacgagtgcagcacagtctgggaagaaaggcgtaaggatggtgaagctgaacagtaaccccagcgagaagggaaccaagccgccttcagttgaggatggcttccagaccgtccctctcatcactcccttggaggttaatcacttacagctgcctgctccagaaaaggtgattgtgaagacaagaacggaatatcagccggaacagaagaacaaagggaagttccgggtgccgaaaatcgctgaatttacggtgcacagaacatggcatttctcaacctcctgcagaggggcagggatgctggaccagttccagtcaatgaaatgtggatggaagtgatcgtaaattgaaaacactatgaggacactgaggcacaggaagtcaagaaacctgcacaaagccatgcaacaaccagccagtatctgagtcatgaccaaagcccagagcccagtctgccttcttgtctgaggtcctttcgacagcctgcattgcttatcttctaggacaatctggccctagggaaggaggccacctggacagcaccatggcgacacagagggcaccagatatgggaaagtttctctctgagaccatgtttgcttctgtttctcaagccaagttaattctctcctagaacaacgccagttagaaatgggggaagctactgaaatacctttggtggcttgtcttgcatcgatattattttctcccactgaggagttagagggtttctggttatgtgctatgtaaattctttggctcattcttttttttccatccttccctccatggtccatcaggaaaatcatggttaaatgagtgagtaaaagcttatgatttgcccgtccacgtcccaacttccttcttcctttagacctttttgtgtgacatgtattttctttgaccctgattttttatttatagcttctactttattgaaagcactcttgtaagctgcctctattcctttgtggattgaaacagagtgtaaggaaataaaatattatctttttttcagaaaaagaacattttggaaaatgaaagtgtattttccgtgtttgttttgttttgtgatagaaacagaagataagggaaggattatccaattctacaagctttgtgctctggggaatacaggactgatgcttgatattaaatgtatgtgctacagtgtaaa

SEQ ID NO: 141186 - DNA, 568 bp, Homo sapiens
  Payload ID: 7733
  Gene Symbol:
  Gene Name: HMP19 protein [Source:EntrezGene
  Acc:51617]
  ENST ID: ENST00000521278
  CDS Start-End: 93-568
aaaaaaaaaaaaaaatggcccttcgctattgaggaaatggaggcattccatggctgaataacaggatcaggtctgggaagaaaggcgtaaggatggtgaagctgaacagtaaccccagcgagaagggaaccaagccgccttcagttgaggatggcttccagaccgtccctctcatcactcccttggaggttaatcacttacagctgcctgctccagaaaaggtgattgtgaagacaagaacggaatatcagccggaacagaagaacaaagggaagttccgggtgccgaaaatcgctgaatttacggtcaccatccttgtcagcctggccctagctttccttgcgtgcatcgtgttcctggtggtttacaaagccttcacctatgatcacagctgcccagagggattcgtctataagcacaaacgctgtatcccagcctccctggatgcttactactcctcccaggaccccaattccagaagccgcttctacacagtcatcagccactacagcgtggccaagcagagcactgcccgggccatcgggccgtggctgtcagcagccgctgt

SEQ ID NO: 141187 - DNA, 613 bp, Homo sapiens
  Payload ID: 7733
  Gene Symbol:
  Gene Name: HMP19 protein [Source:EntrezGene
  Acc:51617]
  Uniprot ID: Q9Y328
  ENST ID: ENST00000519717
  CDS Start-End: 98-613
gctattttctctgtcgtcagccctctctttctgcctcacctcctgctgtaaccagaatcccactgcttgccttaggtctgggaagaaaggcgtaaggatggtgaagctgaacagtaaccccagcgagaagggaaccaagccgccttcagttgaggatggcttccagaccgtccctctcatcactcccttggaggttaatcacttacagctgcctgctccagaaaaggtgattgtgaagacaagaacggaatatcagccggaacagaagaacaaagggaagttccgggtgccgaaaatcgctgaatttacggtcaccatccttgtcagcctggccctagctttccttgcgtgcatcgtgttcctggtggtttacaaagccttcacctatgatcacagctgcccagagggattcgtctataagcacaaacgctgtatcccagcctccctggatgcttactactcctcccaggaccccaattccagaagccgcttctacacagtcatcagccactacagcgtggccaagcagagcactgcccgggccatcgggccgtggctgtcagcagccgctgtcatccatgagcccaagccgcccaagacccagggccactag

SEQ ID NO: 141188 - DNA, 3442 bp, Homo sapiens
  Payload ID: 7734
  Gene Symbol: HNF1A
  Gene Name: HNF1 homeobox A
  ENST ID: ENST00000257555
  CDS Start-End: 227-2122
agctccaatgtaaacagaacaggcaggggccctgattcacgggccgctggggccagggttgggggttgggggtgcccacagggcttggctagtggggttttgggggggcagtgggtgcaaggagtttggtttgtgtctgccggccggcaggcaaacgcaacccacgcggtgggggaggcggctagcgtggtggacccgggccgcgtggccctgtggcagccgagccatggtttctaaactgagccagctgcagacggagctcctggcggccctgctcgagtcagggctgagcaaagaggcactgatccaggcactgggtgagccggggccctacctcctggctggagaaggccccctggacaagggggagtcctgcggcggcggtcgaggggagctggctgagctgcccaatgggctgggggagactcggggctccgaggacgagacggacgacgatggggaagacttcacgccacccatcctcaaagagctggagaacctcagccctgaggaggcggcccaccagaaagccgtggtggagacccttctgcaggaggacccgtggcgtgtggcgaagatggtcaagtcctacctgcagcagcacaacatcccacagcgggaggtggtcgataccactggcctcaaccagtcccacctgtcccaacacctcaacaagggcactcccatgaagacgcagaagcgggccgccctgtacacctggtacgtccgcaagcagcgagaggtggcgcagcagttcacccatgcagggcagggagggctgattgaagagcccacaggtgatgagctaccaaccaagaaggggcggaggaaccgtttcaagtggggcccagcatcccagcagatcctgttccaggcctatgagaggcagaagaaccctagcaaggaggagcgagagacgctagtggaggagtgcaatagggcggaatgcatccagagaggggtgtccccatcacaggcacaggggctgggctccaacctcgtcacggaggtgcgtgtctacaactggtttgccaaccggcgcaaagaagaagccttccggcacaagctggccatggacacgtacagcgggccccccccagggccaggcccgggacctgcgctgcccgctcacagctcccctggcctgcctccacctgccctctcccccagtaaggtccacggtgtgcgctatggacagcctgcgaccagtgagactgcagaagtaccctcaagcagcggcggtcccttagtgacagtgtctacacccctccaccaagtgtcccccacgggcctggagcccagccacagcctgctgagtacagaagccaagctggtctcagcagctgggggccccctcccccctgtcagcaccctgacagcactgcacagcttggagcagacatccccaggcctcaaccagcagccccagaacctcatcatggcctcacttcctggggtcatgaccatcgggcctggtgagcctgcctccctgggtcctacgttcaccaacacaggtgcctccaccctggtcatcggcctggcctccacgcaggcacagagtgtgccggtcatcaacagcatgggcagcagcctgaccaccctgcagcccgtccagttctcccagccgctgcacccctcctaccagcagccgctcatgccacctgtgcagagccatgtgacccagagccccttcatggccaccatggctcagctgcagagcccccacgccctctacagccacaagcccgaggtggcccagtacacccacacgggcctgctcccgcagactatgctcatcaccgacaccaccaacctgagcgccctggccagcctcacgcccaccaagcaggtcttcacctcagacactgaggcctccagtgagtccgggcttcacacgccggcatctcaggccaccaccctccacgtccccagccaggaccctgccagcatccagcacctgcagccggcccaccggctcagcgccagccccacagtgtcctccagcagcctggtgctgtaccagagctcagactccagcaatggccagagccacctgctgccatccaaccacagcgtcatcgagaccttcatctccacccagatggcctcttcctcccagtaaccacggcacctgggccctggggcctgtactgcctgcttggggggtgatgagggcagcagccagccctgcctggaggacctgagcctgccgagcaaccgtggcccttcctggacagctgtgcctcgctccccactctgctctgatgcatcagaaagggagggctctgaggcgccccaacccgtggaggctgctcggggtgcacaggagggggtcgtggagagctaggagcaaagcctgttcatggcagatgtaggagggactgtcgctgcttcgtgggatacagtcttcttacttggaactgaagggggcggcctatgacttgggcacccccagcctgggcctatggagagccctgggaccgctacaccactctggcagccacacttctcaggacacaggcctgtgtagctgtgacctgctgagctctgagaggccctggatcagcgtggccttgttctgtcaccaatgtacccaccgggccactccttcctgccccaactccttccagctagtgacccacatgccatttgtactgaccccatcacctactcacacaggcatttcctgggtggctactctgtgccagagcctggggctctaacgcctgagcccagggaggccgaagctaacagggaaggcaggcagggctctcctggcttcccatccccagcgattccctctcccaggccccatgacctccagctttcctgtatttgttcccaagagcatcatgcctctgaggccagcctggcctcctgcctctactgggaaggctacttcggggctgggaagtcgtccttactcctgtgggagcctcgcaacccgtgccaagtccaggtcctggtggggcagctcctctgtctcgagcgccctgcagaccctgcccttgtttggggcaggagtagctgagctcacaaggcagcaaggcccgagcagctgagcagggccggggaactggccaagctgaggtgcccaggagaagaaagaggtgaccccagggcacaggagctacctgtgtggacaggactaacactcagaagcctgggggcctggctggctgagggcagttcgcagccaccctgaggagtctgaggtcctgagcactgccaggagggacaaaggagcctgtgaacccaggacaagcatggtcccacatccctgggcctgctgctgagaacctggccttcagtgtaccgcgtctaccctgggattcaggaaaaggcctggggtgacccggcaccccctgcagcttgtagccagccggggcgagtggcacgtttatttaacttttagtaaagtcaaggagaaatgcggtggaaa

SEQ ID NO: 141189 - DNA, 725 bp, Homo sapiens
  Payload ID: 7734
  Gene Symbol: HNF1A
  Gene Name: HNF1 homeobox A
  ENST ID: ENST00000544574
  CDS Start-End: 119-244
cagtgggtgcaaggagtttggtttgtgtctgccggccggcaggcaaacgcaacccacgcggtgggggaggcggctagcgtggtggacccgggccgcgtggccctgtggcagccgagccatggtttctaaactgagccagctgcagacggagctcctggcggccctgctcgagtcagggctgagcaaagaggcctcaaccagcagccccagaacctcatcatggcctcacttcctggggtcatgaccatcgggcctggtgagcctgcctccctgggtcctacgttcaccaacacaggtgcctccaccctggtcatcggcctggcctccacgcaggcacagagtgtgccggtcatcaacagcatgggcagcagcctgaccaccctgcagcccgtccagttctcccagccgctgcacccctcctaccagcagccgctcatgccacctgtgcagagccatgtgacccagagccccttcatggccaccatggctcagctgcagagcccccacggtgagcgccctgtgccccacacagcaggagatgatgatagaggttggctgtcaatggatgcaggggaaaggggtgcctggcaggcattgcagtctgcatgtgtctctgggacaagtgtgtttccgtgattgagggtgtctgcaggccagtgtgttcccatgtgaatgcacgtatctgtgtgtgtgcacgactgcttgtgtgagcagatccctagtgc

SEQ ID NO: 141190 - DNA, 2014 bp, Homo sapiens
  Payload ID: 7734
  Gene Symbol: HNF1A
  Gene Name: HNF1 homeobox A
  ENST ID: ENST00000544413
  CDS Start-End: 21-1937
ggccctgtggcagccgagccatggtttctaaactgagccagctgcagacggagctcctggcggccctgctcgagtcagggctgagcaaagaggcactgatccaggcactgggtgagccggggccctacctcctggctggagaaggccccctggacaagggggagtcctgcggcggcggtcgaggggagctggctgagctgcccaatgggctgggggagactcggggctccgaggacgagacggacgacgatggggaagacttcacgccacccatcctcaaagagctggagaacctcagccctgaggaggcggcccaccagaaagccgtggtggagacccttctgcaggaggacccgtggcgtgtggcgaagatggtcaagtcctacctgcagcagcacaacatcccacagcgggaggtggtcgataccactggcctcaaccagtcccacctgtcccaacacctcaacaagggcactcccatgaagacgcagaagcgggccgccctgtacacctggtacgtccgcaagcagcgagaggtggcgcagcagttcacccatgcagggcagggagggctgattgaagagcccacaggtgatgagctaccaaccaagaaggggcggaggaaccgtttcaagtggggcccagcatcccagcagatcctgttccaggcctatgagaggcagaagaaccctagcaaggaggagcgagagacgctagtggaggagtgcaatagggcggaatgcatccagagaggggtgtccccatcacaggcacaggggctgggctccaacctcgtcacggaggtgcgtgtctacaactggtttgccaaccggcgcaaagaagaagccttccggcacaagctggccatggacacgtacagcgggccccccccagggccaggcccgggacctgcgctgcccgctcacagctcccctggcctgcctccacctgccctctcccccagtaaggtccacggtgtgcgctatggacagcctgcgaccagtgagactgcagaagtaccctcaagcagcggcggtcccttagtgacagtgtctacacccctccaccaagtgtcccccacgggcctggagcccagccacagcctgctgagtacagaagccaagctggtctcagcagctgggggccccctcccccctgtcagcaccctgacagcactgcacagcttggagcagacatccccaggcctcaaccagcagccccagaacctcatcatggcctcacttcctggggtcatgaccatcgggcctggtgagcctgcctccctgggtcctacgttcaccaacacaggtgcctccaccctggtcatcggcctggcctccacgcaggcacagagtgtgccggtcatcaacagcatgggcagcagcctgaccaccctgcagcccgtccagttctcccagccgctgcacccctcctaccagcagccgctcatgccacctgtgcagagccatgtgacccagagccccttcatggccaccatggctcagctgcagagcccccacgccctctacagccacaagcccgaggtggcccagtacacccacacgggcctgctcccgcagactatgctcatcaccgacaccaccaacctgagcgccctggccagcctcacgcccaccaagcaggaggctgctctgctcccccaggtcttcacctcagacactgaggcctccagtgagtccgggcttcacacgccggcatctcaggccaccaccctccacgtccccagccaggaccctgccagcatccagcacctgcagccggcccaccggctcagcgccagccccacagtgtcctccagcagcctggtgctgtaccagagctcagactccagcaatggccagagccacctgctgccatccaaccacagcgtcatcgagaccttcatctccacccagatggcctcttcctcccagtaaccacggcacctgggccctggggcctgtactgcctgcttggggggtgatgagggcagcagccagccctgcctggagga

SEQ ID NO: 141191 - DNA, 2819 bp, Homo sapiens
  Payload ID: 7734
  Gene Symbol: HNF1A
  Gene Name: HNF1 homeobox A
  ENST ID: ENST00000543427
  CDS Start-End: 144-1502
cttggctagtggggttttgggggggcagtgggtgcaaggagtttggtttgtgtctgccggccggcaggcaaacgcaacccacgcggtgggggaggcggctagcgtggtggacccgggccgcgtggccctgtggcagccgagccatggtttctaaactgagccagctgcagacggagctcctggcggccctgctcgagtcagggctgagcaaagaggcactgatccaggcactgggtgagccggggccctacctcctggctggagaaggccccctggacaagggggagtcctgcggcggcggtcgaggggagctggctgagctgcccaatgggctgggggagactcggggctccgaggacgagacggacgacgatggggaagacttcacgccacccatcctcaaagagctggagaacctcagccctgaggaggcggcccaccagaaagccgtggtggagacccttctgcaggaggacccgtggcgtgtggcgaagatggtcaagtcctacctgcagcagcacaacatcccacagcgggaggtggtcgataccactggcctcaaccagtcccacctgtcccaacacctcaacaagggcactcccatgaagacgcagaagcgggccgccctgtacacctggtacgtccgcaagcagcgagaggtggcgcagcagttcacccatgcagggcagggagggctgattgaagagcccacaggtgatgagctaccaaccaagaaggggcggaggaaccgtttcaagtggggcccagcatcccagcagacatccccaggcctcaaccagcagccccagaacctcatcatggcctcacttcctggggtcatgaccatcgggcctggtgagcctgcctccctgggtcctacgttcaccaacacaggtgcctccaccctggtcatcggcctggcctccacgcaggcacagagtgtgccggtcatcaacagcatgggcagcagcctgaccaccctgcagcccgtccagttctcccagccgctgcacccctcctaccagcagccgctcatgccacctgtgcagagccatgtgacccagagccccttcatggccaccatggctcagctgcagagcccccacgccctctacagccacaagcccgaggtggcccagtacacccacacgggcctgctcccgcagactatgctcatcaccgacaccaccaacctgagcgccctggccagcctcacgcccaccaagcaggtcttcacctcagacactgaggcctccagtgagtccgggcttcacacgccggcatctcaggccaccaccctccacgtccccagccaggaccctgccagcatccagcacctgcagccggcccaccggctcagcgccagccccacagtgtcctccagcagcctggtgctgtaccagagctcagactccagcaatggccagagccacctgctgccatccaaccacagcgtcatcgagaccttcatctccacccagatggcctcttcctcccagtaaccacggcacctgggccctggggcctgtactgcctgcttggggggtgatgagggcagcagccagccctgcctggaggacctgagcctgccgagcaaccgtggcccttcctggacagctgtgcctcgctccccactctgctctgatgcatcagaaagggagggctctgaggcgccccaacccgtggaggctgctcggggtgcacaggagggggtcgtggagagctaggagcaaagcctgttcatggcagatgtaggagggactgtcgctgcttcgtgggatacagtcttcttacttggaactgaagggggcggcctatgacttgggcacccccagcctgggcctatggagagccctgggaccgctacaccactctggcagccacacttctcaggacacaggcctgtgtagctgtgacctgctgagctctgagaggccctggatcagcgtggccttgttctgtcaccaatgtacccaccgggccactccttcctgccccaactccttccagctagtgacccacatgccatttgtactgaccccatcacctactcacacaggcatttcctgggtggctactctgtgccagagcctggggctctaacgcctgagcccagggaggccgaagctaacagggaaggcaggcagggctctcctggcttcccatccccagcgattccctctcccaggccccatgacctccagctttcctgtatttgttcccaagagcatcatgcctctgaggccagcctggcctcctgcctctactgggaaggctacttcggggctgggaagtcgtccttactcctgtgggagcctcgcaacccgtgccaagtccaggtcctggtggggcagctcctctgtctcgagcgccctgcagaccctgcccttgtttggggcaggagtagctgagctcacaaggcagcaaggcccgagcagctgagcagggccggggaactggccaagctgaggtgcccaggagaagaaagaggtgaccccagggcacaggagctacctgtgtggacaggactaacactcagaagcctgggggcctggctggctgagggcagttcgcagccaccctgaggagtctgaggtcctgagcactgccaggagggacaaaggagcctgtgaacccaggacaagcatggtcccacatccctgggcctgctgctgagaacctggccttcagtgtaccgcgtctaccctgggattcaggaaaaggcctggggtgacccggcaccccctgcagcttgtagccagccggggcgagtggcacgtttatttaacttttagtaaagtcaaggagaaatgcggtgg

SEQ ID NO: 141192 - DNA, 1594 bp, Homo sapiens
  Payload ID: 7734
  Gene Symbol: HNF1A
  Gene Name: HNF1 homeobox A
  Uniprot ID: P20823
  ENST ID: ENST00000541924
  CDS Start-End: 119-862
cagtgggtgcaaggagtttggtttgtgtctgccggccggcaggcaaacgcaacccacgcggtgggggaggcggctagcgtggtggacccgggccgcgtggccctgtggcagccgagccatggtttctaaactgagccagctgcagacggagctcctggcggccctgctcgagtcagggctgagcaaagaggcactgatccaggcactgggtgagccggggccctacctcctggctggagaaggccccctggacaagggggagtcctgcggcggcggtcgaggggagctggctgagctgcccaatgggctgggggagactcggggctccgaggacgagacggacgacgatggggaagacttcacgccacccatcctcaaagagctggagaacctcagccctgaggaggcggcccaccagaaagccgtggtggagacccttctgcaggaggacccgtggcgtgtggcgaagatggtcaagtcctacctgcagcagcacaacatcccacagcgggaggtggtcgataccactggcctcaaccagtcccacctgtcccaacacctcaacaagggcactcccatgaagacgcagaagcgggccgccctgtacacctggtacgtccgcaagcagcgagaggtggcgcagcagttcacccatgcagggcagggagggctgattgaagagcccacaggtgatgagctaccaaccaagaaggggcggaggaaccgtttcaagtggggcccagcatcccagcagatcctgttccaggcctatgagaggcagaagaaccctagcaaggaggagcgagagacgctagtggaggagtgcaataggtgtgcgctatggacagcctgcgaccagtgagactgcagaagtaccctcaagcagcggcggtcccttagtgacagtgtctacacccctccaccaagtgtcccccacgggcctggagcccagccacagcctgctgagtacagaagccaagctggtctcagcagctgggggccccctcccccctgtcagcaccctgacagcactgcacagcttggagcagacatccccaggcctcaaccagcagccccagaacctcatcatggcctcacttcctggggtcatgaccatcgggcctggtgagcctgcctccctgggtcctacgttcaccaacacaggtgcctccaccctggtcatcggcctggcctccacgcaggcacagagtgtgccggtcatcaacagcatgggcagcagcctgaccaccctgcagcccgtccagttctcccagccgctgcacccctcctaccagcagccgctcatgccacctgtgcagagccatgtgacccagagccccttcatggccaccatggctcagctgcagagcccccacggtgagcgccctgtgccccacacagcaggagatgatgatagaggttggctgtcaatggatgcaggggaaaggggtgcctggcaggcattgcagtctgcatgtgtctctgggacaagtgtgtttccgtgattgagggtgtctgcaggccagtgtgttcccatgtgaatgcacgtatctgtgtgtgtgcacgactgcttgtgtgagcagatccctagtgc

SEQ ID NO: 141193 - DNA, 3332 bp, Homo sapiens
  Payload ID: 7734
  Gene Symbol: HNF1A
  Gene Name: HNF1 homeobox A
  ENST ID: ENST00000541395
  CDS Start-End: 24-2012
cgtggccctgtggcagccgagccatggtttctaaactgagccagctgcagacggagctcctggcggccctgctcgagtcagggctgagcaaagaggcactgatccaggcactgggtgagccggggccctacctcctggctggagaaggccccctggacaagggggagtcctgcggcggcggtcgaggggagctggctgagctgcccaatgggctgggggagactcggggctccgaggacgagacggacgacgatggggaagacttcacgccacccatcctcaaagagctggagaacctcagccctgaggaggcggcccaccagaaagccgtggtggagacccttctgcaggaggacccgtggcgtgtggcgaagatggtcaagtcctacctgcagcagcacaacatcccacagcgggaggtggtcgataccactggcctcaaccagtcccacctgtcccaacacctcaacaagggcactcccatgaagacgcagaagcgggccgccctgtacacctggtacgtccgcaagcagcgagaggtggcgcagcagttcacccatgcagggcagggagggctgattgaagagcccacaggtgatgagctaccaaccaagaaggggcggaggaaccgtttcaagtggggcccagcatcccagcagatcctgttccaggcctatgagaggcagaagaaccctagcaaggaggagcgagagacgctagtggaggagtgcaatagggcggaatgcatccagagaggggtgtccccatcacaggcacaggggctgggctccaacctcgtcacggaggtgcgtgtctacaactggtttgccaaccggcgcaaagaagaagccttccggcacaagctggccatggacacgtacagcgggccccccccagggccaggcccgggacctgcgctgcccgctcacagctcccctggcctgcctccacctgccctctcccccagtaaggtccacggtgtgcgctatggacagcctgcgaccagtgagactgcagaagtaccctcaagcagcggcggtcccttagtgacagtgtctacacccctccaccaagtgtcccccacgggcctggagcccagccacagcctgctgagtacagaagccaagctggtctcagcagctgggggccccctcccccctgtcagcaccctgacagcactgcacagcttggagcagacatccccaggcctcaaccagcagccccagaacctcatcatggcctcacttcctggggtcatgaccatcgggcctggtgagcctgcctccctgggtcctacgttcaccaacacaggtgcctccaccctggtcatcggcctggcctccacgcaggcacagagtgtgccggtcatcaacagcatgggcagcagcctgaccaccctgcagcccgtccagttctcccagccgctgcacccctcctaccagcagccgctcatgccacctgtgcagagccatgtgacccagagccccttcatggccaccatggctcagctgcagagcccccacgccctctacagccacaagcccgaggtggcccagtacacccacacgggcctgctcccgcagactatgctcatcaccgacaccaccaacctgagcgccctggccagcctcacgcccaccaagcaggtaaggtccaggcctgctggccctcccttggcctgtgacagagcccctcacccccacatcccccgggctcaggaggctgctctgctcccccaggtcttcacctcagacactgaggcctccagtgagtccgggcttcacacgccggcatctcaggccaccaccctccacgtccccagccaggaccctgccagcatccagcacctgcagccggcccaccggctcagcgccagccccacagtgtcctccagcagcctggtgctgtaccagagctcagactccagcaatggccagagccacctgctgccatccaaccacagcgtcatcgagaccttcatctccacccagatggcctcttcctcccagtaaccacggcacctgggccctggggcctgtactgcctgcttggggggtgatgagggcagcagccagccctgcctggaggacctgagcctgccgagcaaccgtggcccttcctggacagctgtgcctcgctccccactctgctctgatgcatcagaaagggagggctctgaggcgccccaacccgtggaggctgctcggggtgcacaggagggggtcgtggagagctaggagcaaagcctgttcatggcagatgtaggagggactgtcgctgcttcgtgggatacagtcttcttacttggaactgaagggggcggcctatgacttgggcacccccagcctgggcctatggagagccctgggaccgctacaccactctggcagccacacttctcaggacacaggcctgtgtagctgtgacctgctgagctctgagaggccctggatcagcgtggccttgttctgtcaccaatgtacccaccgggccactccttcctgccccaactccttccagctagtgacccacatgccatttgtactgaccccatcacctactcacacaggcatttcctgggtggctactctgtgccagagcctggggctctaacgcctgagcccagggaggccgaagctaacagggaaggcaggcagggctctcctggcttcccatccccagcgattccctctcccaggccccatgacctccagctttcctgtatttgttcccaagagcatcatgcctctgaggccagcctggcctcctgcctctactgggaaggctacttcggggctgggaagtcgtccttactcctgtgggagcctcgcaacccgtgccaagtccaggtcctggtggggcagctcctctgtctcgagcgccctgcagaccctgcccttgtttggggcaggagtagctgagctcacaaggcagcaaggcccgagcagctgagcagggccggggaactggccaagctgaggtgcccaggagaagaaagaggtgaccccagggcacaggagctacctgtgtggacaggactaacactcagaagcctgggggcctggctggctgagggcagttcgcagccaccctgaggagtctgaggtcctgagcactgccaggagggacaaaggagcctgtgaacccaggacaagcatggtcccacatccctgggcctgctgctgagaacctggccttcagtgtaccgcgtctaccctgggattcaggaaaaggcctggggtgacccggcaccccctgcagcttgtagccagccggggcgagtggcacgtttatttaacttttagtaaagtcaaggagaaatgcggtggaaa

SEQ ID NO: 141194 - DNA, 1649 bp, Homo sapiens
  Payload ID: 7734
  Gene Symbol: HNF1A
  Gene Name: HNF1 homeobox A
  Uniprot ID: P20823
  ENST ID: ENST00000538646
  CDS Start-End: 119-955
cagtgggtgcaaggagtttggtttgtgtctgccggccggcaggcaaacgcaacccacgcggtgggggaggcggctagcgtggtggacccgggccgcgtggccctgtggcagccgagccatggtttctaaactgagccagctgcagacggagctcctggcggccctgctcgagtcagggctgagcaaagaggcactgatccaggcactgggtgagccggggccctacctcctggctggagaaggccccctggacaagggggagtcctgcggcggcggtcgaggggagctggctgagctgcccaatgggctgggggagactcggggctccgaggacgagacggacgacgatggggaagacttcacgccacccatcctcaaagagctggagaacctcagccctgaggaggcggcccaccagaaagccgtggtggagacccttctgcaggaggacccgtggcgtgtggcgaagatggtcaagtcctacctgcagcagcacaacatcccacagcgggaggtggtcgataccactggcctcaaccagtcccacctgtcccaacacctcaacaagggcactcccatgaagacgcagaagcgggccgccctgtacacctggtacgtccgcaagcagcgagaggtggcgcagcggcggaatgcatccagagaggggtgtccccatcacaggcacaggggctgggctccaacctcgtcacggaggtgcgtgtctacaactggtttgccaaccggcgcaaagaagaagccttccggcacaagctggccatggacacgtacagcgggccccccccagggccaggcccgggacctgcgctgcccgctcacagctcccctggcctgcctccacctgccctctcccccagtaaggtccacggtgtgcgctatggacagcctgcgaccagtgagactgcagaagtaccctcaagcagcggcggtcccttagtgacagtgtctacacccctccaccaagtgtcccccacgggcctggagcccagccacagcctgctgagtacagaagccaagctggtctcagcagctgggggccccctcccccctgtcagcaccctgacagcactgcacagcttggagcagacatccccaggcctcaaccagcagccccagaacctcatcatggcctcacttcctggggtcatgaccatcgggcctggtgagcctgcctccctgggtcctacgttcaccaacacaggtgcctccaccctggtcatcggcctggcctccacgcaggcacagagtgtgccggtcatcaacagcatgggcagcagcctgaccaccctgcagcccgtccagttctcccagccgctgcacccctcctaccagcagccgctcatgccacctgtgcagagccatgtgacccagagccccttcatggccaccatggctcagctgcagagcccccacggtgagcgccctgtgccccacacagcaggagatgatgatagaggttggctgtcaatggatgcaggggaaaggggtgcctggcaggcattgcagtctgcatgtgtctctgggacaagtgtgtttccgtgattgagggtgtctgcaggccagtgtgttcccatgtgaatgcacgtatctgtgtgtgtgcacgactgcttgtgtgagcagatccctagtgc

SEQ ID NO: 141195 - DNA, 3039 bp, Homo sapiens
  Payload ID: 7734
  Gene Symbol: HNF1A
  Gene Name: HNF1 homeobox A
  Uniprot ID: P20823
  ENST ID: ENST00000540108
  CDS Start-End: 24-383
cgtggccctgtggcagccgagccatggtttctaaactgagccagctgcagacggagctcctggcggccctgctcgagtcagggctgagcaaagaggcactgatccaggcactgggtgagccggggccctacctcctggctggagaaggccccctggacaagggggagtcctgcggcggcggtcgaggggagctggctgagctgcccaatgggctgggggagactcggggctccgaggacgagacggacgacgatggggaagacttcacgccacccatcctcaaagagctggagaacctcagccctgaggaggcggcccaccagaaagccgtggtggagacccttctgcaagttcacccatgcagggcagggagggctgattgaagagcccacaggtgatgagctaccaaccaagaaggggcggaggaaccgtttcaagtggggcccagcatcccagcagatcctgttccaggcctatgagaggcagaagaaccctagcaaggaggagcgagagacgctagtggaggagtgcaatagggcggaatgcatccagagaggggtgtccccatcacaggcacaggggctgggctccaacctcgtcacggaggtgcgtgtctacaactggtttgccaaccggcgcaaagaagaagccttccggcacaagctggccatggacacgtacagcgggccccccccagggccaggcccgggacctgcgctgcccgctcacagctcccctggcctgcctccacctgccctctcccccagtaaggtccacggtgtgcgctatggacagcctgcgaccagtgagactgcagaagtaccctcaagcagcggcggtcccttagtgacagtgtctacacccctccaccaagtgtcccccacgggcctggagcccagccacagcctgctgagtacagaagccaagctggtctcagcagctgggggccccctcccccctgtcagcaccctgacagcactgcacagcttggagcagacatccccaggcctcaaccagcagccccagaacctcatcatggcctcacttcctggggtcatgaccatcgggcctggtgagcctgcctccctgggtcctacgttcaccaacacaggtgcctccaccctggtcatcggcctggcctccacgcaggcacagagtgtgccggtcatcaacagcatgggcagcagcctgaccaccctgcagcccgtccagttctcccagccgctgcacccctcctaccagcagccgctcatgccacctgtgcagagccatgtgacccagagccccttcatggccaccatggctcagctgcagagcccccacgccctctacagccacaagcccgaggtggcccagtacacccacacgggcctgctcccgcagactatgctcatcaccgacaccaccaacctgagcgccctggccagcctcacgcccaccaagcaggtcttcacctcagacactgaggcctccagtgagtccgggcttcacacgccggcatctcaggccaccaccctccacgtccccagccaggaccctgccagcatccagcacctgcagccggcccaccggctcagcgccagccccacagtgtcctccagcagcctggtgctgtaccagagctcagactccagcaatggccagagccacctgctgccatccaaccacagcgtcatcgagaccttcatctccacccagatggcctcttcctcccagtaaccacggcacctgggccctggggcctgtactgcctgcttggggggtgatgagggcagcagccagccctgcctggaggacctgagcctgccgagcaaccgtggcccttcctggacagctgtgcctcgctccccactctgctctgatgcatcagaaagggagggctctgaggcgccccaacccgtggaggctgctcggggtgcacaggagggggtcgtggagagctaggagcaaagcctgttcatggcagatgtaggagggactgtcgctgcttcgtgggatacagtcttcttacttggaactgaagggggcggcctatgacttgggcacccccagcctgggcctatggagagccctgggaccgctacaccactctggcagccacacttctcaggacacaggcctgtgtagctgtgacctgctgagctctgagaggccctggatcagcgtggccttgttctgtcaccaatgtacccaccgggccactccttcctgccccaactccttccagctagtgacccacatgccatttgtactgaccccatcacctactcacacaggcatttcctgggtggctactctgtgccagagcctggggctctaacgcctgagcccagggaggccgaagctaacagggaaggcaggcagggctctcctggcttcccatccccagcgattccctctcccaggccccatgacctccagctttcctgtatttgttcccaagagcatcatgcctctgaggccagcctggcctcctgcctctactgggaaggctacttcggggctgggaagtcgtccttactcctgtgggagcctcgcaacccgtgccaagtccaggtcctggtggggcagctcctctgtctcgagcgccctgcagaccctgcccttgtttggggcaggagtagctgagctcacaaggcagcaaggcccgagcagctgagcagggccggggaactggccaagctgaggtgcccaggagaagaaagaggtgaccccagggcacaggagctacctgtgtggacaggactaacactcagaagcctgggggcctggctggctgagggcagttcgcagccaccctgaggagtctgaggtcctgagcactgccaggagggacaaaggagcctgtgaacccaggacaagcatggtcccacatccctgggcctgctgctgagaacctggccttcagtgtaccgcgtctaccctgggattcaggaaaaggcctggggtgacccggcaccccctgcagcttgtagccagccggggcgagtggcacgtttatttaacttttagtaaagtcaaggagaaatgcggtggaaa

SEQ ID NO: 141196 - DNA, 3030 bp, Homo sapiens
  Payload ID: 7734
  Gene Symbol: HNF1A
  Gene Name: HNF1 homeobox A
  ENST ID: ENST00000560968
  CDS Start-End: 1-1070
cttggctagtggggttttgggggggcagtgggtgcaaggagtttggtttgtgtctgccggccggcaggcaaacgcaacccacgcggtgggggaggcggctagcgtggtggacccgggccgcgtggccctgtggcagccgagccatggtttctaaactgagccagctgcagacggagctcctggcggccctgctcgagtcagggctgagcaaagaggcactgatccaggcactgggtgagccggggccctacctcctggctggagaaggccccctggacaagggggagtcctgcggcggcggtcgaggggagctggctgagctgcccaatgggctgggggagactcggggctccgaggacgagacggacgacgatggggaagacttcacgccacccatcctcaaagagctggagaacctcagccctgaggaggcggcccaccagaaagccgtggtggagacccttctgcaggaggacccgtggcgtgtggcgaagatggtcaagtcctacctgcagcagcacaacatcccacagcgggaggtggtcgataccactggcctcaaccagtcccacctgtcccaacacctcaacaagggcactcccatgaagacgcagaagcgggccgccctgtacacctggtacgtccgcaagcagcgagaggtggcgcagcagttcacccatgcagggcagggagggctgattgaagagcccacaggtgatgagctaccaaccaagaaggggcggaggaaccgtttcaagtggggcccagcatcccagcagatcctgttccaggcctatgagaggcagaagaaccctagcaaggaggagcgagagacgctagtggaggagtgcaatagggcggaatgcatccagagaggggtgtccccatcacagccacagcctgctgagtacagaagccaagctggtctcagcagctgggggccccctcccccctgtcagcaccctgacagcactgcacagcttggagcagacatccccaggcctcaaccagcagccccagaacctcatcatggcctcacttcctggggtcatgaccatcgggcctggtgagcctgcctccctgggtcctacgttcaccaacacaggtgcctccaccctggtcatcggcctggcctccacgcaggcacagagtgtgccggtcatcaacagcatgggcagcagcctgaccaccctgcagcccgtccagttctcccagccgctgcacccctcctaccagcagccgctcatgccacctgtgcagagccatgtgacccagagccccttcatggccaccatggctcagctgcagagcccccacgccctctacagccacaagcccgaggtggcccagtacacccacacgggcctgctcccgcagactatgctcatcaccgacaccaccaacctgagcgccctggccagcctcacgcccaccaagcaggtcttcacctcagacactgaggcctccagtgagtccgggcttcacacgccggcatctcaggccaccaccctccacgtccccagccaggaccctgccagcatccagcacctgcagccggcccaccggctcagcgccagccccacagtgtcctccagcagcctggtgctgtaccagagctcagactccagcaatggccagagccacctgctgccatccaaccacagcgtcatcgagaccttcatctccacccagatggcctcttcctcccagtaaccacggcacctgggccctggggcctgtactgcctgcttggggggtgatgagggcagcagccagccctgcctggaggacctgagcctgccgagcaaccgtggcccttcctggacagctgtgcctcgctccccactctgctctgatgcatcagaaagggagggctctgaggcgccccaacccgtggaggctgctcggggtgcacaggagggggtcgtggagagctaggagcaaagcctgttcatggcagatgtaggagggactgtcgctgcttcgtgggatacagtcttcttacttggaactgaagggggcggcctatgacttgggcacccccagcctgggcctatggagagccctgggaccgctacaccactctggcagccacacttctcaggacacaggcctgtgtagctgtgacctgctgagctctgagaggccctggatcagcgtggccttgttctgtcaccaatgtacccaccgggccactccttcctgccccaactccttccagctagtgacccacatgccatttgtactgaccccatcacctactcacacaggcatttcctgggtggctactctgtgccagagcctggggctctaacgcctgagcccagggaggccgaagctaacagggaaggcaggcagggctctcctggcttcccatccccagcgattccctctcccaggccccatgacctccagctttcctgtatttgttcccaagagcatcatgcctctgaggccagcctggcctcctgcctctactgggaaggctacttcggggctgggaagtcgtccttactcctgtgggagcctcgcaacccgtgccaagtccaggtcctggtggggcagctcctctgtctcgagcgccctgcagaccctgcccttgtttggggcaggagtagctgagctcacaaggcagcaaggcccgagcagctgagcagggccggggaactggccaagctgaggtgcccaggagaagaaagaggtgaccccagggcacaggagctacctgtgtggacaggactaacactcagaagcctgggggcctggctggctgagggcagttcgcagccaccctgaggagtctgaggtcctgagcactgccaggagggacaaaggagcctgtgaacccaggacaagcatggtcccacatccctgggcctgctgctgagaacctggccttcagtgtaccgcgtctaccctgggattcaggaaaaggcctggggtgacccggcaccccctgcagcttgtagccagccggggcgagtggcacgtttatttaacttttagtaaagtcaaggagaaatgcggtgg

SEQ ID NO: 141197 - DNA, 2337 bp, Homo sapiens
  Payload ID: 7734
  Gene Symbol: HNF1A
  Gene Name: HNF1 homeobox A
  ENST ID: ENST00000400024
  CDS Start-End: 202-1830
ggggccctgattcacgggccgctggggccagggttgggggttgggggtgcccacagggcttggctagtggggttttgggggggcagtgggtgcaaggagtttggtttgtgtctgccggccggcaggcaaacgcaacccacgcggtgggggaggcggctagcgtggtggacccgggccgcgtggccctgtggcagccgagccatggtttctaaactgagccagctgcagacggagctcctggcggccctgctcgagtcagggctgagcaaagaggcactgatccaggcactgggtgagccggggccctacctcctggctggagaaggccccctggacaagggggagtcctgcggcggcggtcgaggggagctggctgagctgcccaatgggctgggggagactcggggctccgaggacgagacggacgacgatggggaagacttcacgccacccatcctcaaagagctggagaacctcagccctgaggaggcggcccaccagaaagccgtggtggagacccttctgcaggaggacccgtggcgtgtggcgaagatggtcaagtcctacctgcagcagcacaacatcccacagcgggaggtggtcgataccactggcctcaaccagtcccacctgtcccaacacctcaacaagggcactcccatgaagacgcagaagcgggccgccctgtacacctggtacgtccgcaagcagcgagaggtggcgcagcagttcacccatgcagggcagggagggctgattgaagagcccacaggtgatgagctaccaaccaagaaggggcggaggaaccgtttcaagtggggcccagcatcccagcagatcctgttccaggcctatgagaggcagaagaaccctagcaaggaggagcgagagacgctagtggaggagtgcaatagggcggaatgcatccagagaggggtgtccccatcacaggcacaggggctgggctccaacctcgtcacggaggtgcgtgtctacaactggtttgccaaccggcgcaaagaagaagccttccggcacaagctggccatggacacgtacagcgggccccccccagggccaggcccgggacctgcgctgcccgctcacagctcccctggcctgcctccacctgccctctcccccagtaaggtccacggtgtgcgctatggacagcctgcgaccagtgagactgcagaagtaccctcaagcagcggcggtcccttagtgacagtgtctacacccctccaccaagtgtcccccacgggcctggagcccagccacagcctgctgagtacagaagccaagctggtctcagcagctgggggccccctcccccctgtcagcaccctgacagcactgcacagcttggagcagacatccccaggcctcaaccagcagccccagaacctcatcatggcctcacttcctggggtcatgaccatcgggcctggtgagcctgcctccctgggtcctacgttcaccaacacaggtgcctccaccctggtcatcggcctggcctccacgcaggcacagagtgtgccggtcatcaacagcatgggcagcagcctgaccaccctgcagcccgtccagttctcccagccgctgcacccctcctaccagcagccgctcatgccacctgtgcagagccatgtgacccagagccccttcatggccaccatggctcagctgcagagcccccacggtgagcgccctgtgccccacacagcaggagatgatgatagaggttggctgtcaatggatgcaggggaaaggggtgcctggcaggcattgcagtctgcatgtgtctctgggacaagtgtgtttccgtgattgagggtgtctgcaggccagtgtgttcccatgtgaatgcacgtatctgtgtgtgtgcacgactgcttgtgtgagcagatccctagtgcgtgtctgggtgtgtatcggttgtgcatgcatttgtgtgcatgcctgtgtttctctgaaactcttagggccatatgaatttctaaaatctattcagattttagaaaggtaatctggggccaggcgtggtggctcatgcctgtaatcccagcactttggaaggccgaggtgggcagatcacttgaggtcaggagttcaagaccagcctggccaacacggtgaaaccccgtctctactaaaagtacaaaaattagccaggcgtggaggcacgtgcctgtagtcccagctacttgggaggctgaggcagaatcgcttgaacctgggaggcggaggttgcagtgagctgagattgtgccactgcactgcactccagcctgggcaacagagtgagtactctgccaaaaaaaaaaaaaagaaaaa

SEQ ID NO: 141198 - DNA, 2473 bp, Homo sapiens
  Payload ID: 7734
  Gene Symbol: HNF1A
  Gene Name: HNF1 homeobox A
  ENST ID: ENST00000617366
  CDS Start-End: 144-851
cttggctagtggggttttgggggggcagtgggtgcaaggagtttggtttgtgtctgccggccggcaggcaaacgcaacccacgcggtgggggaggcggctagcgtggtggacccgggccgcgtggccctgtggcagccgagccatggtttctaaactgagccagctgcagacggagctcctggcggccctgctcgagtcagggctgagcaaagaggcactgatccaggcactgggtgagccggggccctacctcctggctggagaaggccccctggacaagggggagtcctgcggcggcggtcgaggggagctggctgagctgcccaatgggctgggggagactcggggctccgaggacgagacggacgacgatggggaagacttcacgccacccatcctcaaagagctggagaacctcagccctgaggaggcggcccaccagaaagccgtggtggagacccttctgcaggaggacccgtggcgtgtggcgaagatggtcaagtcctacctgcagcagcacaacatcccacagcgggaggtggtcgataccactggcctcaaccagtcccacctgtcccaacacctcaacaagggcactcccatgaagacgcagaagcgggccgccctgtacacctggtacgtccgcaagcagcgagaggtggcgcagcagttcacccatgcagggcagggagggctgattgaagagcccacaggtgatgagctaccaaggccaccatggctcagctgcagagcccccacgccctctacagccacaagcccgaggtggcccagtacacccacacgggcctgctcccgcagactatgctcatcaccgacaccaccaacctgagcgccctggccagcctcacgcccaccaagcaggtcttcacctcagacactgaggcctccagtgagtccgggcttcacacgccggcatctcaggccaccaccctccacgtccccagccaggaccctgccagcatccagcacctgcagccggcccaccggctcagcgccagccccacagtgtcctccagcagcctggtgctgtaccagagctcagactccagcaatggccagagccacctgctgccatccaaccacagcgtcatcgagaccttcatctccacccagatggcctcttcctcccagtaaccacggcacctgggccctggggcctgtactgcctgcttggggggtgatgagggcagcagccagccctgcctggaggacctgagcctgccgagcaaccgtggcccttcctggacagctgtgcctcgctccccactctgctctgatgcatcagaaagggagggctctgaggcgccccaacccgtggaggctgctcggggtgcacaggagggggtcgtggagagctaggagcaaagcctgttcatggcagatgtaggagggactgtcgctgcttcgtgggatacagtcttcttacttggaactgaagggggcggcctatgacttgggcacccccagcctgggcctatggagagccctgggaccgctacaccactctggcagccacacttctcaggacacaggcctgtgtagctgtgacctgctgagctctgagaggccctggatcagcgtggccttgttctgtcaccaatgtacccaccgggccactccttcctgccccaactccttccagctagtgacccacatgccatttgtactgaccccatcacctactcacacaggcatttcctgggtggctactctgtgccagagcctggggctctaacgcctgagcccagggaggccgaagctaacagggaaggcaggcagggctctcctggcttcccatccccagcgattccctctcccaggccccatgacctccagctttcctgtatttgttcccaagagcatcatgcctctgaggccagcctggcctcctgcctctactgggaaggctacttcggggctgggaagtcgtccttactcctgtgggagcctcgcaacccgtgccaagtccaggtcctggtggggcagctcctctgtctcgagcgccctgcagaccctgcccttgtttggggcaggagtagctgagctcacaaggcagcaaggcccgagcagctgagcagggccggggaactggccaagctgaggtgcccaggagaagaaagaggtgaccccagggcacaggagctacctgtgtggacaggactaacactcagaagcctgggggcctggctggctgagggcagttcgcagccaccctgaggagtctgaggtcctgagcactgccaggagggacaaaggagcctgtgaacccaggacaagcatggtcccacatccctgggcctgctgctgagaacctggccttcagtgtaccgcgtctaccctgggattcaggaaaaggcctggggtgacccggcaccccctgcagcttgtagccagccggggcgagtggcacgtttatttaacttttagtaaagtcaaggagaaatgcggtgg

SEQ ID NO: 141199 - DNA, 2344 bp, Homo sapiens
  Payload ID: 7734
  Gene Symbol: HNF1A
  Gene Name: HNF1 homeobox A
  ENST ID: ENST00000615446
  CDS Start-End: 344-1027
cttggctagtggggttttgggggggcagtgggtgcaaggagtttggtttgtgtctgccggccggcaggcaaacgcaacccacgcgggtgtgcgctatggacagcctgcgaccagtgagactgcagaagtaccctcaagcagcggcggtcccttagtgacagtgtctacacccctccaccaagtgtcccccacgggcctggagcccagccacagcctgctgagtacagaagccaagctggtctcagcagctgggggccccctcccccctgtcagcaccctgacagcactgcacagcttggagcagacatccccaggcctcaaccagcagccccagaacctcatcatggcctcacttcctggggtcatgaccatcgggcctggtgagcctgcctccctgggtcctacgttcaccaacacaggtgcctccaccctggtcatcggcctggcctccacgcaggcacagagtgtgccggtcatcaacagcatgggcagcagcctgaccaccctgcagcccgtccagttctcccagccgctgcacccctcctaccagcagccgctcatgccacctgtgcagagccatgtgacccagagccccttcatggccaccatggctcagctgcagagcccccacgccctctacagccacaagcccgaggtggcccagtacacccacacgggcctgctcccgcagactatgctcatcaccgacaccaccaacctgagcgccctggccagcctcacgcccaccaagcaggtcttcacctcagacactgaggcctccagtgagtccgggcttcacacgccggcatctcaggccaccaccctccacgtccccagccaggaccctgccagcatccagcacctgcagccggcccaccggctcagcgccagccccacagtgtcctccagcagcctggtgctgtaccagagctcagactccagcaatggccagagccacctgctgccatccaaccacagcgtcatcgagaccttcatctccacccagatggcctcttcctcccagtaaccacggcacctgggccctggggcctgtactgcctgcttggggggtgatgagggcagcagccagccctgcctggaggacctgagcctgccgagcaaccgtggcccttcctggacagctgtgcctcgctccccactctgctctgatgcatcagaaagggagggctctgaggcgccccaacccgtggaggctgctcggggtgcacaggagggggtcgtggagagctaggagcaaagcctgttcatggcagatgtaggagggactgtcgctgcttcgtgggatacagtcttcttacttggaactgaagggggcggcctatgacttgggcacccccagcctgggcctatggagagccctgggaccgctacaccactctggcagccacacttctcaggacacaggcctgtgtagctgtgacctgctgagctctgagaggccctggatcagcgtggccttgttctgtcaccaatgtacccaccgggccactccttcctgccccaactccttccagctagtgacccacatgccatttgtactgaccccatcacctactcacacaggcatttcctgggtggctactctgtgccagagcctggggctctaacgcctgagcccagggaggccgaagctaacagggaaggcaggcagggctctcctggcttcccatccccagcgattccctctcccaggccccatgacctccagctttcctgtatttgttcccaagagcatcatgcctctgaggccagcctggcctcctgcctctactgggaaggctacttcggggctgggaagtcgtccttactcctgtgggagcctcgcaacccgtgccaagtccaggtcctggtggggcagctcctctgtctcgagcgccctgcagaccctgcccttgtttggggcaggagtagctgagctcacaaggcagcaaggcccgagcagctgagcagggccggggaactggccaagctgaggtgcccaggagaagaaagaggtgaccccagggcacaggagctacctgtgtggacaggactaacactcagaagcctgggggcctggctggctgagggcagttcgcagccaccctgaggagtctgaggtcctgagcactgccaggagggacaaaggagcctgtgaacccaggacaagcatggtcccacatccctgggcctgctgctgagaacctggccttcagtgtaccgcgtctaccctgggattcaggaaaaggcctggggtgacccggcaccccctgcagcttgtagccagccggggcgagtggcacgtttatttaacttttagtaaagtcaaggagaaatgcggtgg

SEQ ID NO: 141200 - DNA, 1546 bp, Homo sapiens
  Payload ID: 7735
  Gene Symbol: HNF1B
  Gene Name: HNF1 homeobox B
  ENST ID: ENST00000613727
  CDS Start-End: 135-1508
ggggagtaacaggtgtctggaggctgaagggtggaggggttcctggatttggggtttgcttgtgaaactcccctccaccctcctctctcgcacccacccaccccctcacccccttctttttccgtccttggaaaatggtgtccaagctcacgtcgctccagcaagaactcctgagcgccctgctgagctccggggtcaccaaggaggtgctggttcaggccttggaggagttgctgccatccccgaacttcggggtgaagctggagacgctgcccctgtcccctggcagcggggccgagcccgacaccaagccggtcttccatactctcaccaacggccacgccaagggccgcttgtccggcgacgagggctccgaggacggcgacgactatgacacacctcccatcctcaaggagctgcaggcgctcaacaccgaggaggcggcggagcagcgggcggaggtggaccggatgctcagtgaggacccttggagggctgctaaaatgatcaagggttacatgcagcaacacaacatcccccagagggaggtggtcgatgtcaccggcctgaaccagtcgcacctctcccagcatctcaacaagggcacccctatgaagacccagaagcgtgccgctctgtacacctggtacgtcagaaagcaacgagagatcctccgacagttcagtcaacagagccatgggcctgggcagtccgatgatgcctgctctgagcccaccaacaagaagatgcgccgcaaccggttcaaatgggggcccgcgtcccagcaaatcttgtaccaggcctacgatcggcaaaagaaccccagcaaggaagagagagaggccttagtggaggaatgcaacagggcagaatgtttgcagcgaggggtgtccccctccaaagcccacggcctgggctccaacttggtcactgaggtccgtgtctacaactggtttgcaaaccgcaggaaggaggaggcattccggcaaaagctggccatggacgcctatagctccaaccagactcacagcctgaaccctctgctctcccacggctccccccaccaccagcccagctcctctcctccaaacaagctgtcaggagtgcgctacagccagcagggaaacaatgagatcacttcctcctcaacaatcagtcaccatggcaacagcgccatggtgaccagccagtcggttttacagcaagtctccccagccagcctggacccaggccacaatctcctctcacctgatggtaaaatgatctcagtctcaggaggaggtttgcccccagtcagcaccttgacgaatatccacagcctctcccaccataatccccagcaatctcaaaacctcatcatgacacccctctctggagtcatggcaattgcacaaatgtcctctacaagcctggtgatgcccacacaccacttacttcgtgcgcaacaacaaggaccctgttttccacaccatcaccctctgggcagctgtcatggaaaagcccagtgacctgaccagcacctgcgagaggtccctgcttacctgac

SEQ ID NO: 141201 - DNA, 1820 bp, Homo sapiens
  Payload ID: 7735
  Gene Symbol: HNF1B
  Gene Name: HNF1 homeobox B
  ENST ID: ENST00000617272
  CDS Start-End: 135-1412
ggggagtaacaggtgtctggaggctgaagggtggaggggttcctggatttggggtttgcttgtgaaactcccctccaccctcctctctcgcacccacccaccccctcacccccttctttttccgtccttggaaaatggtgtccaagctcacgtcgctccagcaagaactcctgagcgccctgctgagctccggggtcaccaaggaggtgctggttcaggccttggaggagttgctgccatccccgaacttcggggtgaagctggagacgctgcccctgtcccctggcagcggggccgagcccgacaccaagccggtcttccatactctcaccaacggccacgccaagggccgcttgtccggcgacgagggctccgaggacggcgacgactatgacacacctcccatcctcaaggagctgcaggcgctcaacaccgaggaggcggcggagcagcgggcggaggtggaccggatgctcagtgaggacccttggagggctgctaaaatgatcaagggttacatgcagcaacacaacatcccccagagggaggtggtcgatgtcaccggcctgaaccagtcgcacctctcccagcatctcaacaagggcacccctatgaagacccagaagcgtgccgctctgtacacctggtacgtcagaaagcaacgagagatcctccgacaattcaaccagacagtccagagttctggaaatatgacagacaaaagcagtcaggatcagctgctgtttctctttccagagttcagtcaacagagccatgggcctgggcagtccgatgatgcctgctctgagcccaccaacaagaagatgcgccgcaaccggttcaaatgggggcccgcgtcccagcaaatcttgtaccaggcctacgatcggcaaaagaaccccagcaaggaagagagagaggccttagtggaggaatgcaacagggcagaatgtttgcagcgaggggtgtccccctccaaagcccacggcctgggctccaacttggtcactgaggtccgtgtctacaactggtttgcaaaccgcaggaaggaggaggcattccggcaaaagctggccatggacgcctatagctccaaccagactcacagcctgaaccctctgctctcccacggctccccccaccaccagcccagctcctctcctccaaacaagctgtcaggagtgcgctacagccagcagggaaacaatgagatcacttcctcctcaacaatcagtcaccatggcaacagcgccatggtgaccagccagtcggttttacagcaagtctccccagccagcctggacccaggccacaatctcctctcacctgatggtaaaatggatctcagtctcaggaggaggtttgcccccagtcagcaccttgacgaatatccacagcctctcccaccataatccccagcaatctcaaaacctcatcatgacacccctctctggagtcatggcaattgcacaaagcctcaacacctcccaagcacagagtgtccctgtcatcaacagtgtggccggcagcctggcagccctgcagcccgtccagttctcccagcagctgcacagccctcaccagcagcccctcatgcagcagagcccaggcagccacatggcccagcagcccttcatggcagctgtgactcagctgcagaactcacacatgtcctctacaagcctggtgatgcccacacaccacttacttcgtgcgcaacaacaaggaccctgttttccacaccatcaccctctgggcagctgtcatggaaaagcccagtgacctgaccagcacctgcgagaggtccctgcttacctgac

SEQ ID NO: 141202 - DNA, 1546 bp, Homo sapiens
  Payload ID: 7735
  Gene Symbol: HNF1B
  Gene Name: HNF1 homeobox B
  ENST ID: ENST00000614955
  CDS Start-End: 135-1508
ggggagtaacaggtgtctggaggctgaagggtggaggggttcctggatttggggtttgcttgtgaaactcccctccaccctcctctctcgcacccacccaccccctcacccccttctttttccgtccttggaaaatggtgtccaagctcacgtcgctccagcaagaactcctgagcgccctgctgagctccggggtcaccaaggaggtgctggttcaggccttggaggagttgctgccatccccgaacttcggggtgaagctggagacgctgcccctgtcccctggcagcggggccgagcccgacaccaagccggtcttccatactctcaccaacggccacgccaagggccgcttgtccggcgacgagggctccgaggacggcgacgactatgacacacctcccatcctcaaggagctgcaggcgctcaacaccgaggaggcggcggagcagcgggcggaggtggaccggatgctcagtgaggacccttggagggctgctaaaatgatcaagggttacatgcagcaacacaacatcccccagagggaggtggtcgatgtcaccggcctgaaccagtcgcacctctcccagcatctcaacaagggcacccctatgaagacccagaagcgtgccgctctgtacacctggtacgtcagaaagcaacgagagatcctccgacagttcagtcaacagagccatgggcctgggcagtccgatgatgcctgctctgagcccaccaacaagaagatgcgccgcaaccggttcaaatgggggcccgcgtcccagcaaatcttgtaccaggcctacgatcggcaaaagaaccccagcaaggaagagagagaggccttagtggaggaatgcaacagggcagaatgtttgcagcgaggggtgtccccctccaaagcccacggcctgggctccaacttggtcactgaggtccgtgtctacaactggtttgcaaaccgcaggaaggaggaggcattccggcaaaagctggccatggacgcctatagctccaaccagactcacagcctgaaccctctgctctcccacggctccccccaccaccagcccagctcctctcctccaaacaagctgtcaggagtgcgctacagccagcagggaaacaatgagatcacttcctcctcaacaatcagtcaccatggcaacagcgccatggtgaccagccagtcggttttacagcaagtctccccagccagcctggacccaggccacaatctcctctcacctgatggtaaaatgatctcagtctcaggaggaggtttgcccccagtcagcaccttgacgaatatccacagcctctcccaccataatccccagcaatctcaaaacctcatcatgacacccctctctggagtcatggcaattgcacaaatgtcctctacaagcctggtgatgcccacacaccacttacttcgtgcgcaacaacaaggaccctgttttccacaccatcaccctctgggcagctgtcatggaaaagcccagtgacctgaccggcacctgcgagaggtccctgcttacctgac

SEQ ID NO: 141203 - DNA, 2977 bp, Homo sapiens
  Payload ID: 7735
  Gene Symbol: HNF1B
  Gene Name: HNF1 homeobox B
  Uniprot ID: P35680
  ENST ID: ENST00000617811
  CDS Start-End: 364-2037
tgagtacaatggaccctggcaaagccccgctcccggcccaggtcttctgctctccaggtctgcccctccggctctccctctctccgggtttccccctccccaccatcatttgcatccagccgaaagctgggcccttcccactaatttgcatatcttatatggcctaatggtggcgatcatggcaagttagaagttttctgactcctttcggaggagcctccgggaccccggggagtaacaggtgtctggaggctgaagggtggaggggttcctggatttggggtttgcttgtgaaactcccctccaccctcctctctcgcacccacccaccccctcacccccttctttttccgtccttggaaaatggtgtccaagctcacgtcgctccagcaagaactcctgagcgccctgctgagctccggggtcaccaaggaggtgctggttcaggccttggaggagttgctgccatccccgaacttcggggtgaagctggagacgctgcccctgtcccctggcagcggggccgagcccgacaccaagccggtcttccatactctcaccaacggccacgccaagggccgcttgtccggcgacgagggctccgaggacggcgacgactatgacacacctcccatcctcaaggagctgcaggcgctcaacaccgaggaggcggcggagcagcgggcggaggtggaccggatgctcagtgaggacccttggagggctgctaaaatgatcaagggttacatgcagcaacacaacatcccccagagggaggtggtcgatgtcaccggcctgaaccagtcgcacctctcccagcatctcaacaagggcacccctatgaagacccagaagcgtgccgctctgtacacctggtacgtcagaaagcaacgagagatcctccgacaattcaaccagacagtccagagttctggaaatatgacagacaaaagcagtcaggatcagctgctgtttctctttccagagttcagtcaacagagccatgggcctgggcagtccgatgatgcctgctctgagcccaccaacaagaagatgcgccgcaaccggttcaaatgggggcccgcgtcccagcaaatcttgtaccaggcctacgatcggcaaaagaaccccagcaaggaagagagagaggccttagtggaggaatgcaacagggcagaatgtttgcagcgaggggtgtccccctccaaagcccacggcctgggctccaacttggtcactgaggtccgtgtctacaactggtttgcaaaccgcaggaaggaggaggcattccggcaaaagctggccatggacgcctatagctccaaccagactcacagcctgaaccctctgctctcccacggctccccccaccaccagcccagctcctctcctccaaacaagctgtcaggagtgcgctacagccagcagggaaacaatgagatcacttcctcctcaacaatcagtcaccatggcaacagcgccatggtgaccagccagtcggttttacagcaagtctccccagccagcctggacccaggccacaatctcctctcacctgatggtaaaatgatctcagtctcaggaggaggtttgcccccagtcagcaccttgacgaatatccacagcctctcccaccataatccccagcaatctcaaaacctcatcatgacacccctctctggagtcatggcaattgcacaaagcctcaacacctcccaagcacagagtgtccctgtcatcaacagtgtggccggcagcctggcagccctgcagcccgtccagttctcccagcagctgcacagccctcaccagcagcccctcatgcagcagagcccaggcagccacatggcccagcagcccttcatggcagctgtgactcagctgcagaactcacacatgtacgcacacaagcaggaacccccccagtattcccacacctcccggtttccatctgcaatggtggtcacagataccagcagcatcagtacactcaccaacatgtcttcaagtaaacagtgtcctctacaagcctggtgatgcccacacaccacttacttcgtgcgcaacaacaaggaccctgttttccacaccatcaccctctgggcagctgtcatggaaaagcccagtgacctgaccagcacctgcgagaggtccctgcttacctgacggacgtcctgctggcacctcagacaatccactctcaggaggcgcagcccgaagcccagtttcccttctatgcagtattgccacaatgcctctcccacgatgtcaaggactcctgtctgtcctggaggtgggagacaaggaacctccgaagaggaagcaagaaagccgtactgtctatgttgtgatccttcatcgaacaaactgatgcgaaaacttgaatctgttactgaaatgaggagagaaggacatgtgctattgaactgagccaaacacactgtaaatatccacagactccctcccctgcccccatcccaaatgatcttgagatttcttttaaagaagtaaatttgtccaatggctgtaaactataaactactgtaattaagtgcaatttcccctctgtgtcctctcccctctgccctgtatataatactaaagtgtctattagttttctttgtaaaggtcagagtcaaaatttcaaaagtgatctgtcccctctcccctcatggagaaacatcctaagtgggaagtgaagccccttgtcctctcccgcgggcctggacacttatggggacagcataccttggactgactaccagctaactccagtctcctgacattaagacacacctctggatccctggaggggctgaatgtagtgtgtcagagtaacatgccagcttcctgtgggccaggagctcagccgtgcactccctaagaaaccccagggcagggaaactggctgtttgatagcagaagaaaaagttgcagtctcagaaagccttccattaaaacaatttattttatcact

SEQ ID NO: 141204 - DNA, 1103 bp, Homo sapiens
  Payload ID: 7735
  Gene Symbol: HNF1B
  Gene Name: HNF1 homeobox B
  ENST ID: ENST00000619478
  CDS Start-End: 222-1103
aatttgcatatcttatatggcctaatggtggcgatcatggcaagttagaagttttctgactcctttcggaggagcctccgggaccccggggagtaacaggtgtctggaggctgaagggtggaggggttcctggatttggggtttgcttgtgaaactcccctccaccctcctctctcgcacccacccaccccctcacccccttctttttccgtccttggaaaatggtgtccaagctcacgtcgctccagcaagaactcctgagcgccctgctgagctccggggtcaccaaggaggtgctggttcaggccttggaggagttgctgccatccccgaacttcggggtgaagctggagacgctgcccctgtcccctggcagcggggccgagcccgacaccaagccggtcttccatactctcaccaacggccacgccaagggccgcttgtccggcgacgagggctccgaggacggcgacgactatgacacacctcccatcctcaaggagctgcaggcgctcaacaccgaggaggcggcggagcagcgggcggaggtggaccggatgctcagtgaggacccttggagggctgctaaaatgatcaagggttacatgcagcaacacaacatcccccagagggaggtggtcgatgtcaccggcctgaaccagtcgcacctctcccagcatctcaacaagggcacccctatgaagacccagaagcgtgccgctctgtacacctggtacgtcagaaagcaacgagagatcctccgacagttcagtcaacagagccatgggcctgggcagtccgatgatgcctgctctgagcccaccaacaagaagatgcgccgcaaccggttcaaatgggggcccgcgtcccagcgcctacgatcggcaaaagaaccccagcaagagagagaggccttagtggaggaatgcaacaggcagaatgtttgcagcgaggggtgtccccctccaaagcccacggcctgggctccaacttggtcactgaggtccgtgtctacaactggtttgcaaaccgcaggaaggaggaggcattccggcaaaagctggccatggacgcctatagctccaaccagactcacagcctga

SEQ ID NO: 141205 - DNA, 1103 bp, Homo sapiens; identical to SEQ ID NO: 141204
  Payload ID: 7735
  Gene Symbol: HNF1B
  Gene Name: HNF1 homeobox B
  ENST ID: ENST00000620125
  CDS Start-End: 222-1103

SEQ ID NO: 141206 - DNA, 1819 bp, Homo sapiens
  Payload ID: 7735
  Gene Symbol: HNF1B
  Gene Name: HNF1 homeobox B
  ENST ID: ENST00000614313
  CDS Start-End: 135-1781
ggggagtaacaggtgtctggaggctgaagggtggaggggttcctggatttggggtttgcttgtgaaactcccctccaccctcctctctcgcacccacccaccccctcacccccttctttttccgtccttggaaaatggtgtccaagctcacgtcgctccagcaagaactcctgagcgccctgctgagctccggggtcaccaaggaggtgctggttcaggccttggaggagttgctgccatccccgaacttcggggtgaagctggagacgctgcccctgtcccctggcagcggggccgagcccgacaccaagccggtcttccatactctcaccaacggccacgccaagggccgcttgtccggcgacgagggctccgaggacggcgacgactatgacacacctcccatcctcaaggagctgcaggcgctcaacaccgaggaggcggcggagcagcgggcggaggtggaccggatgctcagtgaggacccttggagggctgctaaaatgatcaagggttacatgcagcaacacaacatcccccagagggaggtggtcgatgtcaccggcctgaaccagtcgcacctctcccagcatctcaacaagggcacccctatgaagacccagaagcgtgccgctctgtacacctggtacgtcagaaagcaacgagagatcctccgacaattcaaccagacagtccagagttctggaaatatgacagacaaaagcagtcaggatcagctgctgtttctctttccagagttcagtcaacagagccatgggcctgggcagtccgatgatgcctgctctgagcccaccaacaagaagatgcgccgcaaccggttcaaatgggggcccgcgtcccagcaaatcttgtaccaggcctacgatcggcaaaagaaccccagcaaggaagagagagaggccttagtggaggaatgcaacagggcagaatgtttgcagcgaggggtgtccccctccaaagcccacggcctgggctccaacttggtcactgaggtccgtgtctacaactggtttgcaaaccgcaggaaggaggaggcattccggcaaaagctggccatggacgcctatagctccaaccagactcacagcctgaaccctctgctctcccacggctccccccaccaccagcccagctcctctcctccaaacaagctgtcaggagtgcgctacagccagcagggaaacaatgagatcacttcctcctcaacaatcagtcaccatggcaacagcgccatggtgaccagccagtcggttttacagcaagtctccccagccagcctggacccaggccacaatctcctctcacctgatggtaaaatgatctcagtctcaggaggaggtttgcccccagtcagcaccttgacgaatatccacagcctctcccaccataatccccagcaatctcaaaacctcatcatgacacccctctctggagtcatggcaattgcacaaagcctcaacacctcccaagcacagagtgtccctgtcatcaacagtgtggccggcagcctggcagccctgcagcccgtccagttctcccagcagctgcacagccctcaccagcagcccctcatgcagcagagcccaggcagccacatggcccagcagcccttcatggcagctgtgactcagctgcagaactcacacatgtcctctacaagcctggtgatgcccacacaccacttacttcgtgcgcaacaacaaggaccctgttttccacaccatcaccctctgggcagctgtcatggaaaagcccagtgacctgaccagcacctgcgagaggtccctgcttacctgac

SEQ ID NO: 141207 - DNA, 1971 bp, Homo sapiens
  Payload ID: 7735
  Gene Symbol: HNF1B
  Gene Name: HNF1 homeobox B
  Uniprot ID: P35680
  ENST ID: ENST00000621123
  CDS Start-End: 176-1771
agaagttttctgactcctttcggaggagcctccgggaccccggggagtaacaggtgtctggaggctgaagggtggaggggttcctggatttggggtttgcttgtgaaactcccctccaccctcctctctcgcacccacccaccccctcacccccttctttttccgtccttggaaaatggtgtccaagctcacgtcgctccagcaagaactcctgagcgccctgctgagctccggggtcaccaaggaggtgctggttcaggccttggaggagttgctgccatccccgaacttcggggtgaagctggagacgctgcccctgtcccctggcagcggggccgagcccgacaccaagccggtcttccatactctcaccaacggccacgccaagggccgcttgtccggcgacgagggctccgaggacggcgacgactatgacacacctcccatcctcaaggagctgcaggcgctcaacaccgaggaggcggcggagcagcgggcggaggtggaccggatgctcagtgaggacccttggagggctgctaaaatgatcaagggttacatgcagcaacacaacatcccccagagggaggtggtcgatgtcaccggcctgaaccagtcgcacctctcccagcatctcaacaagggcacccctatgaagacccagaagcgtgccgctctgtacacctggtacgtcagaaagcaacgagagatcctccgacagttcagtcaacagagccatgggcctgggcagtccgatgatgcctgctctgagcccaccaacaagaagatgcgccgcaaccggttcaaatgggggcccgcgtcccagcaaatcttgtaccaggcctacgatcggcaaaagaaccccagcaaggaagagagagaggccttagtggaggaatgcaacagggcagaatgtttgcagcgaggggtgtccccctccaaagcccacggcctgggctccaacttggtcactgaggtccgtgtctacaactggtttgcaaaccgcaggaaggaggaggcattccggcaaaagctggccatggacgcctatagctccaaccagactcacagcctgaaccctctgctctcccacggctccccccaccaccagcccagctcctctcctccaaacaagctgtcaggagtgcgctacagccagcagggaaacaatgagatcacttcctcctcaacaatcagtcaccatggcaacagcgccatggtgaccagccagtcggttttacagcaagtctccccagccagcctggacccaggccacaatctcctctcacctgatggtaaaatgatctcagtctcaggaggaggtttgcccccagtcagcaccttgacgaatatccacagcctctcccaccataatccccagcaatctcaaaacctcatcatgacacccctctctggagtcatggcaattgcacaaagcctcaacacctcccaagcacagagtgtccctgtcatcaacagtgtggccggcagcctggcagccctgcagcccgtccagttctcccagcagctgcacagccctcaccagcagcccctcatgcagcagagcccaggcagccacatggcccagcagcccttcatggcagctgtgactcagctgcagaactcacacatgtacgcacacaagcaggaacccccccagtattcccacacctcccggtttccatctgcaatggtggtcacagataccagcagcatcagtacactcaccaacatgtcttcaagtaaacagtgtcctctacaagcctggtgatgcccacacaccacttacttcgtgcgcaacaacaaggaccctgttttccacaccatcaccctctgggcagctgtcatggaaaagcccagtgacctgaccagcacctgcgagaggtccctgcttacctgacggacgtcctgctggcacctcagacaatccactctcaggaggcgcagcccgaagcccagtttcccttctat

SEQ ID NO: 141208 - DNA, 1820 bp, Homo sapiens
  Payload ID: 7735
  Gene Symbol: HNF1B
  Gene Name: HNF1 homeobox B
  ENST ID: ENST00000616941
  CDS Start-End: 135-1412
ggggagtaacaggtgtctggaggctgaagggtggaggggttcctggatttggggtttgcttgtgaaactcccctccaccctcctctctcgcacccacccaccccctcacccccttctttttccgtccttggaaaatggtgtccaagctcacgtcgctccagcaagaactcctgagcgccctgctgagctccggggtcaccaaggaggtgctggttcaggccttggaggagttgctgccatccccgaacttcggggtgaagctggagacgctgcccctgtcccctggcagcggggccgagcccgacaccaagccggtcttccatactctcaccaacggccacgccaagggccgcttgtccggcgacgagggctccgaggacggcgacgactatgacacacctcccatcctcaaggagctgcaggcgctcaacaccgaggaggcggcggagcagcgggcggaggtggaccggatgctcagtgaggacccttggagggctgctaaaatgatcaagggttacatgcagcaacacaacatcccccagagggaggtggtcgatgtcaccggcctgaaccagtcgcacctctcccagcatctcaacaagggcacccctatgaagacccagaagcgtgccgctctgtacacctggtacgtcagaaagcaacgagagatcctccgacaattcaaccagacagtccagagttctggaaatatgacagacaaaagcagtcaggatcagctgctgtttctctttccagagttcagtcaacagagccatgggcctgggcagtccgatgatgcctgctctgagcccaccaacaagaagatgcgccgcaaccggttcaaatgggggcccgcgtcccagcaaatcttgtaccaggcctacgatcggcaaaagaaccccagcaaggaagagagagaggccttagtggaggaatgcaacagggcagaatgtttgcagcgaggggtgtccccctccaaagcccacggcctgggctccaacttggtcactgaggtccgtgtctacaactggtttgcaaaccgcaggaaggaggaggcattccggcaaaagctggccatggacgcctatagctccaaccagactcacagcctgaaccctctgctctcccacggctccccccaccaccagcccagctcctctcctccaaacaagctgtcaggagtgcgctacagccagcagggaaacaatgagatcacttcctcctcaacaatcagtcaccatggcaacagcgccatggtgaccagccagtcggttttacagcaagtctccccagccagcctggacccaggccacaatctcctctcacctgatggtaaaatggatctcagtctcaggaggaggtttgcccccagtcagcaccttgacgaatatccacagcctctcccaccataatccccagcaatctcaaaacctcatcatgacacccctctctggagtcatggcaattgcacaaagcctcaacacctcccaagcacagagtgtccctgtcatcaacagtgtggccggcagcctggcagccctgcagcccgtccagttctcccagcagctgcacagccctcaccagcagcccctcatgcagcagagcccaggcagccacatggcccagcagcccttcatggcagctgtgactcagctgcagaactcacacatgtcctctacaagcctggtgatgcccacacaccacttacttcgtgcgcaacaacaaggaccctgttttccacaccatcaccctctgggcagctgtcatggaaaagcccagtgacctgaccggcacctgcgagaggtccctgcttacctgac

SEQ ID NO: 141209 - DNA, 2978 bp, Homo sapiens
  Payload ID: 7735
  Gene Symbol: HNF1B
  Gene Name: HNF1 homeobox B
  Uniprot ID: P35680
  ENST ID: ENST00000610754
  CDS Start-End: 364-2037
tgagtacaatggaccctggcaaagccccgctcccggcccaggtcttctgctctccaggtctgcccctccggctctccctctctccgggtttccccctccccaccatcatttgcatccagccgaaagctgggcccttcccactaatttgcatatcttatatggcctaatggtggcgatcatggcaagttagaagttttctgactcctttcggaggagcctccgggaccccggggagtaacaggtgtctggaggctgaagggtggaggggttcctggatttggggtttgcttgtgaaactcccctccaccctcctctctcgcacccacccaccccctcacccccttctttttccgtccttggaaaatggtgtccaagctcacgtcgctccagcaagaactcctgagcgccctgctgagctccggggtcaccaaggaggtgctggttcaggccttggaggagttgctgccatccccgaacttcggggtgaagctggagacgctgcccctgtcccctggcagcggggccgagcccgacaccaagccggtcttccatactctcaccaacggccacgccaagggccgcttgtccggcgacgagggctccgaggacggcgacgactatgacacacctcccatcctcaaggagctgcaggcgctcaacaccgaggaggcggcggagcagcgggcggaggtggaccggatgctcagtgaggacccttggagggctgctaaaatgatcaagggttacatgcagcaacacaacatcccccagagggaggtggtcgatgtcaccggcctgaaccagtcgcacctctcccagcatctcaacaagggcacccctatgaagacccagaagcgtgccgctctgtacacctggtacgtcagaaagcaacgagagatcctccgacaattcaaccagacagtccagagttctggaaatatgacagacaaaagcagtcaggatcagctgctgtttctctttccagagttcagtcaacagagccatgggcctgggcagtccgatgatgcctgctctgagcccaccaacaagaagatgcgccgcaaccggttcaaatgggggcccgcgtcccagcaaatcttgtaccaggcctacgatcggcaaaagaaccccagcaaggaagagagagaggccttagtggaggaatgcaacagggcagaatgtttgcagcgaggggtgtccccctccaaagcccacggcctgggctccaacttggtcactgaggtccgtgtctacaactggtttgcaaaccgcaggaaggaggaggcattccggcaaaagctggccatggacgcctatagctccaaccagactcacagcctgaaccctctgctctcccacggctccccccaccaccagcccagctcctctcctccaaacaagctgtcaggagtgcgctacagccagcagggaaacaatgagatcacttcctcctcaacaatcagtcaccatggcaacagcgccatggtgaccagccagtcggttttacagcaagtctccccagccagcctggacccaggccacaatctcctctcacctgatggtaaaatgatctcagtctcaggaggaggtttgcccccagtcagcaccttgacgaatatccacagcctctcccaccataatccccagcaatctcaaaacctcatcatgacacccctctctggagtcatggcaattgcacaaagcctcaacacctcccaagcacagagtgtccctgtcatcaacagtgtggccggcagcctggcagccctgcagcccgtccagttctcccagcagctgcacagccctcaccagcagcccctcatgcagcagagcccaggcagccacatggcccagcagcccttcatggcagctgtgactcagctgcagaactcacacatgtacgcacacaagcaggaacccccccagtattcccacacctcccggtttccatctgcaatggtggtcacagataccagcagcatcagtacactcaccaacatgtcttcaagtaaacagtgtcctctacaagcctggtgatgcccacacaccacttacttcgtgcgcaacaacaaggaccctgttttccacaccatcaccctctgggcagctgtcatggaaaagcccagtgacctgaccggcacctgcgagaggtccctgcttacctgacggacgtcctgctggcacctcagacaatccactctcaggaggcgcagcccgaagcccagtttcccttctatgcagtattgccacaatgcctctcccacgatgtcaaggactcctgtctgtcctggaggtgggagacaaggaaccaccgaagaggaagcaagaaagccgtactgtctatgttgtgatccttcatcgaacaaactgatgcgaaaacttgaatctgttactgaaatgaggagagaaggacatgtgctattgaactgagccaaacacactgtaaatatccacagactccctcccctgcccccatcccacatgatcttgagatttcttttaaagaagtaaatttgtccaatggctgtaaactataaactactgtaattaagtgcaatttcccctctgtgtcctctcccctctgccctgtatataatactaaagtgtctattagttttctttgtaaaggtcagagtcaaaatttcaaaagtgatctgtcccctctcccctcatggagaaacatcctaagtgggaagtgaagccccttgtcctctcccgcgggcctggacacttatggggacagcataccttggactgactaccagctaactccagtctcctgacattaagacacacctctggatccctggaggggctgaatgtagtgtgtcagagtaacatgccagcttcctgtgggccaggagctcagccgtgcactccctaagaaaccccagggcagggaaactggctgtttgatagcagaagaaaaagttgcagtctcagaaagccttccattaaaacaatttattttatcacta

SEQ ID NO: 141210 - DNA, 1971 bp, Homo sapiens
  Payload ID: 7735
  Gene Symbol: HNF1B
  Gene Name: HNF1 homeobox B
  Uniprot ID: P35680
  ENST ID: ENST00000633792
  CDS Start-End: 176-1771
agaagttttctgactcctttcggaggagcctccgggaccccggggagtaacaggtgtctggaggctgaagggtggaggggttcctggatttggggtttgcttgtgaaactcccctccaccctcctctctcgcacccacccaccccctcacccccttctttttccgtccttggaaaatggtgtccaagctcacgtcgctccagcaagaactcctgagcgccctgctgagctccggggtcaccaaggaggtgctggttcaggccttggaggagttgctgccatccccgaacttcggggtgaagctggagacgctgcccctgtcccctggcagcggggccgagcccgacaccaagccggtcttccatactctcaccaacggccacgccaagggccgcttgtccggcgacgagggctccgaggacggcgacgactatgacacacctcccatcctcaaggagctgcaggcgctcaacaccgaggaggcggcggagcagcgggcggaggtggaccggatgctcagtgaggacccttggagggctgctaaaatgatcaagggttacatgcagcaacacaacatcccccagagggaggtggtcgatgtcaccggcctgaaccagtcgcacctctcccagcatctcaacaagggcacccctatgaagacccagaagcgtgccgctctgtacacctggtacgtcagaaagcaacgagagatcctccgacagttcagtcaacagagccatgggcctgggcagtccgatgatgcctgctctgagcccaccaacaagaagatgcgccgcaaccggttcaaatgggggcccgcgtcccagcaaatcttgtaccaggcctacgatcggcaaaagaaccccagcaaggaagagagagaggccttagtggaggaatgcaacagggcagaatgtttgcagcgaggggtgtccccctccaaagcccacggcctgggctccaacttggtcactgaggtccgtgtctacaactggtttgcaaaccgcaggaaggaggaggcattccggcaaaagctggccatggacgcctatagctccaaccagactcacagcctgaaccctctgctctcccacggctccccccaccaccagcccagctcctctcctccaaacaagctgtcaggagtgcgctacagccagcagggaaacaatgagatcacttcctcctcaacaatcagtcaccatggcaacagcgccatggtgaccagccagtcggttttacagcaagtctccccagccagcctggacccaggccacaatctcctctcacctgatggtaaaatgatctcagtctcaggaggaggtttgcccccagtcagcaccttgacgaatatccacagcctctcccaccataatccccagcaatctcaaaacctcatcatgacacccctctctggagtcatggcaattgcacaaagcctcaacacctcccaagcacagagtgtccctgtcatcaacagtgtggccggcagcctggcagccctgcagcccgtccagttctcccagcagctgcacagccctcaccagcagcccctcatgcagcagagcccaggcagccacatggcccagcagcccttcatggcagctgtgactcagctgcagaactcacacatgtacgcacacaagcaggaacccccccagtattcccacacctcccggtttccatctgcaatggtggtcacagataccagcagcatcagtacactcaccaacatgtcttcaagtaaacagtgtcctctacaagcctggtgatgcccacacaccacttacttcgtgcgcaacaacaaggaccctgttttccacaccatcaccctctgggcagctgtcatggaaaagcccagtgacctgaccggcacctgcgagaggtccctgcttacctgacggacgtcctgctggcacctcagacaatccactctcaggaggcgcagcccgaagcccagtttcccttctat

SEQ ID NO: 141211 - DNA, 1819 bp, Homo sapiens
  Payload ID: 7735
  Gene Symbol: HNF1B
  Gene Name: HNF1 homeobox B
  ENST ID: ENST00000632625
  CDS Start-End: 135-1781
ggggagtaacaggtgtctggaggctgaagggtggaggggttcctggatttggggtttgcttgtgaaactcccctccaccctcctctctcgcacccacccaccccctcacccccttctttttccgtccttggaaaatggtgtccaagctcacgtcgctccagcaagaactcctgagcgccctgctgagctccggggtcaccaaggaggtgctggttcaggccttggaggagttgctgccatccccgaacttcggggtgaagctggagacgctgcccctgtcccctggcagcggggccgagcccgacaccaagccggtcttccatactctcaccaacggccacgccaagggccgcttgtccggcgacgagggctccgaggacggcgacgactatgacacacctcccatcctcaaggagctgcaggcgctcaacaccgaggaggcggcggagcagcgggcggaggtggaccggatgctcagtgaggacccttggagggctgctaaaatgatcaagggttacatgcagcaacacaacatcccccagagggaggtggtcgatgtcaccggcctgaaccagtcgcacctctcccagcatctcaacaagggcacccctatgaagacccagaagcgtgccgctctgtacacctggtacgtcagaaagcaacgagagatcctccgacaattcaaccagacagtccagagttctggaaatatgacagacaaaagcagtcaggatcagctgctgtttctctttccagagttcagtcaacagagccatgggcctgggcagtccgatgatgcctgctctgagcccaccaacaagaagatgcgccgcaaccggttcaaatgggggcccgcgtcccagcaaatcttgtaccaggcctacgatcggcaaaagaaccccagcaaggaagagagagaggccttagtggaggaatgcaacagggcagaatgtttgcagcgaggggtgtccccctccaaagcccacggcctgggctccaacttggtcactgaggtccgtgtctacaactggtttgcaaaccgcaggaaggaggaggcattccggcaaaagctggccatggacgcctatagctccaaccagactcacagcctgaaccctctgctctcccacggctccccccaccaccagcccagctcctctcctccaaacaagctgtcaggagtgcgctacagccagcagggaaacaatgagatcacttcctcctcaacaatcagtcaccatggcaacagcgccatggtgaccagccagtcggttttacagcaagtctccccagccagcctggacccaggccacaatctcctctcacctgatggtaaaatgatctcagtctcaggaggaggtttgcccccagtcagcaccttgacgaatatccacagcctctcccaccataatccccagcaatctcaaaacctcatcatgacacccctctctggagtcatggcaattgcacaaagcctcaacacctcccaagcacagagtgtccctgtcatcaacagtgtggccggcagcctggcagccctgcagcccgtccagttctcccagcagctgcacagccctcaccagcagcccctcatgcagcagagcccaggcagccacatggcccagcagcccttcatggcagctgtgactcagctgcagaactcacacatgtcctctacaagcctggtgatgcccacacaccacttacttcgtgcgcaacaacaaggaccctgttttccacaccatcaccctctgggcagctgtcatggaaaagcccagtgacctgaccggcacctgcgagaggtccctgcttacctgac

SEQ ID NO: 141212 - DNA, 4001 bp, Homo sapiens
  Payload ID: 7736
  Gene Symbol: HNRNPUL2-BSCL2
  Gene Name: HNRNPUL2-BSCL2 readthrough (NMD candidate)
  ENST ID: ENST00000403734
  CDS Start-End: 229-2469
gttttgggctccgtgagccgaaagggggaggggagacgaaggagaagcaaacactgcgcagcgggaccgtgcgcggcctccgctcctgcgtgcgtgcgctcgctcgcgcgggctcagtgctggcgcgtgaggcggaggcgggcggcggcggcggcgcctgcgcggtcggactcggtcgacggttcgcaggggaggaggcggcgggaggcggaggaggcggcggcggcgatggaggtgaagcggctgaaagtgaccgagctgcggtcggagctgcagcggcggggcctggactcgcgcggcctcaaggtggatctggcgcagcggctgcaggaggcgctggacgccgagatgctcgaggacgaggccggcggcggcggggccgggcccggcggggcctgcaaggcggagcctcggcctgtggccgcgtcgggcggcggcccgggcggggacgaggaggaggacgaagaggaggaggaggaggacgaggaggcgctgcttgaggacgaggacgaggagccaccccctgctcaagccttgggtcaggccgcgcagccgccgccggagcccccggaggcggcagccatggaggccgcggccgagccagatgcttccgagaagccggcggaggccacggccgggtcaggcggggtaaatggtggcgaagagcagggcctcggcaagagggaggaagacgaacccgaggagcggagcggggacgagacgccgggatccgaggtgccgggtgacaaggccgccgaggaacagggagatgaccaggatagtgaaaagtcaaaaccagcaggctcagatggtgagcggcggggggtaaagagacagcgggatgagaaggatgaacatggccgagcttactatgaattccgagaggaggcttaccacagccgctcaaagtctccactgcctcctgaagaagaggcaaaagatgaggaggaggatcaaactcttgtgaacctggacacgtatacctcggatctgcattttcaagtgagcaaagaccgctatggagggcagccacttttctcagagaagttccccaccctttggtctggggcaaggagtacttacggagtgacaaagggaaaagtctgctttgaggcaaaggtaacccagaatctcccaatgaaagaaggctgcacagaggtctctctccttcgagttgggtggtctgttgatttttcccgtccacagcttggtgaagatgaattctcttacggtttcgatggacgaggactcaaggcagaaaatggacaatttgaggaatttggccagacttttggggagaatgatgttattggctgctttgctaattttgagactgaagaagtagaactttccttctccaagaatggagaagacctaggtgtggcattctggatcagcaaggattccctggcagaccgggcccttctaccccatgtcctctgcaaaaattgtgttgtagaattaaacttcggtcagaaggaggagcccttcttcccaccaccagaagagtttgtgttcattcatgctgtgcctgttgaggagcgtgtacgcactgcagtccctcccaagaccatagaggaatgtgaggtgattctgatggtgggactacccggatctggaaagacccagtgggcactgaaatatgcaaaagaaaaccctgagaaaagatacaatgtcctgggagctgagactgtgctcaatcaaatgaggatgaagggtctcgaggagccagagatggaccccaaaagccgagaccttttagttcagcaagcctcccagtgccttagtaagctggtccagattgcttcccggacaaagaggaactttattcttgatcagtgtaatgtgtacaattctggccaacggcggaagctattgctgttcaagaccttctctcggaaagtggtggtggttgtccctaatgaggaagattggaagaagaggctggagttgaggaaggaagtagagggagatgatgtgcctgaatctataatgctggagatgaaagccaacttctctttgcctgaaaaatgcgactatatggatgaggtgacatatggggagctggagaaggaggaagctcagcccattgtcactaagtacaaggaggaggcaaggaagcttctgcccccctccgagaagcggacaaatcgccgaaacaaccgaaacaagcgtaaccggcagaaccgaagccggggccaaggctatgtgggcgggcagcgccgaggctacgacaaccgggcctacgggcagcagtactgggggcagcctggaaacagagggggttaccgtaatttctatgatcgatacaggggagactatgatcgattttacgggcgagattatgagtacaacagatacagagactattacagacaatacaatcgggatggaccctccattttccatatccaggaaaatgtgatgcgccacaggtatcagcgtctggatcgccacttcacgttttagccacaagtgactcagtggaagatccagagtcaacagaggctcgtcaggaagatgtctacagaaaaggtagaccaaaaggaggaagctggggaaaaagaggtgtgcggagaccagatcaaaggaccggacaaagaggaggaaccaccagctgctgcatcccatggccaggggtggcgtccaggtggcagagcagctaggaacgcaaggcctgaacctggggccagacaccctgctctcccggccatggtcaacgaccctccagtacctgccttactgtgggcccaggaggtgggccaagtcttggcaggccgtgcccgcaggctgctgctgcagtttggggtgctcttctgcaccatcctccttttgctctgggtgtctgtcttcctctatggctccttctactattcctatatgccgacagtcagccacctcagccctgtgcatttctactacaggaccgactgtgattcctccaccacctcactctgctccttccctgttgccaatgtctcgctgactaagggtggacgtgatcgggtgctgatgtatggacagccgtatcgtgttaccttagagcttgagctgccagagtcccctgtgaatcaagatttgggcatgttcttggtcaccatttcctgctacaccagaggtggccgaatcatctccacttcttcgcgttcggtgatgctgcattaccgctcagacctgctccagatgctggacacactggtcttctctagcctcctgctatttggctttgcagagcagaagcagctgctggaggtggaactctacgcagactatagagagaactcgtacgtgccgaccactggagcgatcattgagatccacagcaagcgcatccagctgtatggagcctacctccgcatccacgcgcacttcactgggctcagatacctgctatacaacttcccgatgacctgcgccttcataggtgttgccagcaacttcaccttcctcagcgtcatcgtgctcttcagctacatgcagtgggtgtgggggggcatctggccccgacaccgcttctctttgcaggttaacatccgaaaaagagacaattcccggaaggaagtccaacgaaggatctctgctcatcagccagggcctgaaggccaggaggagtcaactccgcaatcagatgttacagaggatggtgagagccctgaagatccctcagggacagagggtcagctgtccgaggaggagaaaccagatcagcagcccctgagcggagaagaggagctagagcctgaggccagtgatggttcaggctcctgggaagatgcagctttgctgacggaggccaacctgcctgctcctgctcctgcttctgcttctgcccctgtcctagagactctgggcagctctgaacctgctgggggtgctctccgacagcgccccacctgctctagttcctgaagaaaaggggcagactcctcacattccagcactttcccacctgactcctctcccctcgtttttccttcaataaactattttgtgtcagcttc

SEQ ID NO: 141213 - DNA, 1776 bp, Homo sapiens
  Payload ID: 7737
  Gene Symbol: HJURP
  Gene Name: Holliday junction recognition protein
  ENST ID: ENST00000414924
  CDS Start-End: 67-1776
ctatttgagtttgtggcgcgcgaggccctgcagtccgggttggcgcttgggtactggctgggtccgatgctgggtacgctgcgcgccatggagggcgaggacgtggaagacgaccagctgctgcagaagctcagggccagtcgccgccgcttccagaggcgcatgcagcggctgatagagaagtacaaccagcccttcgaggacaccccggtggtgcaaatggccacgctgacctacgagacgccacagggattgagaatttggggtggaagactaataaaggaaagaaacgaaggagagatccagtgtgcaggtaacagagctggaagggatgtacgtgtgactccgctgccttcactggcctcacctgccgtgcctgcccccggatactgcagtcgtatctccagaaagagtcctggtgacccagcgaaaccagcttcatctcccagagaatgggatcctttgcatccttcctccacagacatggccttagtacctagaaatgacagcctctccctacaagagaccagtagcagcagcttcttaagcagccagccctttgaagatgatgacatttgcaatgtgaccatcagtgacctgtacgcagggatgctgcactccatgagccggctgttgagcacaaagccatcaagcatcatctccaccaaaacgttcatcatgcaaaactggaactccaggaggaggcacagatataagagcaggatgaacaaaacatattgcaaaggagccagacgttctcagaggagctccaaggagaacttcataccctgctctgagcctgtgaaagggacaggggcattaagagattgcaagaacgtattagatgtttcttgccgtaagacaggtttaaaattggaaaaagcttttcttgaagtcaacagaccccaaatccataagttagatccaagttggaaggagcgcaaagtgacaccctcgaagtattcttccttgatttacttcgactccagtgcaacatataatcttgatgaggaaaatagatttaggacattaaaatggttaatttctcctgtaaaaatagtttccagaccaacaatacgacagggccatggagagaaccgtcagagggagattgaaatccgatttgatcagcttcatcgggaatattgcctgagtcccaggaaccagcctcgccggatgtgcctcccggactcctgggccatgaacatgtacagagggggtcctgcgagtcctggtggccttcagggcttagaaacccgcaggctgagtttaccttccagcaaagcaaaagcaaaaagtttaagtgaggcttttgaaaacctaggcaaaagatctctggaagcaggtaggtgcctgcccaagagcgattcatcttcatcacttccaaagaccaaccccacacacagcgcaactcgcccgcagcagacatctgaccttcacgttcagggaaatagttctggaatatttagaaagtcagtgtcacccagcaaaactctttcagtcccagataaagaagtgccaggccacggaaggaatcgttacgatgaaattaaagaagaatttgacaagcttcatcaaaagtattgcctcaaatctcctgggcagatgacagtgcctttatgtattggagtgtctacagataaagcaagtatggaagttcgatatcaaacagaaggcttcttaggaaaattaaatccagaccctcacttccagggtttccagaagttgccatcatcacccctggggtgcagaaaaagtctactgggctcaactgca

SEQ ID NO: 141214 - DNA, 823 bp, Homo sapiens
  Payload ID: 7737
  Gene Symbol: HJURP
  Gene Name: Holliday junction recognition protein
  ENST ID: ENST00000433484
  CDS Start-End: 1-206
aaagacccaggctatcagaaccccagggctccggacgccagggcaattccctgggtgcctcagatggggtggacaacaccgtcagaccgggagaccagggcagctcttcacagcccaactcagaagagagaggagagaacacgtcttacaggatggaagagaaaagtgatttcatgctagaaaaattggaaactaaaagtgtgtagctaggttatttcggagtgttatttatcttcccacttgctctctgtttgtatttttgttttgtttttgattcttgagactgtgaggacttggttgacttctctgcccttaaagtaaatattagtgaaattggttccatcagagataacctcgagttcttggtgtagaaattatgtgaataaagttgctcaattagaatttttagggttctctttgataggcctgtttttctgatgtgtgtgttttttttgggggggggttatttgtttgtttgtttgtttgtttgtttgtttttgagacagcctgggcgacagggcaagactccatctcaaaaaaaaaaaaaaaaaaaaaagaagagtccctggagacagatgggacactctaggcctcccctcaccgcttggcacagtgcctggccttaggcacgctgtcagcatgcgtgtggatgaactccgagtgaagacacaaagctagtttccgaccctttgggccagtgggctgtcagacaaacgtacttggggggaaatcggaaatgaagtggctcattaaggccaaagttccctttgcctcattgtcttggttctgggctgtcaccaccttacagtcacaagtctactcc

SEQ ID NO: 141215 - DNA, 2934 bp, Homo sapiens
  Payload ID: 7737
  Gene Symbol: HJURP
  Gene Name: Holliday junction recognition protein
  Uniprot ID: Q8NCD3
  ENST ID: ENST00000441687
  CDS Start-End: 67-2058
ctatttgagtttgtggcgcgcgaggccctgcagtccgggttggcgcttgggtactggctgggtccgatgctgggtacgctgcgcgccatggagggcgaggacgtggaagacgaccagctgctgcagaagctcagggccagtcgccgccgcttccagaggcgcatgcagcggctgatagagaagtacaaccagcccttcgaggacaccccggtggtgcaaatggccacgctgacctacgagacgccacagggattgagaatttggggtggaagactaataaaggaaagaaacgaaggagagatccagtgtgcaggtaacagagctggaagggatgtacgtgtgactccgctgccttcactggcctcacctgccgtgcctgcccccggatactgcagtcgtatctccagaaagagtcctggtgacccagcgaaaccagcttcatctcccagagaatgggatcctttgcatccttcctccacagacatggccttagtacctagaaatgacagcctctccctacaagagaccagtagcagcagcttcttaagcagccagccctttgaagatgatgacatttgcaatgtgaccatcagtgacctgtacgcagggatgctgcactccatgagccggctgttgagcacaaagccatcaagcatcatctccaccaaaacgttcatcatgcaaaactggaactccaggaggaggcacagatataagagcaggatgaacaaaacatattgcaaaggagccagacgttctcagaggagctccaaggagaacttcataccctgctctgagcctgtgaaagggacaggggcattaagagattgcaagaacgtattagatgtttcttgccgtaagacaggtttaaaattggaaaaagcttttcttgaagtcaacagaccccaaatccataagttagatccaagttggaaggagcgcaaagtgacaccctcgaagtattcttccttgatttacttcgactccagtgcaacatataatcttgatgaggaaaatagatttaggacattaaaatggttaatttctcctgtaaaaatagtttccagaccaacaatacgacagggccatggagagaaccgtcagagggagattgaaatccgatttgatcagcttcatcgggaatattgcctgagtcccaggaaccagcctcgccggatgtgcctcccggactcctgggccatgaacatgtacagagggggtcctgcgagtcctggtggccttcagggcttagaaacccgcaggctgagtttaccttccagcaaagcaaaagcaaaaagtttaagtgaggcttttgaaaacctaggcaaaagatctctggaagcaggtaggtgcctgcccaagagcgattcatcttcatcacttccaaagaccaaccccacacacagcgcaactcgcccgcagcagacatctgaccttcacgttcagggaaatagttctggaatatttagaaagtcagtgtcacccagcaaaactctttcagtcccagataaagaagtgccaggccacggaaggaatcgttacgatgaaattaaagaagaatttgacaagcttcatcaaaagtattgcctcaaatctcctgggcagatgacagtgcctttatgtattggagtgtctacagataaagcaagtatggaagttcgatatcaaacagaaggcttcttaggaaaattaaatccagaccctcacttccagggtttccagaagttgccatcatcacccctggggtgcagaaaaagtctactgggctcaactgcaattgaggctccttcatctacatgtgttgctcgtgccatcacgagggatggcacgagggaccatcagttccctgcaaaaagacccaggctatcagaaccccagggctccggacgccagggcaattccctgggtgcctcagatggggtggacaacaccgtcagaccgggagaccagggcagctcttcacagcccaactcagaagagagaggagagaacacgtcttacaggatggaagagaaaagtgatttcatgctagaaaaattggaaactaaaagtgtgtagctaggttatttcggagtgttatttatcttcccacttgctctctgtttgtatttttgttttgtttttgattcttgagactgtgaggacttggttgacttctctgcccttaaagtaaatattagtgaaattggttccatcagagataacctcgagttcttggtgtagaaattatgtgaataaagttgctcaattagaatttttagggttctctttgataggcctgtttttctgatgtgtgtgttttttttgggggggggttatttgtttgtttgtttgtttgtttgtttgtttttgagacagtctctctctatcgcccaggctggagtgcggtggcacaatcttggctcactgcaacttccgcctcccgggttcaagcgattcttctgcctcagcctcccgagtagctgggattacaggcgcgcgccaccacgcctggctaatttttgtagttttagtagagacggggtttcaccatattgaccaggctggtctcgagctcctggcctcgtgatccatctgcctcggcctcccaaagtgctgggattataggcgtgagccactgctcccagccgtgtgttcttttttaaatttagatatgtccagagaatcctctctcctgtttcccatttcattcgagaatattgtttgcttgtgagacgtaagttcgagccctgcatgcaatgacccttgaaggaaaataaacagtcctggtggtcccagacgctcctgcagccacagcgcctgtgactcctcatgattcttactgaagctgttgatgacaggatatcatggtgacgtttttgtaatgaaatatttcacatattcagaatacattggtgaaactcatgctggagtaaatagttaatatatggccat

SEQ ID NO: 141216 - DNA, 634 bp, Homo sapiens
  Payload ID: 7737
  Gene Symbol: HJURP
  Gene Name: Holliday junction recognition protein
  ENST ID: ENST00000453122
  CDS Start-End: 36-404
agtccgggttggcgcttgggtactggctgggtccgatgctgggtacgctgcgcgccatggagggcgaggacgtggaagacgaccagctgctgcagaagctcagggccagtcgccgccgcttccagaggcgcatgcagcggctgatagagaagtacaaccagcccttcgaggacaccccggtggtgcaaatggccacgctgacctacgagacgccacagggattgagaatttggggtggaagactaataaaggaaagaaacgaaggagagatccaggactcctccatgaagcccgcggacaggacagatggctccgtgcaagctgcagcctggggtcctgagcttccctcgcaccgcacagtcctgggagccgcctgcagtgcctcaaagccctttgaaaaatgaattaagaaggaaatacttgacccaagtggatatactgctacaaggtgcagagtattttgagtgtgcaggtaacagagctggaagggatgtacgtgtgactccgctgccttcactggcctcacctgccgtgcctgcccccggatactgcagtcgtatctccagaaagagtcctggtgacccagcgaaaccagcttcatctcccagagaatgggatcctttgcatccttcct

SEQ ID NO: 141217 - DNA, 3027 bp, Homo sapiens
  Payload ID: 7737
  Gene Symbol: HJURP
  Gene Name: Holliday junction recognition protein
  Uniprot ID: Q8NCD3
  ENST ID: ENST00000432087
  CDS Start-End: 67-2151
ctatttgagtttgtggcgcgcgaggccctgcagtccgggttggcgcttgggtactggctgggtccgatgctgggtacgctgcgcgccatggagggcgaggacgtggaagacgaccagctgctgcagaagctcagggccagtcgccgccgcttccagaggcgcatgcagcggctgatagagaagtacaaccagcccttcgaggacaccccggtggtgcaaatggccacgctgacctacgagacgccacagggattgagaatttggggtggaagactaataaaggaaagaaacgaaggagagatccagcctgcagtgcctcaaagccctttgaaaaatgaattaagaaggaaatacttgacccaagtggatatactgctacaaggtgcagagtattttgagtgtgcaggtaacagagctggaagggatgtacgtgtgactccgctgccttcactggcctcacctgccgtgcctgcccccggatactgcagtcgtatctccagaaagagtcctggtgacccagcgaaaccagcttcatctcccagagaatgggatcctttgcatccttcctccacagacatggccttagtacctagaaatgacagcctctccctacaagagaccagtagcagcagcttcttaagcagccagccctttgaagatgatgacatttgcaatgtgaccatcagtgacctgtacgcagggatgctgcactccatgagccggctgttgagcacaaagccatcaagcatcatctccaccaaaacgttcatcatgcaaaactggaactccaggaggaggcacagatataagagcaggatgaacaaaacatattgcaaaggagccagacgttctcagaggagctccaaggagaacttcataccctgctctgagcctgtgaaagggacaggggcattaagagattgcaagaacgtattagatgtttcttgccgtaagacaggtttaaaattggaaaaagcttttcttgaagtcaacagaccccaaatccataagttagatccaagttggaaggagcgcaaagtgacaccctcgaagtattcttccttgatttacttcgactccagtgcaacatataatcttgatgaggaaaatagatttaggacattaaaatggttaatttctcctgtaaaaatagtttccagaccaacaatacgacagggccatggagagaaccgtcagagggagattgaaatccgatttgatcagcttcatcgggaatattgcctgagtcccaggaaccagcctcgccggatgtgcctcccggactcctgggccatgaacatgtacagagggggtcctgcgagtcctggtggccttcagggcttagaaacccgcaggctgagtttaccttccagcaaagcaaaagcaaaaagtttaagtgaggcttttgaaaacctaggcaaaagatctctggaagcaggtaggtgcctgcccaagagcgattcatcttcatcacttccaaagaccaaccccacacacagcgcaactcgcccgcagcagacatctgaccttcacgttcagggaaatagttctggaatatttagaaagtcagtgtcacccagcaaaactctttcagtcccagataaagaagtgccaggccacggaaggaatcgttacgatgaaattaaagaagaatttgacaagcttcatcaaaagtattgcctcaaatctcctgggcagatgacagtgcctttatgtattggagtgtctacagataaagcaagtatggaagttcgatatcaaacagaaggcttcttaggaaaattaaatccagaccctcacttccagggtttccagaagttgccatcatcacccctggggtgcagaaaaagtctactgggctcaactgcaattgaggctccttcatctacatgtgttgctcgtgccatcacgagggatggcacgagggaccatcagttccctgcaaaaagacccaggctatcagaaccccagggctccggacgccagggcaattccctgggtgcctcagatggggtggacaacaccgtcagaccgggagaccagggcagctcttcacagcccaactcagaagagagaggagagaacacgtcttacaggatggaagagaaaagtgatttcatgctagaaaaattggaaactaaaagtgtgtagctaggttatttcggagtgttatttatcttcccacttgctctctgtttgtatttttgttttgtttttgattcttgagactgtgaggacttggttgacttctctgcccttaaagtaaatattagtgaaattggttccatcagagataacctcgagttcttggtgtagaaattatgtgaataaagttgctcaattagaatttttagggttctctttgataggcctgtttttctgatgtgtgtgttttttttgggggggggttatttgtttgtttgtttgtttgtttgtttgtttttgagacagtctctctctatcgcccaggctggagtgcggtggcacaatcttggctcactgcaacttccgcctcccgggttcaagcgattcttctgcctcagcctcccgagtagctgggattacaggcgcgcgccaccacgcctggctaatttttgtagttttagtagagacggggtttcaccatattgaccaggctggtctcgagctcctggcctcgtgatccatctgcctcggcctcccaaagtgctgggattataggcgtgagccactgctcccagccgtgtgttcttttttaaatttagatatgtccagagaatcctctctcctgtttcccatttcattcgagaatattgtttgcttgtgagacgtaagttcgagccctgcatgcaatgacccttgaaggaaaataaacagtcctggtggtcccagacgctcctgcagccacagcgcctgtgactcctcatgattcttactgaagctgttgatgacaggatatcatggtgacgtttttgtaatgaaatatttcacatattcagaatacattggtgaaactcatgctggagtaaatagttaatatatggccat

SEQ ID NO: 141218 - DNA, 806 bp, Homo sapiens
  Payload ID: 7737
  Gene Symbol: HJURP
  Gene Name: Holliday junction recognition protein
  ENST ID: ENST00000454020
  CDS Start-End: 1-806
gggcgaggacgtggaagacgaccagctgctgcagaagctcagggccagtcgccgccgcttccagaggcgcatgcagcggctgatagagaagtacaaccagcccttcgaggacaccccggtggtgcaaatggccacgctgacctacgagacgccacagggattgagaatttggggtggaagactaataaaggaaagaaacgaaggagagatccagattcaaaaagcggtgaggtcgatgccacgtcagaccaggaagagtcagttgcttgggccttagcacctgcagtgcctcaaagccctttgaaaaatgaattaagaaggaaatacttgacccaagtggatatactgctacaaggtgcagagtattttgagtgtgcaggtaacagagctggaagggatgtacgtgtgactccgctgccttcactggcctcacctgccgtgcctgcccccggatactgcagtcgtatctccagaaagagtcctggtgacccagcgaaaccagcttcatctcccagagaatgggatcctttgcatccttcctccacagacatggccttagtacctagaaatgacagcctctccctacaagagaccagtagcagcagcttcttaagcagccagccctttgaagatgatgacatttgcaatgtgaccatcagtgacctgtacgcagggatgctgcactccatgagccggctgttgagcacaaagccatcaagcatcatctccaccaaaacgttcatcatgcaaaactggaactccaggaggaggcacagatataagagcaggatgaacaaaacatattg

SEQ ID NO: 141219 - DNA, 3187 bp, Homo sapiens
  Payload ID: 7737
  Gene Symbol: HJURP
  Gene Name: Holliday junction recognition protein
  Uniprot ID: Q8NCD3
  ENST ID: ENST00000411486
  CDS Start-End: 67-2313
ctatttgagtttgtggcgcgcgaggccctgcagtccgggttggcgcttgggtactggctgggtccgatgctgggtacgctgcgcgccatggagggcgaggacgtggaagacgaccagctgctgcagaagctcagggccagtcgccgccgcttccagaggcgcatgcagcggctgatagagaagtacaaccagcccttcgaggacaccccggtggtgcaaatggccacgctgacctacgagacgccacagggattgagaatttggggtggaagactaataaaggaaagaaacgaaggagagatccaggactcctccatgaagcccgcggacaggacagatggctccgtgcaagctgcagcctggggtcctgagcttccctcgcaccgcacagtcctgggagccgattcaaaaagcggtgaggtcgatgccacgtcagaccaggaagagtcagttgcttgggccttagcacctgcagtgcctcaaagccctttgaaaaatgaattaagaaggaaatacttgacccaagtggatatactgctacaaggtgcagagtattttgagtgtgcaggtaacagagctggaagggatgtacgtgtgactccgctgccttcactggcctcacctgccgtgcctgcccccggatactgcagtcgtatctccagaaagagtcctggtgacccagcgaaaccagcttcatctcccagagaatgggatcctttgcatccttcctccacagacatggccttagtacctagaaatgacagcctctccctacaagagaccagtagcagcagcttcttaagcagccagccctttgaagatgatgacatttgcaatgtgaccatcagtgacctgtacgcagggatgctgcactccatgagccggctgttgagcacaaagccatcaagcatcatctccaccaaaacgttcatcatgcaaaactggaactccaggaggaggcacagatataagagcaggatgaacaaaacatattgcaaaggagccagacgttctcagaggagctccaaggagaacttcataccctgctctgagcctgtgaaagggacaggggcattaagagattgcaagaacgtattagatgtttcttgccgtaagacaggtttaaaattggaaaaagcttttcttgaagtcaacagaccccaaatccataagttagatccaagttggaaggagcgcaaagtgacaccctcgaagtattcttccttgatttacttcgactccagtgcaacatataatcttgatgaggaaaatagatttaggacattaaaatggttaatttctcctgtaaaaatagtttccagaccaacaatacgacagggccatggagagaaccgtcagagggagattgaaatccgatttgatcagcttcatcgggaatattgcctgagtcccaggaaccagcctcgccggatgtgcctcccggactcctgggccatgaacatgtacagagggggtcctgcgagtcctggtggccttcagggcttagaaacccgcaggctgagtttaccttccagcaaagcaaaagcaaaaagtttaagtgaggcttttgaaaacctaggcaaaagatctctggaagcaggtaggtgcctgcccaagagcgattcatcttcatcacttccaaagaccaaccccacacacagcgcaactcgcccgcagcagacatctgaccttcacgttcagggaaatagttctggaatatttagaaagtcagtgtcacccagcaaaactctttcagtcccagataaagaagtgccaggccacggaaggaatcgttacgatgaaattaaagaagaatttgacaagcttcatcaaaagtattgcctcaaatctcctgggcagatgacagtgcctttatgtattggagtgtctacagataaagcaagtatggaagttcgatatcaaacagaaggcttcttaggaaaattaaatccagaccctcacttccagggtttccagaagttgccatcatcacccctggggtgcagaaaaagtctactgggctcaactgcaattgaggctccttcatctacatgtgttgctcgtgccatcacgagggatggcacgagggaccatcagttccctgcaaaaagacccaggctatcagaaccccagggctccggacgccagggcaattccctgggtgcctcagatggggtggacaacaccgtcagaccgggagaccagggcagctcttcacagcccaactcagaagagagaggagagaacacgtcttacaggatggaagagaaaagtgatttcatgctagaaaaattggaaactaaaagtgtgtagctaggttatttcggagtgttatttatcttcccacttgctctctgtttgtatttttgttttgtttttgattcttgagactgtgaggacttggttgacttctctgcccttaaagtaaatattagtgaaattggttccatcagagataacctcgagttcttggtgtagaaattatgtgaataaagttgctcaattagaatttttagggttctctttgataggcctgtttttctgatgtgtgtgttttttttgggggggggttatttgtttgtttgtttgtttgtttgtttgtttttgagacagtctctctctatcgcccaggctggagtgcggtggcacaatcttggctcactgcaacttccgcctcccgggttcaagcgattcttctgcctcagcctcccgagtagctgggattacaggcgcgcgccaccacgcctggctaatttttgtagttttagtagagacggggtttcaccatattgaccaggctggtctcgagctcctggcctcgtgatccatctgcctcggcctcccaaagtgctgggattataggcgtgagccactgctcccagccgtgtgttcttttttaaatttagatatgtccagagaatcctctctcctgtttcccatttcattcgagaatattgtttgcttgtgagacgtaagttcgagccctgcatgcaatgacccttgaaggaaaataaacagtcctggtggtcccagacgctcctgcagccacagcgcctgtgactcctcatgattcttactgaagctgttgatgacaggatatcatggtgacgtttttgtaatgaaatatttcacatattcagaatacattggtgaaactcatgctggagtaaatagttaatatatggcc

SEQ ID NO: 141220 - DNA, 6010 bp, Homo sapiens
  Payload ID: 7738
  Gene Symbol: HLCS
  Gene Name: holocarboxylase synthetase (biotin- (proprionyl-CoA-carboxylase ATP-hydrolysing)) ligase)
  Uniprot ID: P50747
  ENST ID: ENST00000336648
  CDS Start-End: 472-2652
acgagagggcgcagcgcggcgcggcagggattcgcgggcgaccacccggcgcaggagcggccgcgtttcggcctcagaatccattgaagacttgaacaagtgggccctatttcttgtgtctccttttatacttgaagcagaacacatagcatttgtgacggagagcatttgggtacaaagtgagaatttacagagatcatcctcttcagaaacagttcggtttttgcccactagggatgatgtggtttctcatgaggttacttgctctaaaggactttatattttggaaccataagagcacccttgtggcccaggcactttatggatgatcccttttagtgctcccagtaaccttccaagattgtcaagtggtcagactgttgtttgccattagcttgcagacctggggatccttatcggctaattgctgaagcaagtgtggacaacttcagcaagctgggggtggcgttcatggaagatagactccacatggataatggactggtaccccaaaagattgtgtcggtgcacttgcaggactccactctgaaggaagttaaggatcaggtctcaaacaagcaagcccagatcctagagccgaagcctgaaccttctcttgagattaagcctgagcaggacggtatggagcatgttggcagagatgacccaaaggctcttggtgaagaacccaaacaaaggagaggcagtgcctctgggagtgagcctgctggggacagtgacaggggagggggccccgttgagcattatcacctccatctgtctagttgccacgagtgtctggaacttgagaacagcaccattgagtcagtcaagtttgcgtctgccgagaacattccagaccttccctacgattatagcagcagtttggagagtgttgctgatgagacctcccccgaaagagaagggaggagagtcaacctcacgggaaaggcacccaacatcctcctctatgtgggctccgactcccaggaagccctcggccggttccacgaggtccggtctgtgctggccgactgtgtggacattgacagttatattctctaccacctgctggaggacagtgctctcagagacccgtggacggacaactgtctgctgttggtcattgctaccagggagtccattcccgaagacctgtaccagaagttcatggcctatctttctcagggagggaaggtgttgggcctgtcttcatccttcacctttggtggctttcaggtgacaagcaagggtgcactgcacaagacagtccagaacttggttttctccaaggctgaccagagcgaggtgaagctcagcgtcttgagcagtggctgcaggtaccaggaaggccccgtccggctcagccccggcaggctccagggccacctggagaatgaggacaaggacaggatgattgtgcatgtgccttttggaactcgcgggggagaagctgttctttgccaggtgcacttagaactacctcccagctccaacatagtgcaaactccagaagattttaacttgctcaagtcaagcaattttagaagatacgaagtccttagagagattctgacaacccttggcctcagctgtgacatgaaacaagttcctgccttaactcctctttacttgctgtcagctgcggaggaaatcagggatcctcttatgcagtggcttgggaaacatgtggactccgagggagaaataaaatccggccagctctctcttagatttgtttcatcctacgtgtctgaagtagaaataaccccatcttgtatacctgtggtgaccaacatggaggccttctcatcagaacatttcaacttagagatctatcgccaaaatctgcagaccaagcagttggggaaagtaattttgtttgccgaagtgacccccacaacgatgcgtctcctggatgggctgatgtttcagacaccgcaggaaatgggcttaatagtgatcgcggcccggcagaccgagggcaaaggacggggagggaatgtgtggctgagccctgtgggatgtgctctttctactctgctcatctccattccactgagatcccagctgggacagaggatcccgtttgtccagcatctgatgtccgtggctgtcgtggaagcagtgaggtccattcccgagtatcaggatatcaacttacgagtgaagtggcccaacgatatttattacagtgacctcatgaagatcggcggagttctggttaactcaacactcatgggagaaacattttatatacttattggctgtggatttaatgtgactaacagtaaccctaccatctgcatcaacgacctcatcacagaatacaataaacaacacaaggcagaactgaagcccttaagagccgattatctcatcgccagagtcgtgactgtgctggagaaactgatcaaagagtttcaggacaaagggcccaacagcgtccttcccctttattaccgatactgggtccacagtggtcagcaagtccatctgggcagcgcagagggaccaaaggtgtccatcgttggcctggacgattctggcttcctccaggttcaccaggagggcggcgaggttgtgactgtgcacccggacggcaactccttcgacatgctgagaaacctcatcctccccaaacggcggtaatgccgggcgtccccgagacgcggctgcctgtccgtgcccatgcatctggaaatctaatttagagttgtaggtgaattttcttttcctccaattcatttgttaagtctttgttctttttctgtgtttctgtttgtttttaggtttgttttgttgtcgttttctttggtgtttgaagaggctctgggatagatggttaagaagtagaaaatttagtttagggaaagccctcccacaggtgggaaattgctctcccctctgtggcttggacttacgtttattgtcaaggggagtttttacatggaaatgacaatgggaaaattcagatattttcttagtagtgcagacctttacccctagtctatgaaaaaacaaaccaaaatatgctcttgcgcccaggccagtggtgagttagaggtatgctatcactgtttgtaagcatctggggaggtactgaactgtaagaacatgcttggacacttagtcattgttctgtgtttttattaatgaagaaaagggaagacagacttccaagagttactgtccacccggtggtgtggccccatagcgaagtctaaatgcctgtagagatagagctagctggtgtggttgcagtgaccttgtagaggaaatcagttcattactttgacatcattcagtgagctctcctttcctaaggaagtttaaatgtccttagttagggactgactttcttaagtaagtttaaatttactacatattgtgaagagacaggatcaagttcagaatccttaaatgtctgattaggcatcacttggatgaggaggtgggcgatttggctctgacagctggagatgaaggcacactcataccacatacaagggaggatttggagcttttaagccagtttcagatttactctgaaatgtggagcattcctgcaagactgtgcagctcacggaatatagaagacatggcattttactcagaagtcataagtttttgcccccctcatttacctcgtattaccaagaaagaaaatgttatcgatactaaacaccatcagttcagagggaggatgtgtgtgtgtgcccgcatatgtgtgtgcgtgcgtgtgtgcgcacatagctttaaaagaagacattcaaaatttgatgtgctacaagcctcatgaaagaacaaaagaaatgaagccttttgatatgcattcgctattcccagatgtacgccatgccttttccatgtccctcctatctctgttgaacttatgaatcatactcattacttttcagctttttaaaaggccaatttttgtccagttttctctcttccagtcccagctgaaattagtggaaagaaagtttgatggagctttcagctttgaacaaaatcccttcattgtaaactagcaccatctttatccaggtcttacccagtcaggctaattccagaaacttgtggtttttagtatagtctgtctacctttagccaggcacaggacagccctatgaaaaaatacccaatatatattttttggaaatgaaacattaaaagaacttaaaaagtaatttttggaaatgaggcttcaattagaattatttttctcaaaaaacaaacaaacaaaaaacacaaaaaaaaccactcttctccaaatgcccaagccttctttcaaaattagttagaaacttaagtaaaatacaagtccacaccatccccaaattacaaaatggacttacccttgagagggcatctgcagaatatcatcagggacaaagatctcgaggctaacgatgtaggtttcatttctcagactttgtaatataaggcaagccctctctcagagctgccatcatcactttttgaatttctttgggggttatttaatgaaaaacatgctatgttttgttttaagctgaagtcctattctggacactctgctttgggaaaaaatgttatcatttaatttcctttctgcaaattaaaactaatgaagtgtggccttgtcaaaggctatggagatgttccgggcatactgctgtgctctgtgctttccagcaggcgctcctccctcacgcaggagactcagttgtcctgagagagatgaagcagccttgaagcagatgctgcgttttccataaacctgattttgcctcacatgaaccaaagactctcaaaactccgcttctatagaattagctgaataaaggcattttactgatagctgttcgtgttagcgaaacctgtctacctgctatagcacactctccgatttgggccatttatgcaccccgcaacctgggatctcaaggagctttaaagtcttaatgggaacttggcattttcctgatgatctttaaaatgtggtcactaaactcaggattggcgtgtgcttttagaacactggagtagcccttgttttagaggctgtgcattgagtatcgaccgtattttgtaaaaggcaagatatcctcccttccaggctggtaacgggtttcaaggggactcttgaggaagtgccccctaaaatagaacacagcaataactgggcttcctgtccccacccccaccccagcagtgctctctggcactgggaactctgctagggagtggtggaagtaggaaggatttgtgtgcaaaggaaaatcgtggttgagtttcactgcagcaggctgacgttgcctgatgtgagagcaagtggccgactggggtgcgggtgcacaggtcgggggagcacaggccacagagcgcagcctctgggggtcccccaaggcacagcatatacagcatggtcgccccttgccctggagtctgggaacaaagagaggagccagcctccccgcactgcttcagatggaaaagggaggcagggtgggcttccgttctccagatctgtttgctcttaacaggcagaacatgggagaatccttattcctggttaatcactatgcatatttgaaataaaagaaagcgtaagcctctgcaattttaacttctcaaaggatgtctctgaaaagaatcactttaaaccaatgcctataaaaagcaagtctaccaaaataaactaagactttctatgtggtttgggctccctcttatttttacaagtttcatttttaaaagtaggcaactactttgggttacagtatttttattcatatttaaacatttttacaaaataaataaagtgttttacatagtaaggaatatgtacgtatttccaagtattaagaagccaagtgtttttttttttgacgtattattgacaaatgtattcagcgccatacacaagagaaatattattactccaaagaacgaaagttaacaaaactccaaagcaaaaacccttttaatggaggtgagaaataaatttaatgtaacaaca

SEQ ID NO: 141221 - DNA, 6466 bp, Homo sapiens
  Payload ID: 7738
  Gene Symbol: HLCS
  Gene Name: holocarboxylase synthetase (biotin- (proprionyl-CoA-carboxylase (ATP-hydrolysing)) ligase)
  Uniprot ID: P50747
  ENST ID: ENST00000399120
  CDS Start-End: 1232-3412
ggccgcgtcttctgcgtcagcgacagccagtccattgaagacttgaacaagtgggccctatttcttgtgtctccttttatacttgaagcagaacacatagcatttgtgacggagagcatttgggtacaaagtgagaatttacagagatcatcctcttcagaaacaacggagtgtcgttctgtcgtccaggctggagtgcagtggtgtggtctcggctcaccacaacctctgcctactgggttccagtgattctcctgcctcagcatcccgagtagctgggactacaggtgcacgctaccatgcccggctaatttttgtatttttagtagaggcgggggtttcaccatgccatccaggctggtttcgaactcctgacctcgtgatccacctgtctcggcctcccaaagtgctgggattacaggtgtgagccaccgcgcctggccctgtattttcaaattctttacctctgcgtttccagccttgctccatccaatttgttactagagctttttaacaatttcacgttgaattaagatgatttggaagaggagaaacaagagtcagaaaaattagcagcatccgtgatctgactctgggtaccagtgggttgttgagatttctgttccccactcactgcagagctgctgcctgccaatgccccctgttgggcagggccacctgtgctagtttaacctggggtctttcactcccggactgcttcttggatgtgagttttaagttgagcagagaagatatgccttgcctgctgccatacattgtaacatcaagtcaagagctttagttacttaacagatttctgctggctgctattataggaggaaactcctttgtttagggacagccagggcttccttagctttgatctttgggagtgagccttttgcttgacttcccttctcttttccatgcctttgtttccatctcgaagtgcaaatttaaagtgtcctgtttgcctttatccactggaaggcaaacaccctggacgacgtatcagtgacagcgcggttctgctttgatcggagcacccagcgctgcttgaaggcgtttgcatggtccatggctcatggaccacgctcctagaaaacggaaatgcacttagattgtcaagtggtcagactgttgtttgccattagcttgcagacctggggatccttatcggctaattgctgaagcaagtgtggacaacttcagcaagctgggggtggcgttcatggaagatagactccacatggataatggactggtaccccaaaagattgtgtcggtgcacttgcaggactccactctgaaggaagttaaggatcaggtctcaaacaagcaagcccagatcctagagccgaagcctgaaccttctcttgagattaagcctgagcaggacggtatggagcatgttggcagagatgacccaaaggctcttggtgaagaacccaaacaaaggagaggcagtgcctctgggagtgagcctgctggggacagtgacaggggagggggccccgttgagcattatcacctccatctgtctagttgccacgagtgtctggaacttgagaacagcaccattgagtcagtcaagtttgcgtctgccgagaacattccagaccttccctacgattatagcagcagtttggagagtgttgctgatgagacctcccccgaaagagaagggaggagagtcaacctcacgggaaaggcacccaacatcctcctctatgtgggctccgactcccaggaagccctcggccggttccacgaggtccggtctgtgctggccgactgtgtggacattgacagttatattctctaccacctgctggaggacagtgctctcagagacccgtggacggacaactgtctgctgttggtcattgctaccagggagtccattcccgaagacctgtaccagaagttcatggcctatctttctcagggagggaaggtgttgggcctgtcttcatccttcacctttggtggctttcaggtgacaagcaagggtgcactgcacaagacagtccagaacttggttttctccaaggctgaccagagcgaggtgaagctcagcgtcttgagcagtggctgcaggtaccaggaaggccccgtccggctcagccccggcaggctccagggccacctggagaatgaggacaaggacaggatgattgtgcatgtgccttttggaactcgcgggggagaagctgttctttgccaggtgcacttagaactacctcccagctccaacatagtgcaaactccagaagattttaacttgctcaagtcaagcaattttagaagatacgaagtccttagagagattctgacaacccttggcctcagctgtgacatgaaacaagttcctgccttaactcctctttacttgctgtcagctgcggaggaaatcagggatcctcttatgcagtggcttgggaaacatgtggactccgagggagaaataaaatccggccagctctctcttagatttgtttcatcctacgtgtctgaagtagaaataaccccatcttgtatacctgtggtgaccaacatggaggccttctcatcagaacatttcaacttagagatctatcgccaaaatctgcagaccaagcagttggggaaagtaattttgtttgccgaagtgacccccacaacgatgcgtctcctggatgggctgatgtttcagacaccgcaggaaatgggcttaatagtgatcgcggcccggcagaccgagggcaaaggacggggagggaatgtgtggctgagccctgtgggatgtgctctttctactctgctcatctccattccactgagatcccagctgggacagaggatcccgtttgtccagcatctgatgtccgtggctgtcgtggaagcagtgaggtccattcccgagtatcaggatatcaacttacgagtgaagtggcccaacgatatttattacagtgacctcatgaagatcggcggagttctggttaactcaacactcatgggagaaacattttatatacttattggctgtggatttaatgtgactaacagtaaccctaccatctgcatcaacgacctcatcacagaatacaataaacaacacaaggcagaactgaagcccttaagagccgattatctcatcgccagagtcgtgactgtgctggagaaactgatcaaagagtttcaggacaaagggcccaacagcgtccttcccctttattaccgatactgggtccacagtggtcagcaagtccatctgggcagcgcagagggaccaaaggtgtccatcgttggcctggacgattctggcttcctccaggttcaccaggagggcggcgaggttgtgactgtgcacccggacggcaactccttcgacatgctgagaaacctcatcctccccaaacggcggtaatgccgggcgtccccgagacgcggctgcctgtccgtgcccatgcatctggaaatctaatttagagttgtaggtgaattttcttttcctccaattcatttgttaagtctttgttctttttctgtgtttctgtttgtttttaggtttgttttgttgtcgttttctttggtgtttgaagaggctctgggatagatggttaagaagtagaaaatttagtttagggaaagccctcccacaggtgggaaattgctctcccctctgtggcttggacttacgtttattgtcaaggggagtttttacatggaaatgacaatgggaaaattcagatattttcttagtagtgcagacctttacccctagtctatgaaaaaacaaaccaaaatatgctcttgcgcccaggccagtggtgagttagaggtatgctatcactgtttgtaagcatctggggaggtactgaactgtaagaacatgcttggacacttagtcattgttctgtgtttttattaatgaagaaaagggaagacagacttccaagagttactgtccacccggtggtgtggccccatagcgaagtctaaatgcctgtagagatagagctagctggtgtggttgcagtgaccttgtagaggaaatcagttcattactttgacatcattcagtgagctctcctttcctaaggaagtttaaatgtccttagttagggactgactttcttaagtaagtttaaatttactacatattgtgaagagacaggatcaagttcagaatccttaaatgtctgattaggcatcacttggatgaggaggtgggcgatttggctctgacagctggagatgaaggcacactcataccacatacaagggaggatttggagcttttaagccagtttcagatttactctgaaatgtggagcattcctgcaagactgtgcagctcacggaatatagaagacatggcattttactcagaagtcataagtttttgcccccctcatttacctcgtattaccaagaaagaaaatgttatcgatactaaacaccatcagttcagagggaggatgtgtgtgtgtgcccgcatatgtgtgtgcgtgcgtgtgtgcgcacatagctttaaaagaagacattcaaaatttgatgtgctacaagcctcatgaaagaacaaaagaaatgaagccttttgatatgcattcgctattcccagatgtacgccatgccttttccatgtccctcctatctctgttgaacttatgaatcatactcattacttttcagctttttaaaaggccaatttttgtccagttttctctcttccagtcccagctgaaattagtggaaagaaagtttgatggagctttcagctttgaacaaaatcccttcattgtaaactagcaccatctttatccaggtcttacccagtcaggctaattccagaaacttgtggtttttagtatagtctgtctacctttagccaggcacaggacagccctatgaaaaaatacccaatatatattttttggaaatgaaacattaaaagaacttaaaaagtaatttttggaaatgaggcttcaattagaattatttttctcaaaaaacaaacaaacaaaaaacacaaaaaaaaccactcttctccaaatgcccaagccttctttcaaaattagttagaaacttaagtaaaatacaagtccacaccatccccaaattacaaaatggacttacccttgagagggcatctgcagaatatcatcagggacaaagatctcgaggctaacgatgtaggtttcatttctcagactttgtaatataaggcaagccctctctcagagctgccatcatcactttttgaatttctttgggggttatttaatgaaaaacatgctatgttttgttttaagctgaagtcctattctggacactctgctttgggaaaaaatgttatcatttaatttcctttctgcaaattaaaactaatgaagtgtggccttgtcaaaggctatggagatgttccgggcatactgctgtgctctgtgctttccagcaggcgctcctccctcacgcaggagactcagttgtcctgagagagatgaagcagccttgaagcagatgctgcgttttccataaacctgattttgcctcacatgaaccaaagactctcaaaactccgcttctatagaattagctgaataaaggcattttactgatagctgttcgtgttagcgaaacctgtctacctgctatagcacactctccgatttgggccatttatgcaccccgcaacctgggatctcaaggagctttaaagtcttaatgggaacttggcattttcctgatgatctttaaaatgtggtcactaaactcaggattggcgtgtgcttttagaacactggagtagcccttgttttagaggctgtgcattgagtatcgaccgtattttgtaaaaggcaagatatcctcccttccaggctggtaacgggtttcaaggggactcttgaggaagtgccccctaaaatagaacacagcaataactgggcttcctgtccccacccccaccccagcagtgctctctggcactgggaactctgctagggagtggtggaagtaggaaggatttgtgtgcaaaggaaaatcgtggttgagtttcactgcagcaggctgacgttgcctgatgtgagagcaagtggccgactggggtgcgggtgcacaggtcgggggagcacaggccacagagcgcagcctctgggggtcccccaaggcacagcatatacagcatggtcgccccttgccctggagtctgggaacaaagagaggagccagcctccccgcactgcttcagatggaaaagggaggcagggtgggcttccgttctccagatctgtttgctcttaacaggcagaacatgggagaatccttattcctggttaatcactatgcatatttgaaataaaagaaagcgtaagcctctgcaattttaacttctcaaaggatgtctctgaaaagaatcactttaaaccaatgcctataaaaagcaagtctaccaaaataaactaagactttctatgtg

SEQ ID NO: 141222 - DNA, 780 bp, Homo sapiens
  Payload ID: 7738
  Gene Symbol: HLCS
  Gene Name: holocarboxylase synthetase (biotin- (proprionyl-CoA-carboxylase (ATP-hydrolysing)) ligase)
  ENST ID: ENST00000448340
  CDS Start-End: 504-780
ggccgcccggggctctggggactcgggtgtccaggtgccgaagtcgccgcttccacgggggactcaggcccgtgagtgggtttcctaagaacttaccagattccacggctcgggtttcctgccttggatcctgctttttattccccagggggagttatttatagacaggaatcgtgtgttcaaggcctggctcttcggactcggcgtttttcttgttcgaggtgcttcaatgggggctggatgccatcatcttccagtccattgaagacttgaacaagtgggccctatttcttgtgtctccttttatacttgaagcagaacacatagcatttgtgacggagagcatttgggtacaaagtgagaatttacagagatcatcctcttcagaaacaattgtcaagtggtcagactgttgtttgccattagcttgcagacctggggatccttatcggctaattgctgaagcaagtgtggacaacttcagcaagctgggggtggcgttcatggaagatagactccacatggataatggactggtaccccaaaagattgtgtcggtgcacttgcaggactccactctgaaggaagttaaggatcaggtctcaaacaagcaagcccagatcctagagccgaagcctgaaccttctcttgagattaagcctgagcaggacggtatggagcatgttggcagagatgacccaaaggctcttggtgaagaacccaaacaaaggagaggcagtgcctctgggagtgagcctgctggggacagtgacaggggag

SEQ ID NO: 141223 - DNA, 702 bp, Homo sapiens
  Payload ID: 7738
  Gene Symbol: HLCS
  Gene Name: holocarboxylase synthetase (biotin- (proprionyl-CoA-carboxylase (ATP-hydrolysing)) ligase)
  ENST ID: ENST00000419461
  CDS Start-End: 443-702
catgctcatcacgctgtgctacctgtacctgtgggcgcgctggggtcgccggccggctgagctcgtgcgcgccacggtgcggcggctgcgtgcctcgcgctgttccttcaccttctgcggcgcggccgcgcagcccccgggcgcccgcgtgtgcctgagccgtggcggccgcgtcttctgcgtcagcgacagccagtccattgaagacttgaacaagtgggccctatttcttgtgtctccttttatacttgaagcagaacacatagcatttgtgacggagagcatttgggtacaaagtgagaatttacagagatcatcctcttcagaaacaattgtcaagtggtcagactgttgtttgccattagcttgcagacctggggatccttatcggctaattgctgaagcaagtgtggacaacttcagcaagctgggggtggcgttcatggaagatagactccacatggataatggactggtaccccaaaagattgtgtcggtgcacttgcaggactccactctgaaggaagttaaggatcaggtctcaaacaagcaagcccagatcctagagccgaagcctgaaccttctcttgagattaagcctgagcaggacggtatggagcatgttggcagagatgacccaaaggctcttggtgaagaacccaaacaaaggagaggcagtgcctctgggagtgagcctgctgg

SEQ ID NO: 141224 - DNA, 666 bp, Homo sapiens
  Payload ID: 7738
  Gene Symbol: HLCS
  Gene Name: holocarboxylase synthetase (biotin- (proprionyl-CoA-carboxylase (ATP-hydrolysing)) ligase)
  ENST ID: ENST00000427746
  CDS Start-End: 436-666
agcgcggcgcggcagggattcgcgggcgaccacccggcgcaggagcggccgcgtttcggcctcagaatccattgaagacttgaacaagtgggccctatttcttgtgtctccttttatacttgaagcagaacacatagcatttgtgacggagagcatttgggtacaaagtgagaatttacagagatcatcctcttcagaaacaacggagtgtcgttctgtcgtccaggctggagtgcagtggtgtggtctcggctcaccacaacctctgcctactgggttccagtgattctcctgcctcagcatcccgagtagctgggactacagattgtcaagtggtcagactgttgtttgccattagcttgcagacctggggatccttatcggctaattgctgaagcaagtgtggacaacttcagcaagctgggggtggcgttcatggaagatagactccacatggataatggactggtaccccaaaagattgtgtcggtgcacttgcaggactccactctgaaggaagttaaggatcaggtctcaaacaagcaagcccagatcctagagccgaagcctgaaccttctcttgagattaagcctgagcaggacggtatggagcatgttggcagagatgacccaaaggctcttggtgaagaacccaaacaaaggaga

SEQ ID NO: 141225 - DNA, 6112 bp, Homo sapiens
  Payload ID: 7738
  Gene Symbol: HLCS
  Gene Name: holocarboxylase synthetase (biotin- (proprionyl-CoA-carboxylase (ATP-hydrolysing)) ligase)
  Uniprot ID: P50747
  ENST ID: ENST00000612277
  CDS Start-End: 574-2754
gtgctggcgaggcagggcctgagcagccagtggagaagggcagcgggaagtgcgctgtgcaggagccagacgtctcagcccgtgtggccagaggtggcaggggcgcggcctgagcggggctggggcgcgggcaggatttggggctgcgccgaggggcgtcccgacctggccctttgccacgtccattgaagacttgaacaagtgggccctatttcttgtgtctccttttatacttgaagcagaacacatagcatttgtgacggagagcatttgggtacaaagtgagaatttacagagatcatcctcttcagaaacagttcggtttttgcccactagggatgatgtggtttctcatgaggttacttgctctaaaggactttatattttggaaccataagagcacccttgtggcccaggcactttatggatgatcccttttagtgctcccagtaaccttccaagattgtcaagtggtcagactgttgtttgccattagcttgcagacctggggatccttatcggctaattgctgaagcaagtgtggacaacttcagcaagctgggggtggcgttcatggaagatagactccacatggataatggactggtaccccaaaagattgtgtcggtgcacttgcaggactccactctgaaggaagttaaggatcaggtctcaaacaagcaagcccagatcctagagccgaagcctgaaccttctcttgagattaagcctgagcaggacggtatggagcatgttggcagagatgacccaaaggctcttggtgaagaacccaaacaaaggagaggcagtgcctctgggagtgagcctgctggggacagtgacaggggagggggccccgttgagcattatcacctccatctgtctagttgccacgagtgtctggaacttgagaacagcaccattgagtcagtcaagtttgcgtctgccgagaacattccagaccttccctacgattatagcagcagtttggagagtgttgctgatgagacctcccccgaaagagaagggaggagagtcaacctcacgggaaaggcacccaacatcctcctctatgtgggctccgactcccaggaagccctcggccggttccacgaggtccggtctgtgctggccgactgtgtggacattgacagttatattctctaccacctgctggaggacagtgctctcagagacccgtggacggacaactgtctgctgttggtcattgctaccagggagtccattcccgaagacctgtaccagaagttcatggcctatctttctcagggagggaaggtgttgggcctgtcttcatccttcacctttggtggctttcaggtgacaagcaagggtgcactgcacaagacagtccagaacttggttttctccaaggctgaccagagcgaggtgaagctcagcgtcttgagcagtggctgcaggtaccaggaaggccccgtccggctcagccccggcaggctccagggccacctggagaatgaggacaaggacaggatgattgtgcatgtgccttttggaactcgcgggggagaagctgttctttgccaggtgcacttagaactacctcccagctccaacatagtgcaaactccagaagattttaacttgctcaagtcaagcaattttagaagatacgaagtccttagagagattctgacaacccttggcctcagctgtgacatgaaacaagttcctgccttaactcctctttacttgctgtcagctgcggaggaaatcagggatcctcttatgcagtggcttgggaaacatgtggactccgagggagaaataaaatccggccagctctctcttagatttgtttcatcctacgtgtctgaagtagaaataaccccatcttgtatacctgtggtgaccaacatggaggccttctcatcagaacatttcaacttagagatctatcgccaaaatctgcagaccaagcagttggggaaagtaattttgtttgccgaagtgacccccacaacgatgcgtctcctggatgggctgatgtttcagacaccgcaggaaatgggcttaatagtgatcgcggcccggcagaccgagggcaaaggacggggagggaatgtgtggctgagccctgtgggatgtgctctttctactctgctcatctccattccactgagatcccagctgggacagaggatcccgtttgtccagcatctgatgtccgtggctgtcgtggaagcagtgaggtccattcccgagtatcaggatatcaacttacgagtgaagtggcccaacgatatttattacagtgacctcatgaagatcggcggagttctggttaactcaacactcatgggagaaacattttatatacttattggctgtggatttaatgtgactaacagtaaccctaccatctgcatcaacgacctcatcacagaatacaataaacaacacaaggcagaactgaagcccttaagagccgattatctcatcgccagagtcgtgactgtgctggagaaactgatcaaagagtttcaggacaaagggcccaacagcgtccttcccctttattaccgatactgggtccacagtggtcagcaagtccatctgggcagcgcagagggaccaaaggtgtccatcgttggcctggacgattctggcttcctccaggttcaccaggagggcggcgaggttgtgactgtgcacccggacggcaactccttcgacatgctgagaaacctcatcctccccaaacggcggtaatgccgggcgtccccgagacgcggctgcctgtccgtgcccatgcatctggaaatctaatttagagttgtaggtgaattttcttttcctccaattcatttgttaagtctttgttctttttctgtgtttctgtttgtttttaggtttgttttgttgtcgttttctttggtgtttgaagaggctctgggatagatggttaagaagtagaaaatttagtttagggaaagccctcccacaggtgggaaattgctctcccctctgtggcttggacttacgtttattgtcaaggggagtttttacatggaaatgacaatgggaaaattcagatattttcttagtagtgcagacctttacccctagtctatgaaaaaacaaaccaaaatatgctcttgcgcccaggccagtggtgagttagaggtatgctatcactgtttgtaagcatctggggaggtactgaactgtaagaacatgcttggacacttagtcattgttctgtgtttttattaatgaagaaaagggaagacagacttccaagagttactgtccacccggtggtgtggccccatagcgaagtctaaatgcctgtagagatagagctagctggtgtggttgcagtgaccttgtagaggaaatcagttcattactttgacatcattcagtgagctctcctttcctaaggaagtttaaatgtccttagttagggactgactttcttaagtaagtttaaatttactacatattgtgaagagacaggatcaagttcagaatccttaaatgtctgattaggcatcacttggatgaggaggtgggcgatttggctctgacagctggagatgaaggcacactcataccacatacaagggaggatttggagcttttaagccagtttcagatttactctgaaatgtggagcattcctgcaagactgtgcagctcacggaatatagaagacatggcattttactcagaagtcataagtttttgcccccctcatttacctcgtattaccaagaaagaaaatgttatcgatactaaacaccatcagttcagagggaggatgtgtgtgtgtgcccgcatatgtgtgtgcgtgcgtgtgtgcgcacatagctttaaaagaagacattcaaaatttgatgtgctacaagcctcatgaaagaacaaaagaaatgaagccttttgatatgcattcgctattcccagatgtacgccatgccttttccatgtccctcctatctctgttgaacttatgaatcatactcattacttttcagctttttaaaaggccaatttttgtccagttttctctcttccagtcccagctgaaattagtggaaagaaagtttgatggagctttcagctttgaacaaaatcccttcattgtaaactagcaccatctttatccaggtcttacccagtcaggctaattccagaaacttgtggtttttagtatagtctgtctacctttagccaggcacaggacagccctatgaaaaaatacccaatatatattttttggaaatgaaacattaaaagaacttaaaaagtaatttttggaaatgaggcttcaattagaattatttttctcaaaaaacaaacaaacaaaaaacacaaaaaaaaccactcttctccaaatgcccaagccttctttcaaaattagttagaaacttaagtaaaatacaagtccacaccatccccaaattacaaaatggacttacccttgagagggcatctgcagaatatcatcagggacaaagatctcgaggctaacgatgtaggtttcatttctcagactttgtaatataaggcaagccctctctcagagctgccatcatcactttttgaatttctttgggggttatttaatgaaaaacatgctatgttttgttttaagctgaagtcctattctggacactctgctttgggaaaaaatgttatcatttaatttcctttctgcaaattaaaactaatgaagtgtggccttgtcaaaggctatggagatgttccgggcatactgctgtgctctgtgctttccagcaggcgctcctccctcacgcaggagactcagttgtcctgagagagatgaagcagccttgaagcagatgctgcgttttccataaacctgattttgcctcacatgaaccaaagactctcaaaactccgcttctatagaattagctgaataaaggcattttactgatagctgttcgtgttagcgaaacctgtctacctgctatagcacactctccgatttgggccatttatgcaccccgcaacctgggatctcaaggagctttaaagtcttaatgggaacttggcattttcctgatgatctttaaaatgtggtcactaaactcaggattggcgtgtgcttttagaacactggagtagcccttgttttagaggctgtgcattgagtatcgaccgtattttgtaaaaggcaagatatcctcccttccaggctggtaacgggtttcaaggggactcttgaggaagtgccccctaaaatagaacacagcaataactgggcttcctgtccccacccccaccccagcagtgctctctggcactgggaactctgctagggagtggtggaagtaggaaggatttgtgtgcaaaggaaaatcgtggttgagtttcactgcagcaggctgacgttgcctgatgtgagagcaagtggccgactggggtgcgggtgcacaggtcgggggagcacaggccacagagcgcagcctctgggggtcccccaaggcacagcatatacagcatggtcgccccttgccctggagtctgggaacaaagagaggagccagcctccccgcactgcttcagatggaaaagggaggcagggtgggcttccgttctccagatctgtttgctcttaacaggcagaacatgggagaatccttattcctggttaatcactatgcatatttgaaataaaagaaagcgtaagcctctgcaattttaacttctcaaaggatgtctctgaaaagaatcactttaaaccaatgcctataaaaagcaagtctaccaaaataaactaagactttctatgtggtttgggctccctcttatttttacaagtttcatttttaaaagtaggcaactactttgggttacagtatttttattcatatttaaacatttttacaaaataaataaagtgttttacatagtaaggaatatgtacgtatttccaagtattaagaagccaagtgtttttttttttgacgtattattgacaaatgtattcagcgccatacacaagagaaatattattactccaaagaacgaaagttaacaaaactccaaagcaaaaacccttttaatggaggtgagaaataaatttaatgtaacaaca

SEQ ID NO: 141226 - DNA, 2277 bp, Homo sapiens
  Payload ID: 7739
  Gene Symbol: HCCS
  Gene Name: holocytochrome c synthase
  Uniprot ID: P53701
  ENST ID: ENST00000321143
  CDS Start-End: 203-1009
gtgcgtgagaacgccggcggtgaccgcagccacagcggtgaccgagtgagaggaaggcggcggcggcggcggcggcggcgtgaagtcactgctgctctgggttcgggttggcgactgaaggcggtaccggcctcccggaacagcccgggggagggcttaggtggaaatttaaaattgtttacagtcaacactgtttccagccatgggtttgtctccatctgctcctgctgttgcagttcaggcctcaaatgcttcagcgtccccaccttcaggatgcccgatgcatgaagggaaaatgaaaggctgtccagtgaatacagagccatctggcccaacctgtgagaagaaaacatactctgtgcctgcccaccaggaacgcgcctatgagtacgtggagtgtcccattaggggcactgcggctgagaataaggagaacctagatccttcaaatctgatgccaccaccaaatcaaacaccagctccagatcagccatttgcattgtctactgtcagagaagagtcatccattccgagagcagattcagagaaaaagtgggtttacccttctgagcagatgttctggaatgcaatgttaaagaaagggtggaagtggaaggatgaggatatcagtcagaaggatatgtataatatcattagaattcacaatcagaataacgagcaggcttggaaggagattttgaagtgggaagcccttcatgctgcagagtgtccttgtggtccatcattgatccggtttggagggaaagcaaaagagtattcaccaagggcacgaattcgttcctggatggggtatgagttgccttttgataggcacgattggatcataaaccgttgcgggacagaagttagatatgtgattgattattatgatggtggtgaagtcaacaaggactaccagttcaccatcctggacgtccgtcctgccttagattcactttcggcagtatgggacagaatgaaagtcgcttggtggcgttggacctcgtaaagcactgtttcagatggaaaaatataaactatttttttctgagcgatacattaaactattttccccagattgaattgcactcatgatgtaatgggaacttcaagtgggtaatcacactttttccttcacttaacgaaggatactatgcactgttcacttttgacttgtgttgtaccttgcagtttatagcagatcattttgttttcttcctacttagcttaagtgggaagcagtctctcagtttttcctttacctgcagtattgtctgtatatttcatctcgaaaagcctgaacaacctctgaaaaagagcttttaaaaagtgatgaaagttgcttttttttcttactattttctcaggaatactccagagatgtaaagcctgagagtccatggtgatgctcaagagctttcatctggccaaatattttaactaaagctgttcattataaataagaggtgattataccttttttaaaaaaagttaccattatttctaaagcccctatggtatgattgtgacctttaacaaaatgcaaaggtatacactggaaaggtactcagcaaaattctctccaaattctgatttatatgaatttcttggactggatagagtactttcaactataccttcctttggaacataccttttaaaaaatgttccctttaaatcctgttattctaatatgtaactctgctcccaacaaacaggtctcctcattgtccttggcatttgacaagttatcccaacttcgaatctcatttcttcctttgctggcagcctccacccttccccacatcagtcggcctaatccaaaccttgaaagcctggcttaagtcccagtatcagtgatggtccccctctaaaacatgattttatatttggctgagtgttaaaattcacaagatgagcatttttttcccagatggagaacgcttcaactcagtctagattttttttgtttgttttaaggaagctctaagtttgccattgaaactttttgtaccagtaatccataaactggttgttctatttatagcagcatgttacaaatgactgctttttttttttaactgtctatactattaaatcctttaatttatcctgaatgctgtagtgttaaattagtggatgaaattggcagtctgtgggtgattaatttggtatggatttgtcagttttgtgtggagtttaagaaatagaacagccttaaactctacatttcaaaatacttgtatattttaaaataaagctgattagttcacaggt

SEQ ID NO: 141227 - DNA, 1072 bp, Homo sapiens
  Payload ID: 7739
  Gene Symbol: HCCS
  Gene Name: holocytochrome c synthase
  Uniprot ID: P53701
  ENST ID: ENST00000380762
  CDS Start-End: 197-1003
ggcggcggcggcggcgtgaagtcactgctgctctgggttcgggttggcgactgaaggcggtaccggcctcccggaacagcccgggggagggcttaggtgcagaagggcaggctggccgcggccggtttggtctggggaccacgggctggagcaggtggaaatttaaaattgtttacagtcaacactgtttccagccatgggtttgtctccatctgctcctgctgttgcagttcaggcctcaaatgcttcagcgtccccaccttcaggatgcccgatgcatgaagggaaaatgaaaggctgtccagtgaatacagagccatctggcccaacctgtgagaagaaaacatactctgtgcctgcccaccaggaacgcgcctatgagtacgtggagtgtcccattaggggcactgcggctgagaataaggagaacctagatccttcaaatctgatgccaccaccaaatcaaacaccagctccagatcagccatttgcattgtctactgtcagagaagagtcatccattccgagagcagattcagagaaaaagtgggtttacccttctgagcagatgttctggaatgcaatgttaaagaaagggtggaagtggaaggatgaggatatcagtcagaaggatatgtataatatcattagaattcacaatcagaataacgagcaggcttggaaggagattttgaagtgggaagcccttcatgctgcagagtgtccttgtggtccatcattgatccggtttggagggaaagcaaaagagtattcaccaagggcacgaattcgttcctggatggggtatgagttgccttttgataggcacgattggatcataaaccgttgcgggacagaagttagatatgtgattgattattatgatggtggtgaagtcaacaaggactaccagttcaccatcctggacgtccgtcctgccttagattcactttcggcagtatgggacagaatgaaagtcgcttggtggcgttggacctcgtaaagcactgtttcagatggaaaaatataaactatttttttctgagcgatacattaaactattttccccaga

SEQ ID NO: 141228 - DNA, 1000 bp, Homo sapiens
  Payload ID: 7739
  Gene Symbol: HCCS
  Gene Name: holocytochrome c synthase
  Uniprot ID: P53701
  ENST ID: ENST00000380763
  CDS Start-End: 125-931
ccgagtgagaggaaggcggcggcggcggcggcggcggcgtgaagtcactgctgctctgggttcgggttggcgactgaaggcggtggaaatttaaaattgtttacagtcaacactgtttccagccatgggtttgtctccatctgctcctgctgttgcagttcaggcctcaaatgcttcagcgtccccaccttcaggatgcccgatgcatgaagggaaaatgaaaggctgtccagtgaatacagagccatctggcccaacctgtgagaagaaaacatactctgtgcctgcccaccaggaacgcgcctatgagtacgtggagtgtcccattaggggcactgcggctgagaataaggagaacctagatccttcaaatctgatgccaccaccaaatcaaacaccagctccagatcagccatttgcattgtctactgtcagagaagagtcatccattccgagagcagattcagagaaaaagtgggtttacccttctgagcagatgttctggaatgcaatgttaaagaaagggtggaagtggaaggatgaggatatcagtcagaaggatatgtataatatcattagaattcacaatcagaataacgagcaggcttggaaggagattttgaagtgggaagcccttcatgctgcagagtgtccttgtggtccatcattgatccggtttggagggaaagcaaaagagtattcaccaagggcacgaattcgttcctggatggggtatgagttgccttttgataggcacgattggatcataaaccgttgcgggacagaagttagatatgtgattgattattatgatggtggtgaagtcaacaaggactaccagttcaccatcctggacgtccgtcctgccttagattcactttcggcagtatgggacagaatgaaagtcgcttggtggcgttggacctcgtaaagcactgtttcagatggaaaaatataaactatttttttctgagcgatacattaaactattttccccaga

SEQ ID NO: 141229 - DNA, 2517 bp, Homo sapiens
  Payload ID: 7740
  Gene Symbol: HOXA1
  Gene Name: homeobox A1
  Uniprot ID: P49639
  ENST ID: ENST00000343060
  CDS Start-End: 63-1070
aggaagtgagaaagttggcacagtcacgccgggcttcgcaggaccaggtcactcagtgacagatggacaatgcaagaatgaactccttcctggaataccccatacttagcagtggcgactcggggacctgctcagcccgagcctacccctcggaccataggattacaactttccagtcgtgcgcggtcagcgccaacagttgcggcggcgacgaccgcttcctagtgggcaggggggtgcagatcggttcgccccaccaccaccaccaccaccaccatcgccacccccagccggctacctaccagacttccgggaacctgggggtgtcctactcccactcaagttgtggtccaagctatggctcacagaacttcagtgcgccttacagcccctacgcgttaaatcaggaagcagacgtaagtggtgggtacccccagtgcgctcccgctgtttactctggaaatctctcatctcccatggtccagcatcaccaccaccaccagggttatgctgggggcgcggtgggctcgcctcaatacattcaccactcatatggacaggagcaccagagcctggccctggctacgtataataactccttgtcccctctccacgccagccaccaagaagcctgtcgctcccccgcatcggagacatcttctccagcgcagacttttgactggatgaaagtcaaaagaaaccctcccaaaacagggaaagttggagagtacggctacctgggtcaacccaacgcggtgcgcaccaacttcactaccaagcagctcacggaactggagaaggagttccacttcaacaagtacctgacgcgcgcccgcagggtggagatcgctgcatccctgcagctcaacgagacccaagtgaagatctggttccagaaccgccgaatgaagcaaaagaaacgtgagaaggagggtctcttgcccatctctccggccaccccgccaggaaacgacgagaaggccgaggaatcctcagagaagtccagctcttcgccctgcgttccttccccggggtcttctacctcagacactctgactacctcccactgaggcggctccagccccagacaacagcccaggcatctccttgggctgggacttcttacccaaagcacatgcttagcttatctttctttccatttacagtctctttcttcctttctaatcctatctggggagctcctggccaggataatatatttgcagataattctggaccagagacttggtgcggggttaacaccttcatccagattgggtgccagcatacattttctggtgggccttaacatccctcctgcttttaggagaattcacagaacctactgttcctttcagatgaccttttggaaaatagttccctttgccaacagaaacatgccagaaggaatcttctcatcttttatctaactatatgtacagctctcccctcccttgtccttgaaagtaggatatagcgaaaggcgagtccaggagctcaggaagaagagatgcactatatgtttacacaattaattcatcccttaatttaagtcattttcatgtgtgtgagtttgctggttgtaaatactttgtcctaagagatttatctttatacagattttctagaaatgtttaggttactaaaacagggtgggcaaactctctaaactggtacaattttataggtgaaagaaaaaattccctcatttaaacccaatcagatgcctcagagggtagccttgatttgttcttacagttaagaagccctgcagagcacaaacttcagaaacccggcttcctgtgctaagtctttcccaatctctacccctttcttctcgggccaccctctgtttaaaatttgtgctgggttattcagaacctaaaagtattattcaaaccaatttcttccttccacagttatcttagctggatataatgtattttcagctcaattgttaatgtgatggatggcacaatgaatgtatattttgtgttattcgtgaatagtcttttgcatgtcgcacaatgtttgatgtccccaaagtaccacactgagttctatcagttatcctttgtgagcctatgatattccccatttcctgtacaatcatgaacagctctgagatcctggagtgatatgatccagagcagagtttacgggtcttaggatgtctgtaataaataaatatactcaagtttcaggtatgcttaagcatccgtgtatttggctgggctacaatttgttaattcctatgaagttggcacatttcatgaggggaaagggagaagggtggtaaatattttcaaagagatgggccttttcttgaataaaagttaataacagctcctttattataatcaaagctcataatggaaaaaaagactgatgaagaaatttatgaagcagatttatttttgaaacaaacatggatacttcctgggtcaagtgctaaccttttcacctccaactggatgttgacgtatatataaacagaactcccttcaaaagccaaaa

SEQ ID NO: 141230 - DNA, 2016 bp, Homo sapiens
  Payload ID: 7740
  Gene Symbol: HOXA1
  Gene Name: homeobox A1
  ENST ID: ENST00000355633
  CDS Start-End: 85-498
tttttcttctccggccccatggaggaagtgagaaagttggcacagtcacgccgggcttcgcaggaccaggtcactcagtgacagatggacaatgcaagaatgaactccttcctggaataccccatacttagcagtggcgactcggggacctgctcagcccgagcctacccctcggaccataggattacaactttccagtcgtgcgcggtcagcgccaacagttgcggcggcgacgaccgcttcctagtgggcaggggggtgcagatcggttcgccccaccaccaccaccaccaccaccatcgccacccccagccggctacctaccagacttccgggaacctgggggtgtcctactcccactcaagttgtggtccaagctatggctcacagaacttcagtgcgccttacagcccctacgcgttaaatcaggaagcagacccaccaagaagcctgtcgctcccccgcatcggagacatcttctccagcgcagacttttgactggatgaaagtcaaaagaaaccctcccaaaacagggaaagttggagagtacggctacctgggtcaacccaacgcggtgcgcaccaacttcactaccaagcagctcacggaactggagaaggagttccacttcaacaagtacctgacgcgcgcccgcagggtggagatcgctgcatccctgcagctcaacgagacccaagtgaagatctggttccagaaccgccgaatgaagcaaaagaaacgtgagaaggagggtctcttgcccatctctccggccaccccgccaggaaacgacgagaaggccgaggaatcctcagagaagtccagctcttcgccctgcgttccttccccggggtcttctacctcagacactctgactacctcccactgaggcggctccagccccagacaacagcccaggcatctccttgggctgggacttcttacccaaagcacatgcttagcttatctttctttccatttacagtctctttcttcctttctaatcctatctggggagctcctggccaggataatatatttgcagataattctggaccagagacttggtgcggggttaacaccttcatccagattgggtgccagcatacattttctggtgggccttaacatccctcctgcttttaggagaattcacagaacctactgttcctttcagatgaccttttggaaaatagttccctttgccaacagaaacatgccagaaggaatcttctcatcttttatctaactatatgtacagctctcccctcccttgtccttgaaagtaggatatagcgaaaggcgagtccaggagctcaggaagaagagatgcactatatgtttacacaattaattcatcccttaatttaagtcattttcatgtgtgtgagtttgctggttgtaaatactttgtcctaagagatttatctttatacagattttctagaaatgtttaggttactaaaacagggtgggcaaactctctaaactggtacaattttataggtgaaagaaaaaattccctcatttaaacccaatcagatgcctcagagggtagccttgatttgttcttacagttaagaagccctgcagagcacaaacttcagaaacccggcttcctgtgctaagtctttcccaatctctacccctttcttctcgggccaccctctgtttaaaatttgtgctgggttattcagaacctaaaagtattattcaaaccaatttcttccttccacagttatcttagctggatataatgtattttcagctcaattgttaatgtgatggatggcacaatgaatgtatattttgtgttattcgtgaatagtcttttgcatgtcgcacaatgtttgatgtccccaaagtaccacactgagttctatcagttatcctttgtgagcctatgatattccccatttcctgtacaatcatgaacagctctgagatcctggagtgatatgatccagagcagagtttacgggtcttaggatgtctgtaataaataaatatactcaa

SEQ ID NO: 141231 - DNA, 2541 bp, Homo sapiens
  Payload ID: 7741
  Gene Symbol: HOXA10
  Gene Name: homeobox A10
  Uniprot ID: P31260
  ENST ID: ENST00000283921
  CDS Start-End: 1-1233
atgtcagccagaaagggctatctgctcccttcgccaaattatcccacaacaatgtcatgctcggagagccccgccgcgaactcttttttggtcgactcgctcatcagctcgggcagaggcgaggcaggcggcggtggtggtggcgcggggggcggcggcggtggcggttactacgcccacggcggggtctacctgccgcccgccgccgacctgccctacgggctgcagagctgcgggctcttccccacgctgggcggcaagcgcaatgaggcagcgtcgccgggcagcggtggcggtggcgggggtctaggtcccggggcgcacggctacgggccctcgcccatagacctgtggctagacgcgccccggtcttgccggatggagccgcctgacgggccgccgccgccgccccagcagcagccgccgcccccgccgcaaccaccccagccagcgccgcaggccacctcgtgctctttcgcgcagaacatcaaagaagagagctcctactgcctctacgactcggcggacaaatgccccaaagtctcggccaccgccgccgaactggctcccttcccgcggggcccgccgcccgacggctgcgccctgggcacctccagcggggtgccagtgcctggctacttccgcctttctcaggcctacggcaccgccaagggctatggcagcggcggcggcggcgcgcagcaactcggggctggcccgttccccgcgcagcccccggggcgcggtttcgatctcccgcccgcgctagcctccggctcggccgatgcggcccggaaggagcgagccctcgattcgccgccgccccccacgctggcttgcggcagcggcgggggctcgcagggcgacgaggaggcgcacgcgtcgtcctcggccgcggaggagctctccccggccccttccgagagcagcaaagcctcgccggagaaggattccctgggcaattccaaaggtgaaaacgcagccaactggctcacggcaaagagtggtcggaagaagcgctgcccctacacgaagcaccagacactggagctggagaaggagtttctgttcaatatgtaccttactcgagagcggcgcctagagattagccgcagcgtccacctcacggacagacaagtgaaaatctggtttcagaaccgcaggatgaaactgaagaaaatgaatcgagaaaaccggatccgggagctcacagccaactttaatttttcctgatgaatctccaggcgacgcggttttttcacttcccgagcgctggtcccctccctctgtcttcaggctctgcccaggaactcgcacctgtgctggagccctgttcctccctcccacactcgccatctcctgggccgttacatctgtgcagggctggtttgttctgactttttgtttctttgtgtttgcttggtgctggtttatttgttgttttctgggggaaaaagccatatcatgctaaaattctatagagatagatattgtcctaagtgtcaagtcctgactgggctgggtttgctgtcttggggtcccactgctcgaaatggcccctgtcttcggccgagctggtttcctgcccagcctggggcaaacctagccggaaggccgaggtcccattgttggcgctgaggtgtctggcctgaggtcaatggtgcaaaggagccgccaccgggcatgtctgcctggagtgctgtgctgtgtttaatcaggggatacaggcccctgggtttcttttttctttcttcctttcttccttggccaagagaagggcttacaggcatggacatgcaggttggcaaacgggcttgactttggctgatttaaaaagtgagaaagaaagtaaaaaaggttaatttttccttcctctgtaagatatcccagctttaaaaagaaaaaaaaagaattaccaagagaaggggacttctcttccagtttctgtaaggtcttacattgcctgactaaaatgtttcatttacctctaaatttccatatccttctggctgtagataaataatgtagttttgtttatgcatttggaattagtggatttttttgtcattaaaattgttaccactggtaacatgtgacaagcacaccacaattctccctatcttgtgaagttgtttttttaaatcgccttgaacaaaaagttttttttttgtttgtttttgctttctgaaattcacagaagcctaggaggactggggtaagcggaataaactagagaagggagacattgtttggatttcctttatactgtgaagttacatgcataaaagggtcaaacctgtagatgcagaaaaagaaaaaaactataaatacaaatctgtataaatgtctattattatgaagaattgccaatcttgttttaagcaaatgcattctatcgttattataaatgttagttctagctctatttacttctaatcttaaatcagaataaattaatattgtattgctgctgtgcgtggaaaaagacgatgtttatgttcttatagaataaaagctgtggaatgaagctttttaatttta

SEQ ID NO: 141232 - DNA, 1570 bp, Homo sapiens
  Payload ID: 7741
  Gene Symbol: HOXA10
  Gene Name: homeobox A10
  Uniprot ID: P31260
  ENST ID: ENST00000396344
  CDS Start-End: 607-891
aaccaaagtctctcaagttgctagagagagtctagccaggaggactgctcgcgggcgggcggcgggcgggcgcgggtttgatttctgagccctataaaagcccatcctccgatggctgtgacaatgtggtcgtaaacccgtccggggccggccaatttgcatatttggaatgcgccgctataaacccggctggggttttgcagcgatttcttagatgtaaaaatgagatctcaatagcagcgggctgggcacatcctctcctctctccttctctctctgcccggagctggtttccgtctctcggctcggggctggaactccggcccaacctaggcgcgcagccgccacgagatggcgcacttccgatcaatgtcaaagccgccggggagccgggaaccccagcatgattcttggcctttgttcgcttctgatactaagagcagcacggtacattatttcacttgtcccgctccccttcataacagaaaaaggggactcaccctcaagaagtgattggtatggtaatttaaagcaacgcgcattcgctaggcctcgcgagcgtcgccgcgcggagaagccagctgtcccttggcagtgatttcggaaatgtgtcaaggcaattccaaaggtgaaaacgcagccaactggctcacggcaaagagtggtcggaagaagcgctgcccctacacgaagcaccagacactggagctggagaaggagtttctgttcaatatgtaccttactcgagagcggcgcctagagattagccgcagcgtccacctcacggacagacaagtgaaaatctggtttcagaaccgcaggatgaaactgaagaaaatgaatcgagaaaaccggatccgggagctcacagccaactttaatttttcctgatgaatctccaggcgacgcggttttttcacttcccgagcgctggtcccctccctctgtcttcaggctctgcccaggaactcgcacctgtgctggagccctgttcctccctcccacactcgccatctcctgggccgttacatctgtgcagggctggtttgttctgactttttgtttctttgtgtttgcttggtgctggtttatttgttgttttctgggggaaaaagccatatcatgctaaaattctatagagatagatattgtcctaagtgtcaagtcctgactgggctgggtttgctgtcttggggtcccactgctcgaaatggcccctgtcttcggccgagctggtttcctgcccagcctggggcaaacctagccggaaggccgaggtcccattgttggcgctgaggtgtctggcctgaggtcaatggtgcaaaggagccgccaccgggcatgtctgcctggagtgctgtgctgtgtttaatcaggggatacaggcccctgggtttcttttttctttcttcctttcttccttggccaagagaagggcttacaggcatggacatgcaggttggcaaacgggcttgactttggctgatttaaaaagtgagaaagaaagtaaaaaaggttaatttttccttcctctgtaagatatcccagctttaaaaagaaaaaaaaagaa

SEQ ID NO: 141233 - DNA, 2175 bp, Homo sapiens
  Payload ID: 7741
  Gene Symbol: HOXA10
  Gene Name: homeobox A10
  ENST ID: ENST00000613671
  CDS Start-End: 1-609
atgtcatgctcggagagccccgccgcgaactcttttttggtcgactcgctcatcagctcgggcagaggcgaggcaggcggcggtggtggtggcgcggggggcggcggcggtggcggttactacgcccacggcggggtctacctgccgcccgccgccgacctgccctacgggctgcagagctgcgggctcttccccacgctgggcggcaagcgcaatgaggcagcgtcgccgggcagcggtggcggtggcgggggtctaggtcccggggcgcacggctacgggccctcgcccatagacctgtggctagacgcgccccggtcttgccggcggcgcgcagcaactcggggctggcccgttccccgcgcagcccccggggcgcggtttcgatctcccgcccgcgctagcctccggctcggccgatgcggcccggaaggagcgagccctcgattcgccgccgccccccacgctggcttgcggcagcggcgggggctcgcagggcgacgaggaggcgcacgcgtcgtcctcggccgcggaggagctctccccggccccttccgagagcagcaaagcctcgccggagaaggattccctgggcaattccaaaggtgaaaacgcagccaactggctcacggcaaagagtggtcggaagaagcgctgcccctacacgaagcaccagacactggagctggagaaggagtttctgttcaatatgtaccttactcgagagcggcgcctagagattagccgcagcgtccacctcacggacagacaagtgaaaatctggtttcagaaccgcaggatgaaactgaagaaaatgaatcgagaaaaccggatccgggagctcacagccaactttaatttttcctgatgaatctccaggcgacgcggttttttcacttcccgagcgctggtcccctccctctgtcttcaggctctgcccaggaactcgcacctgtgctggagccctgttcctccctcccacactcgccatctcctgggccgttacatctgtgcagggctggtttgttctgactttttgtttctttgtgtttgcttggtgctggtttatttgttgttttctgggggaaaaagccatatcatgctaaaattctatagagatagatattgtcctaagtgtcaagtcctgactgggctgggtttgctgtcttggggtcccactgctcgaaatggcccctgtcttcggccgagctggtttcctgcccagcctggggcaaacctagccggaaggccgaggtcccattgttggcgctgaggtgtctggcctgaggtcaatggtgcaaaggagccgccaccgggcatgtctgcctggagtgctgtgctgtgtttaatcaggggatacaggcccctgggtttcttttttctttcttcctttcttccttggccaagagaagggcttacaggcatggacatgcaggttggcaaacgggcttgactttggctgatttaaaaagtgagaaagaaagtaaaaaaggttaatttttccttcctctgtaagatatcccagctttaaaaagaaaaaaaaagaattaccaagagaaggggacttctcttccagtttctgtaaggtcttacattgcctgactaaaatgtttcatttacctctaaatttccatatccttctggctgtagataaataatgtagttttgtttatgcatttggaattagtggatttttttgtcattaaaattgttaccactggtaacatgtgacaagcacaccacaattctccctatcttgtgaagttgtttttttaaatcgccttgaacaaaaagttttttttttgtttgtttttgctttctgaaattcacagaagcctaggaggactggggtaagcggaataaactagagaagggagacattgtttggatttcctttatactgtgaagttacatgcataaaagggtcaaacctgtagatgcagaaaaagaaaaaaactataaatacaaatctgtataaatgtctattattatgaagaattgccaatcttgttttaagcaaatgcattctatcgttattataaatgttagttctagctctatttacttctaatcttaaatcagaataaattaatattgtattgctgctgtgcgtggaaaaagacgatgtttatgttcttatagaataaaagctgtggaatgaagctttttaatttt

SEQ ID NO: 141234 - DNA, 2295 bp, Homo sapiens
  Payload ID: 7742
  Gene Symbol: HOXA11
  Gene Name: homeobox A11
  Uniprot ID: P31270
  ENST ID: ENST00000006015
  CDS Start-End: 73-1014
cttcaaagaggcagctgcagtggagaatcatgttaagctcggctactgcggagagcccaaggtagcccaataatggattttgatgagcgtggtccctgctcctctaacatgtatttgccaagttgtacttactacgtctcgggtccagatttctccagcctcccttcttttctgccccagaccccgtcttcgcgcccaatgacatactcctactcctccaacctgccccaggtccaacccgtgcgcgaagtgaccttcagagagtacgccattgagcccgccactaaatggcacccccgcggcaatctggcccactgctactccgcggaggagctcgtgcacagagactgcctgcaggcgcccagcgcggccggcgtgcctggcgacgtgctggccaagagctcggccaacgtctaccaccaccccacccccgcagtctcgtccaatttctatagcaccgtgggcaggaacggcgtcctgccacaggctttcgaccagtttttcgagacagcctacggcaccccggaaaacctcgcctcctccgactaccccggggacaagagcgccgagaaggggcccccggcggccacggcgacctccgcggcggcggcggcggctgcaacgggcgcgccggcaacttcaagttcggacagcggcggcggcggcggctgccgggagacggcggcggcagcagaggagaaagagcggcggcggcgccccgagagcagcagcagccccgagtcgtcttccggccacactgaggacaaggccggcggctccagtggccaacgcacccgcaaaaagcgctgcccctataccaagtaccagatccgagagctggaacgggagttcttcttcagcgtctacattaacaaagagaagcgcctgcaactgtcccgcatgctcaacctcactgatcgtcaagtcaaaatctggtttcagaacaggagaatgaaggaaaaaaaaattaacagagaccgtttacagtactactcagcaaatccactcctctaagactccagcggctggaattgggtggggggcttcatacacatgagataatatgcagattttgcccttgacaaagtcaagccacatggtgacttttgaaaagaggtgtgcaagagagggatgcatggagatagccccacaggaggtggtctgggactctcttgattaagatctcagtggttaagattcctaataatcattggattctgagagctgtgcatcagctagaatgacaggtttgggacccctggtggttcactcttggagcctgcagagctgcgggctgggtgtggtctccactggggattgggcccctgccagaccccctggagactaaccccaccacaccctccctctactgggagcctacccacccccaggacccctgagtaaaaaagctgtgtgctctccaagcccagttcagcttggggacaggggcaggaggaaggggtaggattactaggtgcccagaatgaggctgctttccaaagccaatgtgaacagcggctggacttggaggtagctttgaggtggaagagggctgcaaatccttgtgggaaaagaaatctatgattccaggtggcatcagtgtctttccactcctcctagccacccaccacactgatccagccctgagttcctagccaccgcctcctacagcccacctggcttttctttctaccaaatgagggtcttggttccagcctgccactcaggcccaaagcctcgacacagagtggactgttccctgaggtgggagatgtggaaaagccaagaggctgcagccaggccactggcccctgagatctctgcaggaaatggctgtggagtgtggcagtttggcaaactctccaccacacgtaatgaaacttggatttgctcagtgtctggctgcagagcagtgggcctggccagcaggtccccagctttggctatgagggccttgagtcccccaaaacaccgggttccagcaccacactcagccctcattggctcttgaactgagcttggaagcttctggtgaccttccaagagcctgagagtgaggtggaattattttaaaagataaatattatattatatatatatatatttccctgaaggaaccaaagcgaattttaaaagatgcaatgtagaggggaaaagagatgatgaaaatatttaaaggccctatctgtttacagtgttccgtggttaaactcgctcactgctaagaatatttgaatgtatgcttcatacagggatggtgttcaaaaaacttgtaaataaaggaaccataatcaa

SEQ ID NO: 141235 - DNA, 2137 bp, Homo sapiens
  Payload ID: 7742
  Gene Symbol: HOXA11
  Gene Name: homeobox A11
  ENST ID: ENST00000517402
  CDS Start-End: 1-851
ggatccgcttcaaagaggcagctgcagtggagaatcatgttaagctcggctactgcggagagcccaaggtccaacccgtgcgcgaagtgaccttcagagagtacgccattgagcccgccactaaatggcacccccgcggcaatctggcccactgctactccgcggaggagctcgtgcacagagactgcctgcaggcgcccagcgcggccggcgtgcctggcgacgtgctggccaagagctcggccaacgtctaccaccaccccacccccgcagtctcgtccaatttctatagcaccgtgggcaggaacggcgtcctgccacaggctttcgaccagtttttcgagacagcctacggcaccccggaaaacctcgcctcctccgactaccccggggacaagagcgccgagaaggggcccccggcggccacggcgacctccgcggcggcggcggcggctgcaacgggcgcgccggcaacttcaagttcggacagcggcggcggcggcggctgccgggagacggcggcggcagcagaggagaaagagcggcggcggcgccccgagagcagcagcagccccgagtcgtcttccggccacactgaggacaaggccggcggctccagtggccaacgcacccgcaaaaagcgctgcccctataccaagtaccagatccgagagctggaacgggagttcttcttcagcgtctacattaacaaagagaagcgcctgcaactgtcccgcatgctcaacctcactgatcgtcaagtcaaaatctggtttcagaacaggagaatgaaggaaaaaaaaattaacagagaccgtttacagtactactcagcaaatccactcctctaagactccagcggctggaattgggtggggggcttcatacacatgagataatatgcagattttgcccttgacaaagtcaagccacatggtgacttttgaaaagaggtgtgcaagagagggatgcatggagatagccccacaggaggtggtctgggactctcttgattaagatctcagtggttaagattcctaataatcattggattctgagagctgtgcatcagctagaatgacaggtttgggacccctggtggttcactcttggagcctgcagagctgcgggctgggtgtggtctccactggggattgggcccctgccagaccccctggagactaaccccaccacaccctccctctactgggagcctacccacccccaggacccctgagtaaaaaagctgtgtgctctccaagcccagttcagcttggggacaggggcaggaggaaggggtaggattactaggtgcccagaatgaggctgctttccaaagccaatgtgaacagcggctggacttggaggtagctttgaggtggaagagggctgcaaatccttgtgggaaaagaaatctatgattccaggtggcatcagtgtctttccactcctcctagccacccaccacactgatccagccctgagttcctagccaccgcctcctacagcccacctggcttttctttctaccaaatgagggtcttggttccagcctgccactcaggcccaaagcctcgacacagagtggactgttccctgaggtgggagatgtggaaaagccaagaggctgcagccaggccactggcccctgagatctctgcaggaaatggctgtggagtgtggcagtttggcaaactctccaccacacgtaatgaaacttggatttgctcagtgtctggctgcagagcagtgggcctggccagcaggtccccagctttggctatgagggccttgagtcccccaaaacaccgggttccagcaccacactcagccctcattggctcttgaactgagcttggaagcttctggtgaccttccaagagcctgagagtgaggtggaattattttaaaagataaatattatattatatatatatatatttccctgaaggaaccaaagcgaattttaaaagatgcaatgtagaggggaaaagagatgatgaaaatatttaaaggccctatctgtttacagtgttccgtggttaaactcgctcactgctaagaatatttgaatgtatgcttcatacagggatggtgttcaaaaaacttgtaaataaaggaaccataatcaattttc

SEQ ID NO: 141236 - DNA, 5030 bp, Homo sapiens
  Payload ID: 7743
  Gene Symbol: HOXA13
  Gene Name: homeobox A13
  Uniprot ID: P31271
  ENST ID: ENST00000222753
  CDS Start-End: 30-1196
actggggtcttctccatgcggctcgggctatgacagcctccgtgctcctccacccccgctggatcgagcccaccgtcatgtttctctacgacaacggcggcggcctggtggccgacgagctcaacaagaacatggaaggggcggcggcggctgcagcagcggctgcagcggcggcggctgccggggccgggggcgggggcttcccccacccggcggctgcggcggcagggggcaacttctcggtggcggcggcggccgcggctgcggcggcggccgcggccaaccagtgccgcaacctgatggcgcacccggcgcccttggcgccaggagccgcgtccgcctacagcagcgcccccggggaggcgcccccgtcggctgccgccgctgctgccgcggctgccgctgcagccgccgccgccgccgccgcgtcgtcctcgggaggtcccggcccggcgggcccggcgggcgcagaggccgccaagcaatgcagcccctgctcggcagcggcgcagagctcgtcggggcccgcggcgctgccctatggctacttcggcagcggctactacccgtgcgcccgcatgggcccgcaccccaacgccatcaagtcgtgcgcgcagcccgcctcggccgccgccgccgccgccttcgcggacaagtacatggataccgccggcccagctgccgaggagttcagctcccgcgctaaggagttcgccttctaccaccagggctacgcagccgggccttaccaccaccatcagcccatgcctggctacctggatatgccagtggtgccgggcctcgggggccccggcgagtcgcgccacgaacccttgggtcttcccatggaaagctaccagccctgggcgctgcccaacggctggaacggccaaatgtactgccccaaagagcaggcgcagcctccccacctctggaagtccactctgcccgacgtggtctcccatccctcggatgccagctcctataggagggggagaaagaagcgcgtgccttataccaaggtgcaattaaaagaacttgaacgggaatacgccacgaataaattcattactaaggacaaacggaggcggatatcagccacgacgaatctctctgagcggcaggtcacaatctggttccagaacaggagggttaaagagaaaaaagtcatcaacaaactgaaaaccactagttaatggattaaaaatagagcaagaaggcaacttgaagaaacgcttcagaactcgttgctttgcccagataatgataataatgcttaataataattgaagaatgggaaagagaaagagacagagactggcattttcctctcccgaaggagatctctttctctttaatggaatctacaactgttttaaaactttaagaaaggtaaagactgccagttcttccgccaaccccatcagcccagcccgttaaatgtcaaacgtcaacccccaaaatacgcaatttcagataagttacgcagttactgaaatcttgtaagtatttaagtgatcgttacattttaggacactgcgttagatggtaataatctggaagttggttacaaacgcaagaggccattgtaaacatctgcttgtccttcttaggtcgccattccctttgcatgttaagcgtctgctcaggtaaatcttagtgaaattcctaccgttgttgtacgttctgcaaaacattttatgtatagatttagaggggaaacgagaaggtactgaaataatgatcttggaatatttgctgtgaagggagaaagggagagaaaactcttctgaggatcatttgtcttggtagtatagtaaaaccaaccagctgaacctttcaggctacaagagaacccgggtcggtaatgtctttttaagaataatttttaattgcttataacaagcatattttgtggcatttgaactatatttactgctccaatatccgttattttccaaaggattttgtatctttttgaaaatgtttacatcatcagatgatccacagaattcactttatgtgagatctcccgagagtttccatcccaacatgatggactttggtttgaacacaattcgttttttcatttgaattggcatttcccaatatttgctaaacatttgctggagaaatcatttttcttttttcttttttagaaaactcagaatgaaaattcattcccctgaaatatttaggtgtctatattctatattttgatctattaagggattagtatttttccatgtttattgtgttatcagagtgcattagaaagattagtgattcatcttcacagcacatttttaatcaagcagttatttcaaccagcacattcgttttgttcatattcactatagaatgatatcttgtaaataaagacattcagcacactgtgaaaatgtatttgtgcacctgctttttaaatatttctactaaaaatgaaaaaaaaaaacccttagacctgtagatagtgatatcgtaatattaattgttaataaaatagtcactgccattaaaatctgcagaaaatactctttactttcctatgctaaatgtgcactgcacagaaagaaaaggagcaggtttatcttatataaaccaaggaccattctttattattattcagtacttcttttgctaccaaatttttaagaaaagggagaaatccctcataactaaaatcctaaaaaatgataagtgcttcaaggagattaaagtgtcaggtattacaaaagggagagaaaagaaaggaggaagagatagtatgaattcccaggctccctgtggaaaatgaaaaccagttgttttgtagcagcaatgcctaggctgtcgtattttaaaatctgctgttgggtctgcatgtgtctgagagggcaggttttgatatttgttgaaatgacaggactacgaaaggccttaaaccttgaccttgacgaaaaaaaagacaatttgtgaccttgacttttgacagctcatgaattggccttagctggattagtagatcaagggcgccacctcgcgttgacaagcctccttgtaattcttcaaccaagggaatcaagagctcttacctccttgactttagagattcagtactcaattatttggctccagctggagcaaatttgaatatatgtaaattatacatgtccctgtatatatgtaaatatatataatatgtgtacacatgtatacatttgcatattagtgcttgtgtgtgcttgtatatatatttgtagaatctgtacagatatcatatcattaattgctaatgacgcaagatattgtaatttaaggtgatttctagaattgaggtacaaaatgtactttacaagatgaagccttgttccttttctctaatggccaaatttgatttgtcttcacagtggcttgctctgcatcagatttctgcagatctgctttaaagctgtacatttttgttacagtctaagatgtgttcttaaatcaccattccttcctggtcctcaccctccagggtggtctcacactgtaattagagctattgaggagtctttacagcaaattaagattcagatgccttgctaagtctagagttctagagttatgtttcagaaagtctaagaaacccacctcttgagaggtcagtaaagaggacttaatatttcatatctacaaaatgaccacaggattggatacagaacgagagttatcctggataactcagagctgagtactgctccagggtggtgtgcaatcttatattgatgcttgtgaatctgccatttgatttgtaggataaataaatatgtttaatattaacaacttccatcaaaactataataataatattatatctactgttgacctctaacaacaatcaggtgctgtattcagagtcataaagaatacatatgtatgtttgtatatttaatatacacataggataatgtgtttttgtcaaatctatgctatgcgcatatgtattaaaatgttggtggaatcagtagccgtgggatgcagaattgtgagatgcaggctaattttatctttacgttagaggaaagtaatagtgaatggaagaaccagattcatcattttatggaaaataatattgattggttacaaaagtggctgccggaaacctctccaacctctcctgaggactcacaacttctttatagatgagaattacgaaagagtctctaaagctgtctcaaaaacaggctggtgttgaaacatacatatcgaaaggtctcgagaaattcaattatattttgctgccctgaggattttcactccacttgtggaaacaaatgataatgttgcttcagacccacctctccacctcttgttccaaacagtactccatttccaaatgagctgccatcaagccaaagtaacaactttctcccaaaatgtttaaagtggtggaaaatcccctcaaagctggatcaaactgtgtgtttaagaacagctccaaaagggactcttctgttgacaggggatatttttctttagatgtaagaaatattctgagcctcgagcctaggaaggaggccaacagcagctctccagccgggatcccgcccctttcgaaagccatcaccactacaggaaccctgggtaaagtagtagccttctttttttctctctctagtttttgaaactgtaatgacagaagacatttcagggttgttgtggggattttttccccccagttctaaaatggtcattgatagtgtcgatcttacctaactctcctcctatttaaaatttctgtggatctaccagataacctaaagtgggcatggattatttattatggctcctttaatgcccaaatagcaatcagtctaaaaccttaaaacaaaaacaaaaacaaaaacaaaaatcaaggagagaccagccacctcctgaaaaataggaataatagtatcagccactgacccatggataatgttgttgaaagcctgattaaagtatttttttctaaaaagaaaactcttcctgaattaagaaaataaaaatgggactttaaaaaaaaa

SEQ ID NO: 141237 - DNA, 1814 bp, Homo sapiens
  Payload ID: 7744
  Gene Symbol: HOXA2
  Gene Name: homeobox A2
  Uniprot ID: O43364
  ENST ID: ENST00000222718
  CDS Start-End: 312-1442
cccgacttttttggatcaatcaaacagacagtggcttcttttgattaaagcccaaattgtcattgggcagaagcaatcatgtgacagccaattcggtccaatttcaaccttgtctccatgaattcaatagtttaatagtagcgcggtccccatacggctgtaatcagtgaattagaaaaaaaacaccctagcagcgatattctatgatagattttttttcctctgcgctcgcctttttcctaggccttgcccccccaaagcccctccaaaagagggaactttttctctgagggggctccaaggagaaggccatgaattacgaatttgagcgagagattggttttatcaatagccagccgtcgctcgctgagtgcctgacatcttttccccctgtcgctgatacatttcaaagttcatcaatcaagacctcgacgctttcacactcgacactgattcctcctccttttgagcagaccattcccagcctgaaccccggcagtcaccctcgccacggcgctggcggccgccccaagccgagccccgcgggcagccgcggcagcccggtgcccgccggcgccctgcagccgcccgagtacccctggatgaaggagaagaaggcggccaagaaaaccgcacttctgccggccgccgccgccgccgccaccgccgcagccaccggccctgcttgcctcagccacaaagaatccctggaaatcgccgatggcagcggcgggggatcgcggcgcctgagaactgcttacaccaacacacagcttctagagctggaaaaagaatttcatttcaacaagtacctttgcagaccccgaagggtggagattgcagcgctgctggatttgactgagagacaagtgaaagtgtggtttcagaaccggaggatgaagcacaagaggcagacccagtgcaaggaaaaccaaaacagcgaagggaaatgtaaaagccttgaggactccgagaaagtagaggaggacgaggaagagaagacgctctttgagcaagcccttagcgtctctggggcccttctggagagggaaggctacacttttcagcaaaatgccctctctcagcagcaggctcccaatggacacaatggcgactcccaaagtttcccagtctcgcctttaaccagcaatgagaaaaatctgaaacattttcagcaccagtcacccactgttcccaactgcttgtcaacaatgggccagaactgtggagctggcctaaacaatgacagtcctgaggcccttgaggtcccctctttgcaggactttagcgttttctccacagattcctgcctgcagctttcagatgcagtttcacccagtttgccaggttccctcgacagtcccgtagatatttcagctgacagcttagacttttttacagacacactcaccacaatcgacttgcagcatctgaattactaaaaacattaaagcaaaacaaagcatcaccaaacaaaaactcctttgaccaggtggttttgccttcttttatttgggagtttattttttattttcttcttgacctaccccttccctcctttaagtgttgaggattttctgtttagtgattccctgacccagtttcaaacagagccatcttttacagattattttggagttttagttgttttaaacctaactcaacaaccctttatgtgattcctgagagcagtatgaggcctgcaagaaagtgatcatataattgtatcttcactttctttttatttttgtattacattgggatgcattgtcatgcatattttttgtagaataaattctcctttgctataagta

SEQ ID NO: 141238 - DNA, 2761 bp, Homo sapiens
  Payload ID: 7745
  Gene Symbol: HOXA3
  Gene Name: homeobox A3
  Uniprot ID: O43365
  ENST ID: ENST00000317201
  CDS Start-End: 527-1858
actaacgctggactccatttgactcttttgcaggctacgtgtgccgcctggccattcaaactgtcaattttaggtccagaagtgtccaaaccacaagttctcaaaactctctgaaaaatggctccctccgagttaagcaattctgaaaggcattctctgggaaaagtctgtggaggagagagggatcttcttgcaaataatgtggtctcaggcaaggacacagcatcttggctgtctgctaaaaaaaaaaaatgcctagactctcagtggaaattgagtgtcaagctgcaaaatctcaaatggcagactatcatcatttaagagcgcctggacaccggaaaaggcgattccctgagcgcctggagttggagacaattcctggttcagaatttaaacatctttctaggtctgcgcggggcggccattggcggcggagtgtcacgtgaccgcgggggcgtgccaatgtgcgccctcacgggtgtcaaacccctgtcagagtgtgcgatcaagatcgtgaaacaacgcgatgcaaaaagcgacctactacgacagctcggcgatctacggtggctacccctaccaggcagccaacgggttcgcttataatgccaatcagcagccgtacccggcgtccgccgctttgggcgccgacggcgagtaccaccgacccgcctgctccctccagtctccctccagcgccgggggccaccccaaggcacacgaactgagtgaggcgtgcctgcgcaccctgagcgccccacctagccagcctccaagcctgggagagccgcccctgcacccgccgccgccccaggccgcgccccctgccccacagccgcctcagcccgcacctcagccccctgcacctacccctgccgcgcccccgcctccctcttctgcctcccctcctcagaatgccagcaacaaccctacccctgccaacgcggccaagagccccctgctcaactcacccacagtggccaaacaaatcttcccctggatgaaagagtctcgacaaaacacaaagcagaaaaccagcagctccagctcaggcgaaagctgcgctggcgacaagagcccgccggggcaggcttcgtccaagcgcgcgcgcacggcctacacgagcgcgcagctggtggagctggagaaagagttccacttcaaccgctacctgtgccggccgcgccgggtggagatggccaatctgctgaacctcactgagcgccagatcaagatctggttccagaatcgccgcatgaagtacaaaaaggatcagaagggcaagggcatgctaacgtcatcggggggccagtctccaagtcgcagccccgtgccccccggagccggtggctatctgaactctatgcattcgctggtcaacagcgtcccgtatgagccccagtcgcccccgcccttctccaagcccccccagggtacctacgggctgccccccgcctcctaccctgcgtccctgcccagctgcgcacccccgccacccccacagaagcgctacacggcggcaggggcgggcgcagggggcacccccgactatgacccgcacgctcatggcctgcagggcaacggcagctatgggaccccacacatacagggaagccccgtcttcgtggggggcagctatgtggagcccatgagcaactccgggccagccctctttggtctaactcacctcccccacgctgcctcgggcgccatggactatgggggtgccgggccgctgggcagcggccaccaccacgggccggggcctggggagccgcaccccacctacacggaccttaccggccaccatccttctcagggaagaattcaggaagcacccaagctcacccacctgtgatagtgggcttggggctacgcgccaggagagtctccccccacccaccttttttctttggttgcttttttttttttttttttttaggttcttcctgccctttccttccttccttttctctcttctccgccccgcactccgtttcccggtttcccccctcgttggtaaggcgtttttatagtttatgtgacgtagcaatcttggttgctggaatggctgtatcatagcgatatttatctcttcctgctcctcgataggccactggccctgcaccctttaccttctccactctttgatcagaaacagggtatatgaacaaattttctagtcgagttttcaatgtgaatttgttcttacattatggctcccgaggggaagcgattactttttttaattttaaattttttttttaattgcacttcttgtaaagagtgagaaaaaaaatcaaaggcgctttgaaacaggggctctctgtgcaaggatgactaagtgtacgtctttccgtgtgtgtatgctggtgaacagtcagatttatttatatttttttgcaagcattgaataatctaagttttaaatattatttatccccatccgttcgtatttatattaaagaattctgtaccctgatggttcagaagggttcttgggccttttgttcaattgtgtattggcgtacttagaattttttttatttgaaagagaaatataattcctttaaacggtaacgatacaataaaaccagagaagatccagcttttgaaaacagtgatttaggtttgtaacatccggcaaaactgaaaaaaaaaatctgtaaacgcgaaaaatactagatttgttttgagagttcttcattccttgctgctcacattctgagaaacaaaaagaaataaagtttttattctgaat

SEQ ID NO: 141239 - DNA, 3263 bp, Homo sapiens
  Payload ID: 7745
  Gene Symbol: HOXA3
  Gene Name: homeobox A3
  Uniprot ID: O43365
  ENST ID: ENST00000396352
  CDS Start-End: 201-1532
tctcactagcctcagagcactctcagaagttcagaaactaagaccagaaaagagaagatttttagacagctcatgaaacggtctgcgcggggcggccattggcggcggagtgtcacgtgaccgcgggggcgtgccaatgtgcgccctcacgggtgtcaaacccctgtcagagtgtgcgatcaagatcgtgaaacaacgcgatgcaaaaagcgacctactacgacagctcggcgatctacggtggctacccctaccaggcagccaacgggttcgcttataatgccaatcagcagccgtacccggcgtccgccgctttgggcgccgacggcgagtaccaccgacccgcctgctccctccagtctccctccagcgccgggggccaccccaaggcacacgaactgagtgaggcgtgcctgcgcaccctgagcgccccacctagccagcctccaagcctgggagagccgcccctgcacccgccgccgccccaggccgcgccccctgccccacagccgcctcagcccgcacctcagccccctgcacctacccctgccgcgcccccgcctccctcttctgcctcccctcctcagaatgccagcaacaaccctacccctgccaacgcggccaagagccccctgctcaactcacccacagtggccaaacaaatcttcccctggatgaaagagtctcgacaaaacacaaagcagaaaaccagcagctccagctcaggcgaaagctgcgctggcgacaagagcccgccggggcaggcttcgtccaagcgcgcgcgcacggcctacacgagcgcgcagctggtggagctggagaaagagttccacttcaaccgctacctgtgccggccgcgccgggtggagatggccaatctgctgaacctcactgagcgccagatcaagatctggttccagaatcgccgcatgaagtacaaaaaggatcagaagggcaagggcatgctaacgtcatcggggggccagtctccaagtcgcagccccgtgccccccggagccggtggctatctgaactctatgcattcgctggtcaacagcgtcccgtatgagccccagtcgcccccgcccttctccaagcccccccagggtacctacgggctgccccccgcctcctaccctgcgtccctgcccagctgcgcacccccgccacccccacagaagcgctacacggcggcaggggcgggcgcagggggcacccccgactatgacccgcacgctcatggcctgcagggcaacggcagctatgggaccccacacatacagggaagccccgtcttcgtggggggcagctatgtggagcccatgagcaactccgggccagccctctttggtctaactcacctcccccacgctgcctcgggcgccatggactatgggggtgccgggccgctgggcagcggccaccaccacgggccggggcctggggagccgcaccccacctacacggaccttaccggccaccatccttctcagggaagaattcaggaagcacccaagctcacccacctgtgatagtgggcttggggctacgcgccaggagagtctccccccacccaccttttttctttggttgcttttttttttttttttttttaggttcttcctgccctttccttccttccttttctctcttctccgccccgcactccgtttcccggtttcccccctcgttggtaaggcgtttttatagtttatgtgacgtagcaatcttggttgctggaatggctgtatcatagcgatatttatctcttcctgctcctcgataggccactggccctgcaccctttaccttctccactctttgatcagaaacagggtatatgaacaaattttctagtcgagttttcaatgtgaatttgttcttacattatggctcccgaggggaagcgattactttttttaattttaaattttttttttaattgcacttcttgtaaagagtgagaaaaaaaatcaaaggcgctttgaaacaggggctctctgtgcaaggatgactaagtgtacgtctttccgtgtgtgtatgctggtgaacagtcagatttatttatatttttttgcaagcattgaataatctaagttttaaatattatttatccccatccgttcgtatttatattaaagaattctgtaccctgatggttcagaagggttcttgggccttttgttcaattgtgtattggcgtacttagaattttttttatttgaaagagaaatataattcctttaaacggtaacgatacaataaaaccagagaagatccagcttttgaaaacagtgatttaggtttgtaacatccggcaaaactgaaaaaaaaaatctgtaaacgcgaaaaatactagatttgttttgagagttcttcattccttgctgctcacattctgagaaacaaaaagaaataaagtttttattctgaataatatccgtgttaagaaggggttctttggccgaagacgtgggtctgcgtggaattcaggccgaggcgagccggcagagcaggccggacgcagcagccctctggctccagcatggggcctggccaggctattcgcctggaagctcggcgaattctcaggatggcggctggggctccaggcggctgcggcagctctggtaacgccgtgcggcgggccagctgggctgcccggttcccagctgctgcggaggcaggctgagggcgcaggggctgccgagtgctgtgcacggaagaaacaaagacatcccggcccaaggcgcagcgggagcgcacaggtgccccgcggcccagccgggggataacgcagggcggtcttctgctccatgctcttcctcgggtcaaagcggaccaactaacgcctaaacctcggtattagccagccgcgcagaggatgccgagcactttccgggagcaatcggactcctggtctcctccggggatgcttcgcggtctgttatcgcgtcaggaggaaagaattgctccaaaaatctgcacgcggagcgaaacagtttgaaagggactgaggctcacccaggtctccagcaaacggaggactgaactggggagagtcaccctgagccagcccttccctggactgccggaatcccagcattagcttcctgctgaatgtagtatttggcattctctgaatttatttcctctccttcccccacccagctttctttttatggccccagggggagggggagagagcaaggagatcggtatctttgtaataaaactgcaattttataaatttttcatttgat

SEQ ID NO: 141240 - DNA, 581 bp, Homo sapiens
  Payload ID: 7745
  Gene Symbol: HOXA3
  Gene Name: homeobox A3
  ENST ID: ENST00000522788
  CDS Start-End: 329-581
tccatttgactcttttgcaggctacgtgtgccgcctggccattcaaactgtcaattttaggtccagaagtgtccaaaccacaagttctcaaaactctctgaaaaatggctccctccgagttaagagcgcctggacaccggaaaaggcgattccctgagcgcctggagttggagacaattcctggttcagaatttaaacatctttctaggtctgcgcggggcggccattggcggcggagtgtcacgtgaccgcgggggcgtgccaatgtgcgccctcacgggtgtcaaacccctgtcagagtgtgcgatcaagatcgtgaaacaacgcgatgcaaaaagcgacctactacgacagctcggcgatctacggtggctacccctaccaggcagccaacgggttcgcttataatgccaatcagcagccgtacccggcgtccgccgctttgggcgccgacggcgagtaccaccgacccgcctgctccctccagtctccctccagcgccgggggccaccccaaggcacacgaactgagtgaggcgtgcctgcgcaccctgagcgccccacctagccagcctccaagcc

SEQ ID NO: 141241 - DNA, 503 bp, Homo sapiens
  Payload ID: 7745
  Gene Symbol: HOXA3
  Gene Name: homeobox A3
  ENST ID: ENST00000522456
  CDS Start-End: 342-503
cccagtcggccctgggcgagccgtgctggagcagcgaggcggccacgctctgcgcggcggtgaccgggcctcggggtctccagcccgcctgccatctcggctgatgctgagggtccgtgcccatcccgcgccgaggggacccggccgggccgccaagccaggccgggggccagagcccgtgtcggagcctgagcccgagcctgcgctcgtcagaagttaaggtctgcgcggggcggccattggcggcggagtgtcacgtgaccgcgggggcgtgccaatgtgcgccctcacgggtgtcaaacccctgtcagagtgtgcgatcaagatcgtgaaacaacgcgatgcaaaaagcgacctactacgacagctcggcgatctacggtggctacccctaccaggcagccaacgggttcgcttataatgccaatcagcagccgtacccggcgtccgccgctttgggcgccgacggcgagtaccaccgacccgcctgctccctccagtct

SEQ ID NO: 141242 - DNA, 3396 bp, Homo sapiens
  Payload ID: 7745
  Gene Symbol: HOXA3
  Gene Name: homeobox A3
  Uniprot ID: O43365
  ENST ID: ENST00000612286
  CDS Start-End: 340-1671
ttcttgcaaataatgtggtctcaggcaaggacacagcatcttggctgtctgctaaaaaaaaaaaatgcctagactctcagtggaaattgagtgtcaagctgcaaaatctcaaatggcagactatcatcatttaagagcgcctggacaccggaaaaggcgattccctgagcgcctggagttggagacaattcctggttcagaatttaaacatctttctaggtctgcgcggggcggccattggcggcggagtgtcacgtgaccgcgggggcgtgccaatgtgcgccctcacgggtgtcaaacccctgtcagagtgtgcgatcaagatcgtgaaacaacgcgatgcaaaaagcgacctactacgacagctcggcgatctacggtggctacccctaccaggcagccaacgggttcgcttataatgccaatcagcagccgtacccggcgtccgccgctttgggcgccgacggcgagtaccaccgacccgcctgctccctccagtctccctccagcgccgggggccaccccaaggcacacgaactgagtgaggcgtgcctgcgcaccctgagcgccccacctagccagcctccaagcctgggagagccgcccctgcacccgccgccgccccaggccgcgccccctgccccacagccgcctcagcccgcacctcagccccctgcacctacccctgccgcgcccccgcctccctcttctgcctcccctcctcagaatgccagcaacaaccctacccctgccaacgcggccaagagccccctgctcaactcacccacagtggccaaacaaatcttcccctggatgaaagagtctcgacaaaacacaaagcagaaaaccagcagctccagctcaggcgaaagctgcgctggcgacaagagcccgccggggcaggcttcgtccaagcgcgcgcgcacggcctacacgagcgcgcagctggtggagctggagaaagagttccacttcaaccgctacctgtgccggccgcgccgggtggagatggccaatctgctgaacctcactgagcgccagatcaagatctggttccagaatcgccgcatgaagtacaaaaaggatcagaagggcaagggcatgctaacgtcatcggggggccagtctccaagtcgcagccccgtgccccccggagccggtggctatctgaactctatgcattcgctggtcaacagcgtcccgtatgagccccagtcgcccccgcccttctccaagcccccccagggtacctacgggctgccccccgcctcctaccctgcgtccctgcccagctgcgcacccccgccacccccacagaagcgctacacggcggcaggggcgggcgcagggggcacccccgactatgacccgcacgctcatggcctgcagggcaacggcagctatgggaccccacacatacagggaagccccgtcttcgtggggggcagctatgtggagcccatgagcaactccgggccagccctctttggtctaactcacctcccccacgctgcctcgggcgccatggactatgggggtgccgggccgctgggcagcggccaccaccacgggccggggcctggggagccgcaccccacctacacggaccttaccggccaccatccttctcagggaagaattcaggaagcacccaagctcacccacctgtgatagtgggcttggggctacgcgccaggagagtctccccccacccaccttttttctttggttgcttttttttttttttttttttaggttcttcctgccctttccttccttccttttctctcttctccgccccgcactccgtttcccggtttcccccctcgttggtaaggcgtttttatagtttatgtgacgtagcaatcttggttgctggaatggctgtatcatagcgatatttatctcttcctgctcctcgataggccactggccctgcaccctttaccttctccactctttgatcagaaacagggtatatgaacaaattttctagtcgagttttcaatgtgaatttgttcttacattatggctcccgaggggaagcgattactttttttaattttaaattttttttttaattgcacttcttgtaaagagtgagaaaaaaaatcaaaggcgctttgaaacaggggctctctgtgcaaggatgactaagtgtacgtctttccgtgtgtgtatgctggtgaacagtcagatttatttatatttttttgcaagcattgaataatctaagttttaaatattatttatccccatccgttcgtatttatattaaagaattctgtaccctgatggttcagaagggttcttgggccttttgttcaattgtgtattggcgtacttagaattttttttatttgaaagagaaatataattcctttaaacggtaacgatacaataaaaccagagaagatccagcttttgaaaacagtgatttaggtttgtaacatccggcaaaactgaaaaaaaaaatctgtaaacgcgaaaaatactagatttgttttgagagttcttcattccttgctgctcacattctgagaaacaaaaagaaataaagtttttattctgaataatatccgtgttaagaaggggttctttggccgaagacgtgggtctgcgtggaattcaggccgaggcgagccggcagagcaggccggacgcagcagccctctggctccagcatggggcctggccaggctattcgcctggaagctcggcgaattctcaggatggcggctggggctccaggcggctgcggcagctctggtaacgccgtgcggcgggccagctgggctgcccggttcccagctgctgcggaggcaggctgagggcgcaggggctgccgagtgctgtgcacggaagaaacaaagacatcccggcccaaggcgcagcgggagcgcacaggtgccccgcggcccagccgggggataacgcagggcggtcttctgctccatgctcttcctcgggtcaaagcggaccaactaacgcctaaacctcggtattagccagccgcgcagaggatgccgagcactttccgggagcaatcggactcctggtctcctccggggatgcttcgcggtctgttatcgcgtcaggaggaaagaattgctccaaaaatctgcacgcggagcgaaacagtttgaaagggactgaggctcacccaggtctccagcaaacggaggactgaactggggagagtcaccctgagccagcccttccctggactgccggaatcccagcattagcttcctgctgaatgtagtatttggcattctctgaatttatttcctctccttcccccacccagctttctttttatggccccagggggagggggagagagcaaggagatcggtatctttgtaataaaactgcaattttataaatttttca

SEQ ID NO: 141243 - DNA, 1747 bp, Homo sapiens
  Payload ID: 7746
  Gene Symbol: HOXA4
  Gene Name: homeobox A4
  Uniprot ID: Q00056
  ENST ID: ENST00000360046
  CDS Start-End: 67-1029
ggcctcggcaagcccagaaaaaacgacaacgcgagaaaaattagtatttttgcacttcacaaattaatgaccatgagctcgtttttgataaactccaactacatcgagcccaagttccctcccttcgaggagtacgcgcagcacagcggctcgggcggcgcagacggcggcccgggcgggggccccggctaccagcagcccccagcgcccccgacccagcacctgccgctgcagcagccccagctccctcacgcgggcggcggccgagagcccactgcctcctactacgcgccgcggaccgcccgcgagcccgcctaccctgctgccgcgctgtaccccgcgcatggggccgcggacaccgcctacccctatggctaccgcggcggcgccagccccgggcggccgccccagcccgagcagcccccggcgcaagccaagggcccagcgcacggcctgcatgcgagccacgtcctgcagccccagctgccgccgcccctgcagcctcgcgccgtgcccccagcggccccgcggcgctgcgaggcggcccccgccaccccaggcgtcccggcagggggcagcgcccccgcgtgcccgctgctcttggccgacaagagcccgctgggcctgaagggcaaggagcccgtggtgtacccctggatgaagaagatccatgtcagcgccgttaaccccagttataacggaggggagcctaagcgctctcgaaccgcctacacccggcagcaggtcttggagctggagaaggagttccacttcaatcgatacctgacccggcggcgccgcatcgagatcgcccacacgctctgtttgtctgagcgccaggtcaagatctggtttcagaaccggaggatgaagtggaagaaagaccacaaactgcccaacaccaagatgcgatcctccaattcggcctcggcctctgccggcccaccagggaaagcacaaactcagagcccacacctccatccccacccccacccgagcacctccacacccgttccctcctccatataatcttctagagatcttaaccagtttctatcccttacctgcttttctcttctcttctcctgctccgttcctcatccacccctccccatctggaccataatagacaccaaaacaaacccaaattggtgaaaagaataatcaaaaagaagacattatccggttaagagtctgtgctggttgccacccaagagagaacagttgtccaggatgctggctggtggaacaacctgctggcccgaaacaaggctgccaggtgtggatacctgagaaggactacttggtatcaaatacttttgagatggctacagtcagctagctggacagcccatgctgagtggggacatacacttgcatctttgttgaaagcagaagaagacagaccctttccccaccttccttacctcctcttcccccattaaggcagctcatccaagcttgtatttaactgaataaatgagtagacattgtggacctcacaagattatttaattcttaagatgtgtagaccttgatggtaggtgtgacatgttagtttttcttacttgcatttatttaagacactgttacagagatactgttgtccccttctggggcacggtctttggggagaggggagtgcatttagacttatgtggaactgtacaaattgtgatgtggctacatagaaagccatgtgctaagaataaactccatttaaaaaacattaaaaatctaagattca

SEQ ID NO: 141244 - DNA, 1595 bp, Homo sapiens
  Payload ID: 7746
  Gene Symbol: HOXA4
  Gene Name: homeobox A4
  Uniprot ID: Q00056
  ENST ID: ENST00000428284
  CDS Start-End: 1-963
atgaccatgagctcgtttttgataaactccaactacatcgagcccaagttccctcccttcgaggagtacgcgcagcacagcggctcgggcggcgcagacggcggcccgggcgggggccccggctaccagcagcccccagcgcccccgacccagcacctgccgctgcagcagccccagctccctcacgcgggcggcggccgagagcccactgcctcctactacgcgccgcggaccgcccgcgagcccgcctaccctgctgccgcgctgtaccccgcgcatggggccgcggacaccgcctacccctatggctaccgcggcggcgccagccccgggcggccgccccagcccgagcagcccccggcgcaagccaagggcccagcgcacggcctgcatgcgagccacgtcctgcagccccagctgccgccgcccctgcagcctcgcgccgtgcccccagcggccccgcggcgctgcgaggcggcccccgccaccccaggcgtcccggcagggggcagcgcccccgcgtgcccgctgctcttggccgacaagagcccgctgggcctgaagggcaaggagcccgtggtgtacccctggatgaagaagatccatgtcagcgccgttaaccccagttataacggaggggagcctaagcgctctcgaaccgcctacacccggcagcaggtcttggagctggagaaggagttccacttcaatcgatacctgacccggcggcgccgcatcgagatcgcccacacgctctgtttgtctgagcgccaggtcaagatctggtttcagaaccggaggatgaagtggaagaaagaccacaaactgcccaacaccaagatgcgatcctccaattcggcctcggcctctgccggcccaccagggaaagcacaaactcagagcccacacctccatccccacccccacccgagcacctccacacccgttccctcctccatataatcttctagagatcttaaccagtttctatcccttacctgcttttctcttctcttctcctgctccgttcctcatccacccctccccatctggaccataatagacaccaaaacaaacccaaattggtgaaaagaataatcaaaaagaagacattatccggttaagagtctgtgctggttgccacccaagagagaacagttgtccaggatgctggctggtggaacaacctgctggcccgaaacaaggctgccaggtgtgggacagcccatgctgagtggggacatacacttgcatctttgttgaaagcagaagaagacagaccctttccccaccttccttacctcctcttcccccattaaggcagctcatccaagcttgtatttaactgaataaatgagtagacattgtggacctcacaagattatttaattcttaagatgtgtagaccttgatggtaggtgtgacatgttagtttttcttacttgcatttatttaagacactgttacagagatactgttgtccccttctggggcacggtctttggggagaggggagtgcatttagacttatgtggaactgtacaaattgtgatgtggctacatagaaagccatgtgctaagaataaactccattt

SEQ ID NO: 141245 - DNA, 982 bp, Homo sapiens
  Payload ID: 7746
  Gene Symbol: HOXA4
  Gene Name: homeobox A4
  ENST ID: ENST00000511914
  CDS Start-End: 1-421
caagagcccgctgggcctgaagggcaaggagcccgtggtgtacccctggatgaagaagatccatgtcagcgccgttaaccccagttataacggaggggagcctaagcgctctcgaaccgcctacacccggcagcaggtcttggagctggagaaggagttccacttcaatcgatacctgacccggcggcgccgcatcgagatcgcccacacgctctgtttgtctgagcgccaggtcaagatctggtttcagaaccggaggatgaagtggaagaaagaccacaaactgcccaacaccaagatgcgatcctccaattcggcctcggcctctgccggcccaccagggaaagcacaaactcagagcccacacctccatccccacccccacccgagcacctccacacccgttccctcctccatataatcttctagagatcttaaccagtttctatcccttacctgcttttctcttctcttctcctgctccgttcctcatccacccctccccatctggaccataatagacaccaaaacaaacccaaattggtgaaaagaataatcaaaaagaagacattatccggttaagagtctgtgctggttgccacccaagagagaacagttgtccaggatgctggctggtggaacaacctgctggcccgaaacaaggctgccaggtgtggatacctgagaaggactacttggtatcaaatacttttgagatggctacagtcagctagctggacagcccatgctgagtggggacatacacttgcatctttgttgaaagcagaagaagacagaccctttccccaccttccttacctcctcttcccccattaaggcagctcatccaagcttgtatttaactgaataaatgagtagacattgtggacctcacaagattatttaattcttaagatgtgtagaccttgatggtaggtgtgacatgttagtttttcttacttgcatttatttaagacactgt

SEQ ID NO: 141246 - DNA, 1728 bp, Homo sapiens
  Payload ID: 7746
  Gene Symbol: HOXA4
  Gene Name: homeobox A4
  Uniprot ID: Q00056
  ENST ID: ENST00000610970
  CDS Start-End: 48-1010
aaaacgacaacgcgagaaaaattagtatttttgcacttcacaaattaatgaccatgagctcgtttttgataaactccaactacatcgagcccaagttccctcccttcgaggagtacgcgcagcacagcggctcgggcggcgcagacggcggcccgggcgggggccccggctaccagcagcccccagcgcccccgacccagcacctgccgctgcagcagccccagctccctcacgcgggcggcggccgagagcccactgcctcctactacgcgccgcggaccgcccgcgagcccgcctaccctgctgccgcgctgtaccccgcgcatggggccgcggacaccgcctacccctatggctaccgcggcggcgccagccccgggcggccgccccagcccgagcagcccccggcgcaagccaagggcccagcgcacggcctgcatgcgagccacgtcctgcagccccagctgccgccgcccctgcagcctcgcgccgtgcccccagcggccccgcggcgctgcgaggcggcccccgccaccccaggcgtcccggcagggggcagcgcccccgcgtgcccgctgctcttggccgacaagagcccgctgggcctgaagggcaaggagcccgtggtgtacccctggatgaagaagatccatgtcagcgccgttaaccccagttataacggaggggagcctaagcgctctcgaaccgcctacacccggcagcaggtcttggagctggagaaggagttccacttcaatcgatacctgacccggcggcgccgcatcgagatcgcccacacgctctgtttgtctgagcgccaggtcaagatctggtttcagaaccggaggatgaagtggaagaaagaccacaaactgcccaacaccaagatgcgatcctccaattcggcctcggcctctgccggcccaccagggaaagcacaaactcagagcccacacctccatccccacccccacccgagcacctccacacccgttccctcctccatataatcttctagagatcttaaccagtttctatcccttacctgcttttctcttctcttctcctgctccgttcctcatccacccctccccatctggaccataatagacaccaaaacaaacccaaattggtgaaaagaataatcaaaaagaagacattatccggttaagagtctgtgctggttgccacccaagagagaacagttgtccaggatgctggctggtggaacaacctgctggcccgaaacaaggctgccaggtgtggatacctgagaaggactacttggtatcaaatacttttgagatggctacagtcagctagctggacagcccatgctgagtggggacatacacttgcatctttgttgaaagcagaagaagacagaccctttccccaccttccttacctcctcttcccccattaaggcagctcatccaagcttgtatttaactgaataaatgagtagacattgtggacctcacaagattatttaattcttaagatgtgtagaccttgatggtaggtgtgacatgttagtttttcttacttgcatttatttaagacactgttacagagatactgttgtccccttctggggcacggtctttggggagaggggagtgcatttagacttatgtggaactgtacaaattgtgatgtggctacatagaaagccatgtgctaagaataaactccatttaaaaaacattaaaaatctaagattca

SEQ ID NO: 141247 - DNA, 1657 bp, Homo sapiens
  Payload ID: 7747
  Gene Symbol: HOXA5
  Gene Name: homeobox A5
  Uniprot ID: P20719
  ENST ID: ENST00000222726
  CDS Start-End: 62-874
gggtgctatagacgcacaaacgaccgcgagccacaaatcaagcacacatatcaaaaaacaaatgagctcttattttgtaaactcattttgcggtcgctatccaaatggcccggactaccagttgcataattatggagatcatagttccgtgagcgagcaattcagggactcggcgagcatgcactccggcaggtacggctacggctacaatggcatggatctcagcgtcggccgctcgggctccggccactttggctccggagagcgcgcccgcagctacgctgccagcgccagcgcggcgcccgccgagcccaggtacagccagccggccacgtccacgcactctcctcagcccgatccgctgccctgctccgccgtggccccctcgcccggcagcgacagccaccacggcgggaaaaactccctaagcaactccagcggcgcctcggccgacgccggcagcacccacatcagcagcagagagggggttggcacggcgtccggagccgaggaggacgcccctgccagcagcgagcaggcgagtgcgcagagcgagccgagcccggcgccgcccgcccaaccccagatctacccctggatgcgcaagctgcacataagtcatgacaacataggcggcccggaaggcaaaagggcccggacggcctacacgcgctaccagaccctggagctggagaaggagttccacttcaaccgttacctgacccgcagaaggaggattgaaatagcacatgctctttgcctctccgagagacaaattaaaatctggttccaaaaccggagaatgaagtggaaaaaagataataagctgaaaagcatgagcatggccgcggcaggaggggccttccgtccctgagtatctgagcgtttaaagtactgagcagtattagcggatcccgcgtagtgtcagtactaaggtgactttctgaaactcccttgtgttccttctgtgaagaagccctgttctcgttgccctaattcatcttttaatcatgagcctgtttattgccattatagcgcctgtataagtagatctgctttctgttcatctctttgtcctgaatggctttgtcttgaaaaaaaatagatgttttaacttatttatatgaagcaagctgtgttacttgaagtaactataacaaaaaaagaaaagagaaaaaaaaacacacaaaaagtcccccttcaatctcgtttagtgccaatgttgtgtgttgcactcaagttgtttaactgtgcatgtgcgtggaagtgttcctgtctcaatagctccaagctgttaaagatatttttattcaaactacctatattccttgtgtaattaatgctgttgtagaggtgacttgatgagacacaacttgttcgacgtgtagtgactagtgactctgtgatgaaaactgtgactccaagcggtgtgtccctgcgtgcctttataggaccctttgcacgaactctggaagtggctcttataagcgcagcttcagtgatgtatgtttttgtgaacaaagttacaaatattgtccaagtctggctgttttaagcaaactgtgatcagcttttttttttttttttttttttttgtatttgtttttaaggaaaaaatactgactggaacaaaaaataaactttctattgtaagttc

SEQ ID NO: 141248 - DNA, 989 bp, Homo sapiens
  Payload ID: 7748
  Gene Symbol: HOXA6
  Gene Name: homeobox A6
  Uniprot ID: P31267
  ENST ID: ENST00000222728
  CDS Start-End: 26-727
cacagtcctgcagaggggcgcgcaaatgagttcctattttgtgaatcccactttccccgggagccttcccagcggccaggactccttcttgggccagctgcccctctaccaggctggctatgacgcgctgaggcccttcccggcctcgtacggggcgtcgagtctcccggacaagacgtacacctcaccttgtttctaccaacagtccaactcggtcctggcctgcaaccgggcgtcctacgagtacggggcctcgtgtttctattctgataaggacctcagtggcgcctcgccctcgggcagtggcaagcagaggggccccggggactacctgcacttttctcccgagcagcagtacaaacccgacagcagcagcgggcagggcaaagcactccatgacgaaggcgccgaccggaagtacacgagcccggtttacccttggatgcagcggatgaactcctgcgcgggtgctgtgtatgggagccatgggcgccgaggccgccagacctacacgcgctaccagacactggagctggagaaggagttccacttcaaccgctacctgacacggcgccgccgcatcgagatcgccaacgcgctctgcctcaccgagcgccagatcaagatctggttccagaaccgccgcatgaagtggaaaaaggaaaacaagctcatcaattccacgcagcccagcggggaggactcagaggcaaaggcgggcgagtagatgcctgggcagggaccaggccagcgctgcaacctccttcggctttgcccccttgccctcgcctgttccccaacttttctccccgcctgctcccatctgggggcttccgcagcttcaggggagcccggagctttgcaagcgtctgtgcatttatttcttacaaaacaaaacaaaacaaaacaaaacaaaacaaaacaaaacaaaacaaaacctcacacacagccaataccagcggtggagcggggcgcactgcacacaccca

SEQ ID NO: 141249 - DNA, 2018 bp, Homo sapiens
  Payload ID: 7749
  Gene Symbol: HOXA7
  Gene Name: homeobox A7
  Uniprot ID: P31268
  ENST ID: ENST00000242159
  CDS Start-End: 133-825
gtgctgcggcgagctccgtccaaaagaaaatggggtttggtgtaaatctgggggtgtaatgttatcatatatcactctacctcgtaaaaccgacactgaaagctgccggacaacaaatcacaggtcaaaattatgagttcttcgtattatgtgaacgcgctttttagcaaatatacggcgggggcttctctgttccaaaatgccgagccgacttcttgctcctttgctcccaactcacagagaagcggctacggggcgggcgccggcgccttcgcctcgaccgttccgggcttatacaatgtcaacagccccctttatcagagcccctttgcgtccggctacggcctgggcgccgacgcctacggcaacctgccctgcgcctcctacgaccaaaacatccccgggctctgcagtgacctcgccaaaggcgcctgcgacaagacggacgagggcgcgctgcatggcgcggctgaggccaatttccgcatctacccctggatgcggtcttcaggacctgacaggaagcggggccgccagacctacacgcgctaccagacgctggagctggagaaggagttccacttcaaccgctacctgacgcggcgccgccgcattgaaatcgcccacgcgctctgcctcaccgagcgccagattaagatctggttccagaaccgccgcatgaagtggaagaaagagcataaggacgaaggtccgactgccgccgcagctcccgagggcgccgtgccctctgccgccgccactgctgccgcggacaaggccgacgaggaggacgatgatgaagaagaggaagacgaggaggaatgaggggccgatccggggccctctctgcaccggacagtcggaaaagcgtctttaagagactcactggttttacttacaaaaatgggaaaaataaaagaaaatgtaaaaaacaaaaacaaaaacaaaaaagcaacccagtccccaacctgcactctacccacccccatcacctactccagctcccaacttttgtggactgagcggccgcagagactgggtcgccttggattccctctgcctccgaggaccccaaaagacacccccaaccccaggccagccggccctgctctggcgcgtccaaaatactacctagcacaggcctctgctcgaggcacccccaaactacctatgtatccagccccagagggcctccattcccaggaagtccctatgtatcccaacactggcagacacccagcaccaccctcccagacccgcaagaaagtgaatctcactactacctactcccctaaaactacctattttgtgctggctggcttgcctgctacctagtgccgactgctcccaggcaagtcccctgctgcttacagcccgcagcttttggggtccctgaggctgccctgagaatgtgctgaggtccaggatcagggtattggcatctatttaaatcgaaaaataatatatttattccaaaaagcatcctaagtgcttgcaccctagaatcaatccctccttctctggcttggcacccacagctcaggcccatcaacccccacttctggaggggaatgttcctgagctggctgcagatctgtgggttagcttctgcttagcaggactgtggagatgcttccagcttcgctgtcctttcctctggctcctgtatcttactgttcagctgtgttaaatatgtacgccctgatgtttcctataatagcagatactgtatatttgaacaagatttttttttatcatttctatagtcttggagttcatttgtaaggcagtgtcttgacttggaaaggatgtgttaatggggtgactttgtagcatggtatgttgtcttgagttaactgtagtgggtggggaggtccaatgccctccgcaatgcccttcatctcctgtgttgtcctgtaccctgctcagctccatcctggggttcagggaaggcacacttcccagcccagctgtgttttatgtaaccgaaaataaagatgcgtggtgacaaagaaaaa

SEQ ID NO: 141250 - DNA, 585 bp, Homo sapiens
  Payload ID: 7749
  Gene Symbol: HOXA7
  Gene Name: homeobox A7
  ENST ID: ENST00000519842
  CDS Start-End: 494-585
gggcagtttatgaggcgtttaggggaagggttctccccaccatcctccaccgagcggtgggcggcaggggcttcagctggtgcaacatggtgcaggggtcggaggcctggaagggcggataaacagtgtgcctccgattaaggaaaggaagctgggagacgttgactttattcgaaccacatggctccagtttgcggtggcaatctctctgcagctgcaagagatgctgcgccttccccgtctggatccgagtctaagtccggcctgtcgcccactggacctgggcggctgcgggccctgcggagcgagaccacctgtgaggactgctgagattggcggaggcggtcatgtgggcggtcacgtgctgcggcgagctccgtccaaaagaaaatggggtttggtgtaaatctgggggtgtaatgttatcatatatcactctacctcgtaaaaccgacactgaaagctgccggacaacaaatcacaggtcaaaattatgagttcttcgtattatgtgaacgcgctttttagcaaatatacggcgggggcttctctgttccaaaatgccgagccgacttcttgctcctt

SEQ ID NO: 141251 - DNA, 2060 bp, Homo sapiens
  Payload ID: 7750
  Gene Symbol: HOXA9
  Gene Name: homeobox A9
  Uniprot ID: P31269
  ENST ID: ENST00000343483
  CDS Start-End: 74-892
agttgttacatgaaatctgcagtttcataatttccgtgggtcgggccgggcgggccaggcgctgggcacggtgatggccaccactggggccctgggcaactactacgtggactcgttcctgctgggcgccgacgccgcggatgagctgagcgttggccgctatgcgccggggaccctgggccagcctccccggcaggcggcgacgctggccgagcaccccgacttcagcccgtgcagcttccagtccaaggcgacggtgtttggcgcctcgtggaacccagtgcacgcggcgggcgccaacgctgtacccgctgcggtgtaccaccaccatcaccaccacccctacgtgcacccccaggcgcccgtggcggcggcggcgccggacggcaggtacatgcgctcctggctggagcccacgcccggtgcgctctccttcgcgggcttgccctccagccggccttatggcattaaacctgaaccgctgtcggccagaaggggtgactgtcccacgcttgacactcacactttgtccctgactgactatgcttgtggttctcctccagttgatagagaaaaacaacccagcgaaggcgccttctctgaaaacaatgctgagaatgagagcggcggagacaagccccccatcgatcccaataacccagcagccaactggcttcatgcgcgctccactcggaaaaagcggtgcccctatacaaaacaccagaccctggaactggagaaagagtttctgttcaacatgtacctcaccagggaccgcaggtacgaggtggctcgactgctcaacctcaccgagaggcaggtcaagatctggttccagaaccgcaggatgaaaatgaagaaaatcaacaaagaccgagcaaaagacgagtgatgccatttgggcttatttagaaaaaagggtaagctagagagaaaaagaaagaactgtccgtcccccttccgccttctcccttctctcacccccaccctagcctccaccatccccgcacaaagcggctctaaacctcaggccacatcttttccaaggcaaaccctgttcaggctggctcgtaggcctgccgctttgatggaggaggtattgtaagctttccattttctataagaaaaaggaaaagttgaggggggggcattagtgctgatagctgtgtgtgttagcttgtatatatatttttaaaaatctacctgttcctgacttaaaacaaaaggaaagaaactacctttttataatgcacaactgttgatggtaggctgtatagtttttagtctgtgtagttaatttaatttgcagtttgtgcggcagattgctctgccaagatacttgaacactgtgttttattgtggtaattatgttttgtgattcaaacttctgtgtactgggtgatgcacccattgtgattgtggaagatagaattcaatttgaactcaggttgtttatgaggggaaaaaaacagttgcatagagtatagctctgtagtggaatatgtcttctgtataactaggctgttaacctatgattgtaaagtagctgtaagaatttcccagtgaaataaaaaaaaattttaagtgttctcggggatgcatagattcatcattttctccaccttaaaaatgcgggcatttaagtctgtccattatctatatagtcctgtcttgtctattgtatatataatctatatgattaaagaaaatatgcataatcagacaagcttgaatattgtttttgcaccagacgaacagtgaggaaattcggagctatacatatgtgcagaaggttactacctagggtttatgcttaattttaattggaggaaatgaatgctgattgtaacggagttaattttattgataataaattatacactatgaaaccgccattgggctactgtagatttgtatccttgatgaatctggggtttccatcagactgaacttacactgtatattttgcaatagttacctcaaggcctactgaccaaattgttgtgttgagatgatatttaactttttgccaaataaaatatattgattcttttctattt

SEQ ID NO: 141252 - DNA, 797 bp, Homo sapiens
  Payload ID: 7750
  Gene Symbol: HOXA9
  Gene Name: homeobox A9
  ENST ID: ENST00000396345
  CDS Start-End: 70-390
gttacatgaaatctgcagtttcataatttccgtgggtcgggccgggcgggccaggcgctgggcacggtgatggccaccactggggccctgggcaactactacgtggactcgttcctgctgggcgccgacgccgcggatgagctgagcgttggccgctatgcgccggggaccctgggccagcctccccggcaggcggcgacgctggccgagcaccccgacttcagcccgtgcagcttccagtccaaggcgacggtgtttggcgcctcgtggaacccagtgcacgcggcgggcgccaacgctgtacccgctgcggtgtaccaccaccatcaccaccacccctacgtgcacccccaggcgcccgtggcggcggcggcgccggacggcagttgatagagaaaaacaacccagcgaaggcgccttctctgaaaacaatgctgagaatgagagcggcggagacaagccccccatcgatcccaataacccagcagccaactggcttcatgcgcgctccactcggaaaaagcggtgcccctatacaaaacaccagaccctggaactggagaaagagtttctgttcaacatgtacctcaccagggaccgcaggtacgaggtggctcgactgctcaacctcaccgagaggcaggtcaagatctggttccagaaccgcaggatgaaaatgaagaaaatcaacaaagaccgagcaaaagacgagtgatgccatttgggcttatttagaaaaaagggtaagctagagagaaaaagaaagaactgtccgtcccccttccgccttctccctt

SEQ ID NO: 141253 - DNA, 4971 bp, Homo sapiens
  Payload ID: 7751
  Gene Symbol: HOMEZ
  Gene Name: homeobox and leucine zipper encoding
  Uniprot ID: Q8IX15
  ENST ID: ENST00000357460
  CDS Start-End: 166-1818
aacttgctcgagcagggctgggtagaccggcgcgctcccggggacggtggggggggcagtcccggtttcggccatcgctggggtgggctcggagcggccgcaccgggcagcaaccccactcccactcggaggccccctgccctctcccccacttccccccggcccatggtgcgaggctgggagccgccgcccgggctggactgcgctatctctgaagggcacaaatcagaaggcaccatgcctcctaataaagaggccagcggtctcagtagttcaccagcggggctcatctgcctccctccaatctctgaggagctacagcttgtgtggacgcaagcagcccagaccagtgagctagacagcaatgaacacctgctcaaaaccttcagctactttccctatcccagcctagcagacattgcccttctctgcctacgttatgggttgcagatggagaaagtcaagacttggtttatggcccagcgcctccgctgtggtattagctggtcatctgaagaaatagaagagactcgagcccgagtagtctaccgtcgggaccaactccatttcaaatcccttctctcttttactcatcatgcgggacggcccccagaggaggtgcctcctcctccagtgccagctccagagcaagttggtattggaataggtcctccaactcttagcaagcctacccagacgaaaggattgaaggtagagcctgaggagccctctcagatgccaccactgccacagagtcaccagaaattaaaggagtccctgatgacacctggcagtggagcattcccctaccaatcagatttttggcaacatcttcaaagcagtggcctctcaaaggagcaggcaggcaggggtcccaaccagtcacatggcataggtactgcttcctggaaccactccacaaccgtcccccagccacaagctcgggataaacccccaccaattgcattaattgccagtagttgtaaggaggagtcagcatctagtgttactccctcttcttcctctacctcttcttctttccaggtactggctaatggagctactgccgcctctaaacccctccagccactaggctgtgtcccacagtcagtgtcacccagtgaacaggcattacccccacatctggaaccagcctggccccaagggctacggcataactcagtaccaggtagagttggccccacagagtacctttccccagatatgcaacgccagcgaaagaccaagcgcaaaaccaaagagcagctggctatccttaaatccttttttttacagtgccagtgggcacggcgtgaggattaccaaaagttagaacagatcactggtttacctcggcctgagatcattcagtggtttggtgacacacgctatgccttgaagcatgggcaactaaagtggtttcgggacaacgcagtacctggtgcccctagtttccaagacccagcaattcctacaccaccaccatcaacccgctccttgaacgaaagggctgagacaccacctctgccgatccctccacccccaccggatatacaacccttggagaggtactgggcagcccaccaacagctacgggaaactgatatccctcaattgagtcaggcatcaaggcttagcacccagcaggtgctggattggtttgactctcgattacctcagccagctgaggtggtagtttgtctagatgaagaagaggaagaggaggaggaagaactgccagaagatgatgaggaagaggaggaggaggaggaggaagatgatgatgatgatgatgatgatgtgatcatacaagactgagtggggagctgggggaggggaggtctgttactgaaagatgaaccaacttagtaactgtttaaacaaagaaaccacatttttaaaattaccttgtggcagagaactaaaaagctttgtgttcttcagggtgggtggcagggggatatagtgagggtggaccagggagaatgaccatagggcactaagtaaggctgggattggatcagcagaaatccaaccctctaaccttagggtagggagtgctaaggatctggggaaaccatgggctgggaagctgctcttgctctcctcgtgtctgctgtttttttcccttggtgtactatacagaggccagatgttggcaccacctctccaggaggattggaaaggaggagtaaaggattctgatttgattgatgattccagtgcatccccaatcccaccatcttacctggaatataaggctgccttgtaccccttttctgagcacaagtctgtgcgtaatgcaactgactctcttacttttttcttagtaactgatcatttcctagacaaccaagattctcaataagtcccagtctcatcacaaatattaatatttccttttcctcataccaacttgactatgtttcacccgcttcatgactaaatcacaggtggcagaatttttcagttcttttttttttttttgaggtggagtcttgctctgtcgcccaggctgtagtgcaatggcgcaatctcagctcactgcaagctccgcctcccaggttcatgccattctcctgcctcagcctcccgagtagctgggactacaggcacctgccaccacacccggctacttttttatatttttagtagagacgggtttcatcatgttagccaggatggtcttgatctcctgacctcatgatccgcccaccttggcctcccaaagtgctgggattataggcatgagccaccgtgcccggctattttcagttcttatgctgtgaccactttgccttgtagctttttctatctttccaaaatcctcactctgttcattgtttgtctcagggaaaatcttcccccaccgagcttgtaaaaaactttaataattgggtggagaataatttagaatggatatttattggaggtggtaattagggaagatgtccttttaaacagtagaattgtgttacaaaggggtgaaagagagggaatagtttctccttgttgaagggcagtgaaggtaggtttcaggtttggttttacaaacctgttaactacctcctgtccagcttgacagagactaatttttcatctttttgctgtcaatttgtttccagaaaagagacttttccctctcttgataggatctgtcttagggacagagggaccatcgtctttaagtgaattaattattgatgttttagaatggttttcatcagttgggatcagctatatggcaaataggtatcatcaatgagttaaccatctaaaaataaaagagtggaagccctaaaatgctagaataataataaaaaggccaaaaataaaattgtttctctctcaaccactttgccactcctatggtttagggattaatggaaccaaatccattaacattctaactcagcatacttttaacttattgtttggaggggcaggacttattgaggtaaattaaaagaacaaaaactgtaaaaaggaagtagttcagcatctatcgccagccaggttgtttctcagccatcaaatgataatgactaaaatttctgaggcttcaggagtaacagagatacaacagtcttggaggtaactccatttgctacaggacaggcccttgcctaaaagagaaggtatctagaaatgcctttaaaataaattcagagtaccagaaagggtatggggatcctagttcagatacaagatcattcccaagacctaatttatttctggcagatgcctgctattttctgtttttccagtatttttgcttaaggccagcttgtgagtggctaacctatttaattcgtcatttctgccttttaaaacccaaagtagaatacatgtttgatctcagtgatagtgttgttcgcccattccaccattctagagcttgtaaaagtgatagaattgtagcaataaaagggcatcgtctttattttactatctatatactaagctgaaaatcagtgtctccaacagttgttttcaatagaaaggaaaattaacatttaatagtaactaagcatagaggaaataatagacaaataaaaaagtataataaggaaaagaacagagatattgctcgttaacattggcaatgggacagtatatccaaagctaaaaatgaaatccagaaatgaaacagtgatgagtatatgatccatcacaatccccattcccaactcccaaccaagcatgatgccaagaattatttttttgacctttgttccaaattgtaggaaatgaggggagctaccagtgtcttctggaagagatataaacatcttcctgaagcactagccttttgtaagacctgaccactgtcctgggaggtgataagggtgaatagggtaaagatggggggagcataaggtacagagtgaaactaggaaacaatgcagggatacattttccagggccatcacccctaatgcgtactggaagctacagtccatccttcagcagcatgtatagatcagatcttgaagatgatctatctagaagtggtccatgcttctctcccactgggtaatcccatatgcctccgttgttggtagagagtctgcagcagaggacaagaaggtagatgtgggtgtttataacagcaaaaagggcaagcaagtctctctgacctgttgtatgaagcttatcgagacagacaccactgcttttgcttccccatagttttcttcattgcatgataactaacttttccaaactaggatttgctacatctagtgtgacaatctctggaacatttcagtagcttatggtgataataataaggatgaatatttgaaaattaaactattttggaaaatctgggacatatgactaccacacccagagatgactaccagggaggcagagttcttaggcctctgaggaggtggcatttccttcaataactttaaaattttttcacattttcggttgtttgtttgtttgtttgtttgttgtttt

SEQ ID NO: 141254 - DNA, 3337 bp, Homo sapiens
  Payload ID: 7751
  Gene Symbol: HOMEZ
  Gene Name: homeobox and leucine zipper encoding
  Uniprot ID: Q8IX15
  ENST ID: ENST00000561013
  CDS Start-End: 160-1818
ggaaaagaagcagttcctgatgttacaaatgaacaaggatctcccagggaagccctaccctgagaataacagatgcctcctcattacatcataatggccaagttgtgatgtcggcacagagaatttactcttcactaagtgttgtaagtgaaacaagatatgctgaagagcagaatcagcatgaggagcagacaccccaggagagctatctctgaagggcacaaatcagaaggcaccatgcctcctaataaagaggccagcggtctcagtagttcaccagcggggctcatctgcctccctccaatctctgaggagctacagcttgtgtggacgcaagcagcccagaccagtgagctagacagcaatgaacacctgctcaaaaccttcagctactttccctatcccagcctagcagacattgcccttctctgcctacgttatgggttgcagatggagaaagtcaagacttggtttatggcccagcgcctccgctgtggtattagctggtcatctgaagaaatagaagagactcgagcccgagtagtctaccgtcgggaccaactccatttcaaatcccttctctcttttactcatcatgcgggacggcccccagaggaggtgcctcctcctccagtgccagctccagagcaagttggtattggaataggtcctccaactcttagcaagcctacccagacgaaaggattgaaggtagagcctgaggagccctctcagatgccaccactgccacagagtcaccagaaattaaaggagtccctgatgacacctggcagtggagcattcccctaccaatcagatttttggcaacatcttcaaagcagtggcctctcaaaggagcaggcaggcaggggtcccaaccagtcacatggcataggtactgcttcctggaaccactccacaaccgtcccccagccacaagctcgggataaacccccaccaattgcattaattgccagtagttgtaaggaggagtcagcatctagtgttactccctcttcttcctctacctcttcttctttccaggtactggctaatggagctactgccgcctctaaacccctccagccactaggctgtgtcccacagtcagtgtcacccagtgaacaggcattacccccacatctggaaccagcctggccccaagggctacggcataactcagtaccaggtagagttggccccacagagtacctttccccagatatgcaacgccagcgaaagaccaagcgcaaaaccaaagagcagctggctatccttaaatccttttttttacagtgccagtgggcacggcgtgaggattaccaaaagttagaacagatcactggtttacctcggcctgagatcattcagtggtttggtgacacacgctatgccttgaagcatgggcaactaaagtggtttcgggacaacgcagtacctggtgcccctagtttccaagacccagcaattcctacaccaccaccatcaacccgctccttgaacgaaagggctgagacaccacctctgccgatccctccacccccaccggatatacaacccttggagaggtactgggcagcccaccaacagctacgggaaactgatatccctcaattgagtcaggcatcaaggcttagcacccagcaggtgctggattggtttgactctcgattacctcagccagctgaggtggtagtttgtctagatgaagaagaggaagaggaggaggaagaactgccagaagatgatgaggaagaggaggaggaggaggaggaagatgatgatgatgatgatgatgatgtgatcatacaagactgagtggggagctgggggaggggaggtctgttactgaaagatgaaccaacttagtaactgtttaaacaaagaaaccacatttttaaaattaccttgtggcagagaactaaaaagctttgtgttcttcagggtgggtggcagggggatatagtgagggtggaccagggagaatgaccatagggcactaagtaaggctgggattggatcagcagaaatccaaccctctaaccttagggtagggagtgctaaggatctggggaaaccatgggctgggaagctgctcttgctctcctcgtgtctgctgtttttttcccttggtgtactatacagaggccagatgttggcaccacctctccaggaggattggaaaggaggagtaaaggattctgatttgattgatgattccagtgcatccccaatcccaccatcttacctggaatataaggctgccttgtaccccttttctgagcacaagtctgtgcgtaatgcaactgactctcttacttttttcttagtaactgatcatttcctagacaaccaagattctcaataagtcccagtctcatcacaaatattaatatttccttttcctcataccaacttgactatgtttcacccgcttcatgactaaatcacaggtggcagaatttttcagttcttttttttttttttgaggtggagtcttgctctgtcgcccaggctgtagtgcaatggcgcaatctcagctcactgcaagctccgcctcccaggttcatgccattctcctgcctcagcctcccgagtagctgggactacaggcacctgccaccacacccggctacttttttatatttttagtagagacgggtttcatcatgttagccaggatggtcttgatctcctgacctcatgatccgcccaccttggcctcccaaagtgctgggattataggcatgagccaccgtgcccggctattttcagttcttatgctgtgaccactttgccttgtagctttttctatctttccaaaatcctcactctgttcattgtttgtctcagggaaaatcttcccccaccgagcttgtaaaaaactttaataattgggtggagaataatttagaatggatatttattggaggtggtaattagggaagatgtccttttaaacagtagaattgtgttacaaaggggtgaaagagagggaatagtttctccttgttgaagggcagtgaaggtaggtttcaggtttggttttacaaacctgttaactacctcctgtccagcttgacagagactaatttttcatctttttgctgtcaatttgtttccagaaaagagacttttccctctcttgataggatctgtcttagggacagagggaccatcgtctttaagtgaattaattattgatgttttagaatggttttcatcagttgggatcagctatatggcaaataggtatcatcaatgagttaaccatctaaaaataaaagagtggaagccctaaaatgctagaataataataaaaaggccaaaaataaaa

SEQ ID NO: 141255 - DNA, 972 bp, Homo sapiens
  Payload ID: 7751
  Gene Symbol: HOMEZ
  Gene Name: homeobox and leucine zipper encoding
  ENST ID: ENST00000606731
  CDS Start-End: 1-972
cagatggagaaagtcaagacttggtttatggcccagcgcctccgctgtggtattagctggtcatctgaagaaatagaagagactcgagcccgagtagtctaccgtcgggaccaactccatttcaaatcccttctctcttttactcatcatgcgggacggcccccagaggaggtgcctcctcctccagtgccagctccagagcaagttggtattggaataggtactgcttcctggaaccactccacaaccgtcccccagccacaagctcgggataaacccccaccaattgcattaattgccagtagttgtaaggaggagtcagcatctagtgttactccctcttcttcctctacctcttcttctttccaggtactggctaatggagctactgccgcctctaaacccctccagccactaggctgtgtcccacagtcagtgtcacccagtgaacaggcattacccccacatctggaaccagcctggccccaagggctacggcataactcagtaccaggtagagttggccccacagagtacctttccccagatatgcaacgccagcgaaagaccaagcgcaaaaccaaagagcagctggctatccttaaatccttttttttacagtgccagtgggcacggcgtgaggattaccaaaagttagaacagatcactggtttacctcggcctgagatcattcagtggtttggtgacacacgctatgccttgaagcatgggcaactaaagtggtttcgggacaacgcagtacctggtgcccctagtttccaagacccagcaattcctacaccaccaccatcaacccgctccttgaacgaaagggctgagacaccacctctgccgatccctccacccccaccggatatacaacccttggagaggtactgggcagcccaccaacagctacgggaaactgatatccctcaattgagtcaggcatcaaggcttagcacccagcag

SEQ ID NO: 141256 - DNA, 2020 bp, Homo sapiens
  Payload ID: 7752
  Gene Symbol: HOXB1
  Gene Name: homeobox B1
  Uniprot ID: P14653
  ENST ID: ENST00000239174
  CDS Start-End: 94-999
attcgagccccagcgctgtgacatactgccgaaaggttgtagggcaagagggtgtctcccccaaacgggccgaccctcctgcggccttgacgcatggactataataggatgaactccttcttagagtacccactctgtaaccggggacccagcgcctacagcgcccacagcgccccaacctcctttcccccaagctcggctcaggcggttgacagctatgcaagcgagggccgctacggtggggggctgtccagccctgcgtttcagcagaactccggctatcccgcccagcagccgccttcgaccctgggggtgcccttccccagctccgcgccctcggggtatgctcctgccgcctgcagccccagctacgggccttctcagtactaccctctgggtcaatcagaaggagacggaggctattttcatccctcgagctacggggcccagctagggggcttgtccgatggctacggagcaggtggagccggtccggggccatatcctccgcagcatcccccttatgggaacgagcagaccgcgagctttgcaccggcctatgctgatctcctctccgaggacaaggaaacaccctgcccttcagaacctaacacccccacggcccggaccttcgactggatgaaggttaagagaaacccacccaagacagcgaaggtgtcagagccaggcctgggctcgcccagtggcctccgcaccaacttcaccacaaggcagctgacagaactggaaaaggagttccatttcaacaagtacctgagccgggcccggagggtggagattgccgccaccctggagctcaatgaaacacaggtcaagatttggttccagaaccgacgaatgaagcagaagaagcgcgagcgagaggaaggtcgggtccccccagccccaccaggctgccccaaggaggcagctggagatgcctcagaccagtcgacatgcacctccccggaagcctcacccagctctgtcacctcctgaactgaacctagccaccaatggggcttccaggcactggagcgccccagtccagccctatcccaggctctccccaaccccaggcctgggcttcactggcctggggatcctctctagggctgaaatgccagtttagagctgcctgggggtgggaggggggatggggaaacatttttctcagacctgggtggctgggggccctacaggaccagaggcctgggaggcatggaacctgtcaaatgtagagggaagggcttctgcctttgatctggggatcagctcagtgtcaacatgtggtgggggtgggggccagcctcatcctcctggattcatcctcctttcccttccaacttgggtttattcggttcagtgccttcgagctttgaggagtctcctcacgcactcttatcctaactcccccttctaggcctgacacagaaccttaaattttcttgtgtgggaggtgtttgggtgcagccatattattatcaatgcttaatccagtcaccacagaccttacaatagcaccagctgccttgtgacagaccaaaaagccccccgcccccatctaaccccattagccctctcctggcatatttatattgcactaatgcagccttcagaggttgttttctgagacctgcctcctcacaccagcgacctcatcactatgtcaccaaagtgttttggaacttggtattccagagacttctggaacgccgtgcaaggcctgcccccagcaagccacaaccaggaaggtgcaggcacgcccccactagctcctcccctatttattgcctcctggaaaacccaggaccctcttccccatctccacccctacccctgggggcagcccagggagagccaggcacaatgagggctcccaacagctgcaaggatttatctgaacctttgagaaagaggaggagccatctaagtttctggaaacctgagccccaagtgagcccgggttctctctgtacctgcaactacctcatttcaataaagtctgtgttttcccttc

SEQ ID NO: 141257 - DNA, 1414 bp, Homo sapiens
  Payload ID: 7752
  Gene Symbol: HOXB1
  Gene Name: homeobox B1
  Uniprot ID: P14653
  ENST ID: ENST00000577092
  CDS Start-End: 7-705
tgacgcatggactataataggatgaactccttcttagagtacccactctgtaaccggggacccagcgcctacagcgcccacagcgccccaacctcctttcccccaagctcggctcaggcggttgacagctatgcaagcgagggccgctacggtggggggctgtccagccctgcgtttcagcagaactccggctatcccgcccagcagccgccttcgaccctgggggtgcccttccccagctccgcgccctcggggtatgctcctgccgcctgcagccccagctacgggccttctcagtactaccctctgggtcaatcagaaggagacggaggctattttcatccctcgagctacggggcccagctagggggcttgtccgatggctacggagcaggtggagccggtccggggccatatcctccgcagcatcccccttatgggaacgagcagaccgcgagctttgcaccggcctatgctgatctcctctccgaggacaaggaaacaccctgcccttcagaacctaacacccccacggcccggaccttcgactggatgaaggttaagagaaacccacccaagacaggtagggctcagatgtggccaccccttctccggggcccaaagcatctctgcttcccctgcagtgacatgtcctgggtctgggctgggttcttctctttcagcggctctggtagacacaggtaagagcacaacctacgtctcaggtcaggtgaggtctccccacccagtatgtaaccggtcaccccaggagtaagtttccatacacaccccacttcctgatctgtgcacccagcacagacccaggacctggtgtgcatgggggatggaagtatggggaaggctgctccagacttggtgatcaccatgggggtacctggtggtccctgggaactttgacaactgtacttgggcagaatggcaaatggaggtccagagccagccccgggaggagggaagcggaaggagaaagaggtgagagaattgacctggcctttctccctgccccgcccctagcgaaggtgtcagagccaggcctgggctcgcccagtggcctccgcaccaacttcaccacaaggcagctgacagaactggaaaaggagttccatttcaacaagtacctgagccgggcccggagggtggagattgccgccaccctggagctcaatgaaacacaggtcaagatttggttccagaaccgacgaatgaagcagaagaagcgcgagcgagaggaaggtcgggtccccccagccccaccaggctgccccaaggaggcagctggagatgcctcagaccagtcgacatgcacctccccggaagcctcacccagctctgtcacctcctgaactgaacctagccaccaatggggcttccaggcactggagcgccccagtcc

SEQ ID NO: 141258 - DNA, 3467 bp, Homo sapiens
  Payload ID: 7753
  Gene Symbol: HOXB13
  Gene Name: homeobox B13
  Uniprot ID: Q92826
  ENST ID: ENST00000290295
  CDS Start-End: 586-1440
aggagacagaaagctagggagggagaggaggagaaggaggtggggcccggctcctcgtcccctcttcctccgcccaccacgcctcccctccccccggacgtgtaaatgagactctgcaaactggaaagcagcgaaaggacacctccttccttttctctcttgttgtttttaagtggaatgagagagagaggagtggagagggaaaagaagagagagagggagaagagagagaggagagaaagagcgagagagcgagagagagagacagagacagagagagagagagagagagagagagagagaaagagagagagagagagagagaataagctggggtaaagtattttcgcagtttctgcctttaggattttattagcttctctcccccaggccgcagccaatcagcgcgcgtgcccgggcccctgcgtctcttgcgtcaagacggccgtgctgagcgaatgcaggcgacttgcgagctgggagcgatttaaaacgctttggattcccccggcctgggtggggagagcgagctgggtgccccctagattccccgcccccgcacctcatgagccgaccctcggctccatggagcccggcaattatgccaccttggatggagccaaggatatcgaaggcttgctgggagcgggaggggggcggaatctggtcgcccactcccctctgaccagccacccagcggcgcctacgctgatgcctgctgtcaactatgcccccttggatctgccaggctcggcggagccgccaaagcaatgccacccatgccctggggtgccccaggggacgtccccagctcccgtgccttatggttactttggaggcgggtactactcctgccgagtgtcccggagctcgctgaaaccctgtgcccaggcagccaccctggccgcgtaccccgcggagactcccacggccggggaagagtaccccagccgccccactgagtttgccttctatccgggatatccgggaacctaccagcctatggccagttacctggacgtgtctgtggtgcagactctgggtgctcctggagaaccgcgacatgactccctgttgcctgtggacagttaccagtcttgggctctcgctggtggctggaacagccagatgtgttgccagggagaacagaacccaccaggtcccttttggaaggcagcatttgcagactccagcgggcagcaccctcctgacgcctgcgcctttcgtcgcggccgcaagaaacgcattccgtacagcaaggggcagttgcgggagctggagcgggagtatgcggctaacaagttcatcaccaaggacaagaggcgcaagatctcggcagccaccagcctctcggagcgccagattaccatctggtttcagaaccgccgggtcaaagagaagaaggttctcgccaaggtgaagaacagcgctaccccttaagagatctccttgcctgggtgggaggagcgaaagtgggggtgtcctggggagaccaggaacctgccaagcccaggctggggccaaggactctgctgagaggcccctagagacaacacccttcccaggccactggctgctggactgttcctcaggagcggcctgggtacccagtatgtgcagggagacggaaccccatgtgacagcccactccaccagggttcccaaagaacctggcccagtcataatcattcatcctgacagtggcaataatcacgataaccagtactagctgccatgatcgttagcctcatattttctatctagagctctgtagagcactttagaaaccgctttcatgaattgagctaattatgaataaatttggaaggcgatccctttgcagggaagctttctctcagacccccttccattacacctctcaccctggtaacagcaggaagactgaggagaggggaacgggcagattcgttgtgtggctgtgatgtccgtttagcatttttctcagctgacagctgggtaggtggacaattgtagaggctgtctcttcctccctccttgtccaccccatagggtgtacccactggtcttggaagcacccatccttaatacgatgatttttctgtcgtgtgaaaatgaagccagcaggctgcccctagtcagtccttccttccagagaaaaagagatttgagaaagtgcctgggtaattcaccattaatttcctcccccaaactctctgagtcttcccttaatatttctggtggttctgaccaaagcaggtcatggtttgttgagcatttgggatcccagtgaagtagatgtttgtagccttgcatacttagcccttcccaggcacaaacggagtggcagagtggtgccaaccctgttttcccagtccacgtagacagattcacagtgcggaattctggaagctggagacagacgggctctttgcagagccgggactctgagagggacatgagggcctctgcctctgtgttcattctctgatgtcctgtacctgggctcagtgcccggtgggactcatctcctggccgcgcagcaaagccagcgggttcgtgctggtccttcctgcaccttaggctgggggtggggggcctgccggcgcattctccacgattgagcgcacaggcctgaagtctggacaacccgcagaaccgaagctccgagcagcgggtcggtggcgagtagtggggtcggtggcgagcagttggtggtgggccgcggccgccactacctcgaggacatttccctcccggagccagctctcctagaaaccccgcggcggccgccgcagccaagtgtttatggcccgcggtcgggtgggatcctagccctgtctcctctcctgggaaggagtgagggtgggacgtgacttagacacctacaaatctatttaccaaagaggagcccgggactgagggaaaaggccaaagagtgtgagtgcatgcggactgggggttcaggggaagaggacgaggaggaggaagatgaggtcgatttcctgatttaaaaaatcgtccaagccccgtggtccagcttaaggtcctcggttacatgcgccgctcagagcaggtcactttctgccttccacgtcctccttcaaggaagccccatgtgggtagctttcaatatcgcaggttcttactcctctgcctctataagctcaaacccaccaacgatcgggcaagtaaaccccctccctcgccgacttcggaactggcgagagttcagcgcagatgggcctgtggggagggggcaagatagatgagggggagcggcatggtgcggggtgaccccttggagagaggaaaaaggccacaagaggggctgccaccgccactaacggagatggccctggtagagacctttgggggtctggaacctctggactccccatgctctaactcccacactctgctatcagaaacttaaacttgaggattttctctgtttttcactcgcaataaattcagagcaaacaaaa

SEQ ID NO: 141259 - DNA, 1562 bp, Homo sapiens
  Payload ID: 7754
  Gene Symbol: HOXB2
  Gene Name: homeobox B2
  Uniprot ID: P14652
  ENST ID: ENST00000330070
  CDS Start-End: 79-1149
gggtgcaggaggggggtcccttccgatcctccctcctgacgccccccccagcagccccctcccccaccattgaaagccatgaattttgaatttgagagggagattgggtttataaacagccagccgtcgctcgccgagtgtctgacttccttccccgctgtcttggagacatttcaaacttcatcaatcaaggagtcgacattaattcctcctcctcctcctttcgagcaaaccttccccagcctccagcccggcgcctccacccttcagagacccaggagccaaaagcgagccgaagatgggcctgctctgccgccgccaccgccgccgccactccccgctgcccccccggcccccgagttcccttggatgaaagagaagaaatccgccaagaaacccagccaatccgccacgtctccttctccggccgcctccgccgttccggcctccggggtcggatcgcctgcagatggcctgggactgccggaggctggtggcggcggggcgcgcaggctgcgcacggcttacaccaacacgcagctgctggaactggagaaggaattccactttaataagtacctgtgccggccacgccgcgtcgagatcgcggccttgctggacctcaccgaaaggcaggtcaaagtctggtttcagaaccggcgcatgaagcacaagcggcagacgcagcaccgagagccgccggatggggagcctgcctgcccgggagccctggaggacatctgcgaccctgccgaggaacccgcggccagcccgggcggcccctccgcctcgcgggcggcgtgggaagcctgctgtcacccgccggaggtggtgccgggggccttaagcgcggacccccggcctttagccgttcgcttagagggcgcaggcgcgtcgagtcccggctgcgcgctgcgcggggccggcgggctggagcccgggccattgccagaagacgtcttctcggggcgccaggattcacctttccttcccgacctcaacttcttcgcggccgactcctgtctccagctatccggaggcctctcccctagcctacagggttctctcgacagcccggtccctttttccgaggaagagctggattttttcaccagtacgctctgtgccatcgacctgcagtttccctaacctgtttcctcctcccggtcctttcgacccccgcgctccttggccgtctactggaaaaatcgagcctctcccaccctcagtcgcatagacttatgtgttttgctaaaattcaggtattactgaattagcgtttaatccactccctttcttcttcttctaaaatattgggcactcggttatcttttaaaattcacacagaaaaattccgtttggtagactccttccaatgaaatctcaggaataattaaactctagggggactttcttaaaaataactagagggacctattttcctcttttttatgttttagactgtagattatttattaaaattctttaataataggaaaaggggaaagtatttattgtacattattttcatagattaaataaatgtctttataataccaaaa

SEQ ID NO: 141260 - DNA, 2642 bp, Homo sapiens
  Payload ID: 7755
  Gene Symbol: HOXB3
  Gene Name: homeobox B3
  Uniprot ID: P14651
  ENST ID: ENST00000311626
  CDS Start-End: 898-2193
ttttgcattcctccagcttgcagctccggtagttggaggctgggtagggcagggggaaccgacaggccggtgtccccagccgcaaaagagctgctgaactgtccgtttaaatgctgctgggagactcgtaaaaaaatcatcgtggacctggaggatgagaggggcgagctttatttcggtcggattgcggtgtggtggtttagctgcaaggggatgccgcagccccagttgagggggaaaatagttcttaaaaagcatatgcccccctaaggaatgtctctaaagaaccaaatcaaagctgctctttggaaggtatgaatagaatttaaaaaaaaaagatttctatggagcttaaagttcacagccattctgtgtagacaagagctaagaaaaatgtgagaattatacagaaaaccattaatcacttcttttctttaaatacgtatcctctctcctttgttattattcaacagcaaatctccttggaccggctgttgggggaaaaaagtgttagccgtctctcccggatctgcaagggggaaaaaatttggaaccataaagttgaaaacttttttctctcagtttggaagaagcccttcgtcatgaatgggatctgcagagttcgggcgagaggaggcgagaggcgcaaaggaggggagatttgtcgcctgccgctcgctctggggctcgatgtgaatatatattatgtctgcctgttctcccctcgtcggtggctaaggtcagccgcttggaacagaccccggaggaggggggcagagaggggaggtggggggggggggtccggcgtgtcacgtgacccccagggttgccaatgtccggtcctgagggtatcaggcctttccaagttgccacccactgcccaggcctcacccagcgatgcagaaagccacctactacgacaacgccgcggctgctctcttcggaggctattcctcgtaccctggcagcaatggcttcggcttcgatgtccccccccaacccccatttcaggccgccacgcacctggagggcgactaccagcgctcagcttgctcgctgcagtccctgggcaacgctgccccacatgccaagagcaaggagctcaacggcagctgcatgaggccgggtctggcccccgagcccctgtcggccccgcctggctcacccccgcccagtgccgcacctaccagtgccactagcaacagcagtaatgggggcgggcccagcaaaagtggtcccccaaagtgcggtcccggcaccaactccaccctcaccaaacagatattcccctggatgaaagagtcgaggcaaacgtccaagctgaaaaacaactcccccggcacagcagagggctgtggtggcggcggcggtggcggcggcggcggaggcagtggtggcagcgggggcggtggcggcggcggcgggggaggggacaagagccccccggggtcggcggcgtccaagcgggcgcggacggcgtacacgagcgcgcagctggtggagctggagaaggagttccattttaaccgctacctgtgccggcctcgccgtgtagagatggccaacctgctgaacctcagcgagcggcagatcaagatctggttccagaaccggcgcatgaagtacaagaaggaccagaaggccaagggattggcctcgtcgtcggggggcccatctccagccggcagccccccgcagcccatgcagtccacggccggcttcatgaacgccttacactccatgacccccagctacgagagcccgtccccacccgccttcggtaaagcccaccagaatgcctacgcgctgccctccaactaccagccccctctcaaaggctgcggcgccccgcagaagtaccctccgaccccggcgcccgagtatgagccgcacgtcctccaagccaacgggggcgcctacgggacgcccaccatgcagggcagtccggtgtacgtgggcgggggcggctacgcggatccgctgccgccccctgccggcccctccctctatggcctcaaccacctttcccatcacccttccgggaacctggactacaacggggcgccccctatggcgcccagccagcaccacggaccctgcgaaccccaccccacctacacagacctctcctctcaccacgcgcctcctcctcagggtagaatccaagaagcgcccaaattaacacacctgtgatgggaaagggcgaacgaggattaggggatggggaggaagagagagactgtggagctctggggggcaacctggaggtctgaaaagaggagccagagaaggtggtacccaggcttcctggtcagaaccggcctggagctccttcccttccccctggcctgagaggttgcttttaagtcttccaccccttgttccatctgcctgccaacccatcggaaaggaatccacatcatattggagatgaccccatcaaccccagggctccagcactaccaagttggaattccacgcccgggagtggggtagaggaagacgagacaggacgaggcagaaaagcacattttaaaaaccagacaagatggctaggccatcaccaaccaacggacttaccttacatctttgtaggtaattccccccaaatcttgatttttttttttcctcaattatccttt

SEQ ID NO: 141261 - DNA, 4208 bp, Homo sapiens
  Payload ID: 7755
  Gene Symbol: HOXB3
  Gene Name: homeobox B3
  Uniprot ID: P14651
  ENST ID: ENST00000470495
  CDS Start-End: 1449-2744
ggagttgaacagctaggctgaatgagattaaagttttccaaacacacatggcagtatggaggttttatgaaaagtgatggtgaagagttgggagagatggagggaaaaaaatgcagtcagaagtttcagaacaaatacacaaaatcctatgttagtttgaatctttatttttctggcacacttttaaaaggctgtattaaaatagtgattttttttttttgcctcagggaacctcagtcaacaggaatacctctgtttctaacctagagaataatattgttaaaattgctttgttaatttttttttcctcaggaataattttctcttttggaaagcactttccccgtctcagtagaaaagtctagcagttgtaacttcttgtttcttatttgctttgggggaaatcaaagaaaacagacggtgaaggaaagggtgggaaaaattaagtctcatgaaaaaaaaaaaaagaggtccggggagagacctgggccaaatggtcacagcaccaactggcgtggcccaggaaattgaaacaatcctgctccatgtgggggccccacagggccactggctgcccgatcccaggtttggctgagcaaagacaagggctggaggtggtggtacctgcagcagggccatggacagatgagtctcggttcagctggctcttgaggttaaaaatcatcaggaagtttctaggtcaggctgttgttgtcttcctggtgggagagtggtgggaagtggagaggatacctcacaagagaagcttctctgctgaacttgcttctcctgcctgttcttttaggagatcctttggttttccttcaggctagactttgcttgggcaagagacctaaaccgacttggaaggaggcaaaggctggaagcatagaagcctctgggctcagaggagggtgttgatgatgcttttattttggagtctcctagtgtcccctcccttgagccatcctatcccagagttggggaggagagatagggagagagggactaggggaggtcaggggctagtgcacaggcaggagagaagcaatggcctttgccatagattctacatctaggcagtcttgaaaggcatatagtctttatttatttttttattttttagtggaaatgaaaactggtgggcttttttttctcagcatctgctttggagatgttggggaggggaaaagaaaaaaccctattgatgtcagttcccttttcagttcctaagatggattcgagccccagtcctcttctcccccttgtgtctcttctctcgcctcgcaggtcagccgcttggaacagaccccggaggaggggggcagagaggggaggtggggggggggggtccggcgtgtcacgtgacccccagggttgccaatgtccggtcctgagggtatcaggcctttccaagttgccacccactgcccaggcctcacccagcgatgcagaaagccacctactacgacaacgccgcggctgctctcttcggaggctattcctcgtaccctggcagcaatggcttcggcttcgatgtccccccccaacccccatttcaggccgccacgcacctggagggcgactaccagcgctcagcttgctcgctgcagtccctgggcaacgctgccccacatgccaagagcaaggagctcaacggcagctgcatgaggccgggtctggcccccgagcccctgtcggccccgcctggctcacccccgcccagtgccgcacctaccagtgccactagcaacagcagtaatgggggcgggcccagcaaaagtggtcccccaaagtgcggtcccggcaccaactccaccctcaccaaacagatattcccctggatgaaagagtcgaggcaaacgtccaagctgaaaaacaactcccccggcacagcagagggctgtggtggcggcggcggtggcggcggcggcggaggcagtggtggcagcgggggcggtggcggcggcggcgggggaggggacaagagccccccggggtcggcggcgtccaagcgggcgcggacggcgtacacgagcgcgcagctggtggagctggagaaggagttccattttaaccgctacctgtgccggcctcgccgtgtagagatggccaacctgctgaacctcagcgagcggcagatcaagatctggttccagaaccggcgcatgaagtacaagaaggaccagaaggccaagggattggcctcgtcgtcggggggcccatctccagccggcagccccccgcagcccatgcagtccacggccggcttcatgaacgccttacactccatgacccccagctacgagagcccgtccccacccgccttcggtaaagcccaccagaatgcctacgcgctgccctccaactaccagccccctctcaaaggctgcggcgccccgcagaagtaccctccgaccccggcgcccgagtatgagccgcacgtcctccaagccaacgggggcgcctacgggacgcccaccatgcagggcagtccggtgtacgtgggcgggggcggctacgcggatccgctgccgccccctgccggcccctccctctatggcctcaaccacctttcccatcacccttccgggaacctggactacaacggggcgccccctatggcgcccagccagcaccacggaccctgcgaaccccaccccacctacacagacctctcctctcaccacgcgcctcctcctcagggtagaatccaagaagcgcccaaattaacacacctgtgatgggaaagggcgaacgaggattaggggatggggaggaagagagagactgtggagctctggggggcaacctggaggtctgaaaagaggagccagagaaggtggtacccaggcttcctggtcagaaccggcctggagctccttcccttccccctggcctgagaggttgcttttaagtcttccaccccttgttccatctgcctgccaacccatcggaaaggaatccacatcatattggagatgaccccatcaaccccagggctccagcactaccaagttggaattccacgcccgggagtggggtagaggaagacgagacaggacgaggcagaaaagcacattttaaaaaccagacaagatggctaggccatcaccaaccaacggacttaccttacatctttgtaggtaattccccccaaatcttgatttttttttttcctcaattatcctttaaaaaataagaaaacacatttcaaacccaaaaggcacaaaacacgttcccttccaactttcccaaaacctcaaatttgttcccatttgaggtttattgaggtacacttctagcccccggtttttctgctctagaacattcatatctatacatcccacccccatcaattacagtttttagagggctcagggatggtgagagatcctgaaagagctgcctatattataaattatatacatttttttttaaggaaaagtgtggaggctagggcaggcaggttgttaggactgaaggtttgcccattctgctgcctccatctcagctccagctccatccccctctccacagaaagcagttggtgacacgaggttctatacttttcttctgttgctctcttgacttaacgtgaaaacagggtatatttgaacaaactgtcccaggcaggggctgggcagggcctgtgtgccttgctcagcctcctgacaggacacttttgttgcacttagaatttacattttaatggatgtaaaaacaactgtgagagatgtctgggcctgcagaagtccagcattgctcaaaaaagcgtgtgttctagtgaacattttcatatatatttattggttatagcctgttaaaatattttcttttttgtattatttatccccctacattatgtatttatatgagggaaaaaaaggaaaaaattgtacttttttagtatttacctgttacaaaggacattgtgtttcctgtcatgtaaaaccagctattttagttactattgtactctagaaaagagctgtagatttatgttaaactcgtacttacgaacaattgtaattagttctaaaaggcatgaactcagctcctaatcgtcactgtatagtcctgaatttgtagaactagagttaattccctcttggaactttctttgttcttcagtagttacttttttccttacctaaaagggttgtctgtcaaacaattcttgaataaactttctgttatcaatttta

SEQ ID NO: 141262 - DNA, 565 bp, Homo sapiens
  Payload ID: 7755
  Gene Symbol: HOXB3
  Gene Name: homeobox B3
  ENST ID: ENST00000471459
  CDS Start-End: 296-565
agagactgggcctggagactggagggagatttgggaggaatagagagggtgtagtggagggaagaagccggggctggagactcagaaggagggagccagagtgaggggagatttgtcgcctgccgctcgctctggggctcgatgtgaatatatattatgtctgcctgttctcccctcgtcggtggctaaggccgccacgcacctggagggcgactaccagcgctcagcttgctcgctgcagtccctgggcaacgctgccccacatgccaagagcaaggagctcaacggcagctgcatgaggccgggtctggcccccgagcccctgtcggccccgcctggctcacccccgcccagtgccgcacctaccagtgccactagcaacagcagtaatgggggcgggcccagcaaaagtggtcccccaaagtgcggtcccggcaccaactccaccctcaccaaacagatattcccctggatgaaagagtcgaggcaaacgtccaagctgaaaaacaactcccccggcacagcagagggctgtggtggcggcggcggtggcggcggcggcgga

SEQ ID NO: 141263 - DNA, 1525 bp, Homo sapiens
  Payload ID: 7755
  Gene Symbol: HOXB3
  Gene Name: homeobox B3
  Uniprot ID: P14651
  ENST ID: ENST00000460160
  CDS Start-End: 559-1458
actttaactgctcgctgtggtggggaagggggcagaggtaggtgagcactctcccagcctggagcagccggaccagcccagaaggcagcggcggcccaggccagcattcccgcagacacaagaggcttaagtacggcaaagcctttcatatcgtgatttatttgtcataagcaaataaaatgcggttaagctgtctccttttagacagaaggctctttggttattaaagttccgagagaggattccatgaggctggcctctttcctcgcagcataagaagcaaatctccttggaccggctgttgggggaaaaaagtgttagccgtctctcccggatctgcaagggggaaaaaatttggaaccataaagttgaaaacttttttctctcagtttggaagaagcccttcgtcatgaatgggatctgcagagttcgggcgagaggaggcgagaggcgcaaaggaggggagatttgtcgcctgccgctcgctctggggctcgatgtgaatatatattatgtctgcctgttctcccctcgtcggtggctaagatattcccctggatgaaagagtcgaggcaaacgtccaagctgaaaaacaactcccccggcacagcagagggctgtggtggcggcggcggtggcggcggcggcggaggcagtggtggcagcgggggcggtggcggcggcggcgggggaggggacaagagccccccggggtcggcggcgtccaagcgggcgcggacggcgtacacgagcgcgcagctggtggagctggagaaggagttccattttaaccgctacctgtgccggcctcgccgtgtagagatggccaacctgctgaacctcagcgagcggcagatcaagatctggttccagaaccggcgcatgaagtacaagaaggaccagaaggccaagggattggcctcgtcgtcggggggcccatctccagccggcagccccccgcagcccatgcagtccacggccggcttcatgaacgccttacactccatgacccccagctacgagagcccgtccccacccgccttcggtaaagcccaccagaatgcctacgcgctgccctccaactaccagccccctctcaaaggctgcggcgccccgcagaagtaccctccgaccccggcgcccgagtatgagccgcacgtcctccaagccaacgggggcgcctacgggacgcccaccatgcagggcagtccggtgtacgtgggcgggggcggctacgcggatccgctgccgccccctgccggcccctccctctatggcctcaaccacctttcccatcacccttccgggaacctggactacaacggggcgccccctatggcgcccagccagcaccacggaccctgcgaaccccaccccacctacacagacctctcctctcaccacgcgcctcctcctcagggtagaatccaagaagcgcccaaattaacacacctgtgatgggaaagggcgaacgaggattaggggatggggaggaagagagagactgtggagctctggggggcaa

SEQ ID NO: 141264 - DNA, 1845 bp, Homo sapiens
  Payload ID: 7755
  Gene Symbol: HOXB3
  Gene Name: homeobox B3
  Uniprot ID: P14651
  ENST ID: ENST00000489475
  CDS Start-End: 703-1779
atagtaactgcctgctcgtgggggaggctgggagagaggtgaaccgcaggtcacggcgtctaaaaattattaaaatgtttgagagcctcgtgacgcgcctagctgtttaacaaagactgccaaagtatgagattaacacgaaaacttgcgcttccaaaacaaaaacacaccaaaaaaaaaagtcacgttccggcttctgagggagcccgtggctgtgtccgccgccgcggtccggttttccggacacacaatagtggacaggagagagctcagctgttgcccggcgcgtccgcgggcggctcggcggccggcggggctggggagcctcccgcaaatctccttggaccggctgttgggggaaaaaagtgttagccgtctctcccggatctgcaagggggaaaaaatttggaaccataaagttgaaaacttttttctctcagtttggaagaagcccttcgtcatgaatgggatctgcagagttcgggcgagaggaggcgagaggcgcaaaggaggggagatttgtcgcctgccgctcgctctggggctcgatgtgaatatatattatgtctgcctgttctcccctcgtcggtggctaaggccgccacgcacctggagggcgactaccagcgctcagcttgctcgctgcagtccctgggcaacgctgccccacatgccaagagcaaggagctcaacggcagctgcatgaggccgggtctggcccccgagcccctgtcggccccgcctggctcacccccgcccagtgccgcacctaccagtgccactagcaacagcagtaatgggggcgggcccagcaaaagtggtcccccaaagtgcggtcccggcaccaactccaccctcaccaaacagatattcccctggatgaaagagtcgaggcaaacgtccaagctgaaaaacaactcccccggcacagcagagggctgtggtggcggcggcggtggcggcggcggcggaggcagtggtggcagcgggggcggtggcggcggcggcgggggaggggacaagagccccccggggtcggcggcgtccaagcgggcgcggacggcgtacacgagcgcgcagctggtggagctggagaaggagttccattttaaccgctacctgtgccggcctcgccgtgtagagatggccaacctgctgaacctcagcgagcggcagatcaagatctggttccagaaccggcgcatgaagtacaagaaggaccagaaggccaagggattggcctcgtcgtcggggggcccatctccagccggcagccccccgcagcccatgcagtccacggccggcttcatgaacgccttacactccatgacccccagctacgagagcccgtccccacccgccttcggtaaagcccaccagaatgcctacgcgctgccctccaactaccagccccctctcaaaggctgcggcgccccgcagaagtaccctccgaccccggcgcccgagtatgagccgcacgtcctccaagccaacgggggcgcctacgggacgcccaccatgcagggcagtccggtgtacgtgggcgggggcggctacgcggatccgctgccgccccctgccggcccctccctctatggcctcaaccacctttcccatcacccttccgggaacctggactacaacggggcgccccctatggcgcccagccagcaccacggaccctgcgaaccccaccccacctacacagacctctcctctcaccacgcgcctcctcctcagggtagaatccaagaagcgcccaaattaacacacctgtgatgggaaagggcgaacgaggattaggggatggggaggaagagagagactgtggagctctggggggca

SEQ ID NO: 141265 - DNA, 1420 bp, Homo sapiens
  Payload ID: 7755
  Gene Symbol: HOXB3
  Gene Name: homeobox B3
  Uniprot ID: P14651
  ENST ID: ENST00000476342
  CDS Start-End: 125-1420
ttaactgctcgctgtggtggggaagggggcagaggtaggtgagcactctcccagcctggagcagccggaccagcccagaaggcagcggcggcccaggccagcattcccgcagcctcacccagcgatgcagaaagccacctactacgacaacgccgcggctgctctcttcggaggctattcctcgtaccctggcagcaatggcttcggcttcgatgtccccccccaacccccatttcaggccgccacgcacctggagggcgactaccagcgctcagcttgctcgctgcagtccctgggcaacgctgccccacatgccaagagcaaggagctcaacggcagctgcatgaggccgggtctggcccccgagcccctgtcggccccgcctggctcacccccgcccagtgccgcacctaccagtgccactagcaacagcagtaatgggggcgggcccagcaaaagtggtcccccaaagtgcggtcccggcaccaactccaccctcaccaaacagatattcccctggatgaaagagtcgaggcaaacgtccaagctgaaaaacaactcccccggcacagcagagggctgtggtggcggcggcggtggcggcggcggcggaggcagtggtggcagcgggggcggtggcggcggcggcgggggaggggacaagagccccccggggtcggcggcgtccaagcgggcgcggacggcgtacacgagcgcgcagctggtggagctggagaaggagttccattttaaccgctacctgtgccggcctcgccgtgtagagatggccaacctgctgaacctcagcgagcggcagatcaagatctggttccagaaccggcgcatgaagtacaagaaggaccagaaggccaagggattggcctcgtcgtcggggggcccatctccagccggcagccccccgcagcccatgcagtccacggccggcttcatgaacgccttacactccatgacccccagctacgagagcccgtccccacccgccttcggtaaagcccaccagaatgcctacgcgctgccctccaactaccagccccctctcaaaggctgcggcgccccgcagaagtaccctccgaccccggcgcccgagtatgagccgcacgtcctccaagccaacgggggcgcctacgggacgcccaccatgcagggcagtccggtgtacgtgggcgggggcggctacgcggatccgctgccgccccctgccggcccctccctctatggcctcaaccacctttcccatcacccttccgggaacctggactacaacggggcgccccctatggcgcccagccagcaccacggaccctgcgaaccccaccccacctacacagacctctcctctcaccacgcgcctcctcctcagggtagaatccaagaagcgcccaaattaacacacctgtga

SEQ ID NO: 141266 - DNA, 1909 bp, Homo sapiens
  Payload ID: 7755
  Gene Symbol: HOXB3
  Gene Name: homeobox B3
  Uniprot ID: P14651
  ENST ID: ENST00000472863
  CDS Start-End: 311-1387
gacactttaactgctcgctgtggtggggaagggggcagaggtaggtgagcactctcccagcctggagcagccggaccagcccagaaggcagcggcggcccaggccagcattcccgcagaggggagatttgtcgcctgccgctcgctctggggctcgatgtgaatatatattatgtctgcctgttctcccctcgtcggtggctaaggccgccacgcacctggagggcgactaccagcgctcagcttgctcgctgcagtccctgggcaacgctgccccacatgccaagagcaaggagctcaacggcagctgcatgaggccgggtctggcccccgagcccctgtcggccccgcctggctcacccccgcccagtgccgcacctaccagtgccactagcaacagcagtaatgggggcgggcccagcaaaagtggtcccccaaagtgcggtcccggcaccaactccaccctcaccaaacagatattcccctggatgaaagagtcgaggcaaacgtccaagctgaaaaacaactcccccggcacagcagagggctgtggtggcggcggcggtggcggcggcggcggaggcagtggtggcagcgggggcggtggcggcggcggcgggggaggggacaagagccccccggggtcggcggcgtccaagcgggcgcggacggcgtacacgagcgcgcagctggtggagctggagaaggagttccattttaaccgctacctgtgccggcctcgccgtgtagagatggccaacctgctgaacctcagcgagcggcagatcaagatctggttccagaaccggcgcatgaagtacaagaaggaccagaaggccaagggattggcctcgtcgtcggggggcccatctccagccggcagccccccgcagcccatgcagtccacggccggcttcatgaacgccttacactccatgacccccagctacgagagcccgtccccacccgccttcggtaaagcccaccagaatgcctacgcgctgccctccaactaccagccccctctcaaaggctgcggcgccccgcagaagtaccctccgaccccggcgcccgagtatgagccgcacgtcctccaagccaacgggggcgcctacgggacgcccaccatgcagggcagtccggtgtacgtgggcgggggcggctacgcggatccgctgccgccccctgccggcccctccctctatggcctcaaccacctttcccatcacccttccgggaacctggactacaacggggcgccccctatggcgcccagccagcaccacggaccctgcgaaccccaccccacctacacagacctctcctctcaccacgcgcctcctcctcagggtagaatccaagaagcgcccaaattaacacacctgtgatgggaaagggcgaacgaggattaggggatggggaggaagagagagactgtggagctctggggggcaacctggaggtctgaaaagaggagccagagaaggtggtacccaggcttcctggtcagaaccggcctggagctccttcccttccccctggcctgagaggttgcttttaagtcttccaccccttgttccatctgcctgccaacccatcggaaaggaatccacatcatattggagatgaccccatcaaccccagggctccagcactaccaagttggaattccacgcccgggagtggggtagaggaagacgagacaggacgaggcagaaaagcacattttaaaaaccagacaagatggctaggccatcaccaaccaacggacttaccttacatctttgtaggtaattccccccaaatcttgatttttttttttcctcaattatcctttaaaaaataagaaaacacatttcaaacccaaaaggcacaaaacacgttcccttccaactttcccaaaacctcaa

SEQ ID NO: 141267 - DNA, 2196 bp, Homo sapiens
  Payload ID: 7755
  Gene Symbol: HOXB3
  Gene Name: homeobox B3
  Uniprot ID: P14651
  ENST ID: ENST00000498678
  CDS Start-End: 573-1868
agtatatttcacattctccagaatgttaagtgacactttaactgctcgctgtggtggggaagggggcagaggtaggtgagcactctcccagcctggagcagccggaccagcccagaaggcagcggcggcccaggccagcattcccgcacaaatctccttggaccggctgttgggggaaaaaagtgttagccgtctctcccggatctgcaagggggaaaaaatttggaaccataaagttgaaaacttttttctctcagtttggaagaagcccttcgtcatgaatgggatctgcagagttcgggcgagaggaggcgagaggcgcaaaggaggggagatttgtcgcctgccgctcgctctggggctcgatgtgaatatatattatgtctgcctgttctcccctcgtcggtggctaaggtcagccgcttggaacagaccccggaggaggggggcagagaggggaggtggggggggggggtccggcgtgtcacgtgacccccagggttgccaatgtccggtcctgagggtatcaggcctttccaagttgccacccactgcccaggcctcacccagcgatgcagaaagccacctactacgacaacgccgcggctgctctcttcggaggctattcctcgtaccctggcagcaatggcttcggcttcgatgtccccccccaacccccatttcaggccgccacgcacctggagggcgactaccagcgctcagcttgctcgctgcagtccctgggcaacgctgccccacatgccaagagcaaggagctcaacggcagctgcatgaggccgggtctggcccccgagcccctgtcggccccgcctggctcacccccgcccagtgccgcacctaccagtgccactagcaacagcagtaatgggggcgggcccagcaaaagtggtcccccaaagtgcggtcccggcaccaactccaccctcaccaaacagatattcccctggatgaaagagtcgaggcaaacgtccaagctgaaaaacaactcccccggcacagcagagggctgtggtggcggcggcggtggcggcggcggcggaggcagtggtggcagcgggggcggtggcggcggcggcgggggaggggacaagagccccccggggtcggcggcgtccaagcgggcgcggacggcgtacacgagcgcgcagctggtggagctggagaaggagttccattttaaccgctacctgtgccggcctcgccgtgtagagatggccaacctgctgaacctcagcgagcggcagatcaagatctggttccagaaccggcgcatgaagtacaagaaggaccagaaggccaagggattggcctcgtcgtcggggggcccatctccagccggcagccccccgcagcccatgcagtccacggccggcttcatgaacgccttacactccatgacccccagctacgagagcccgtccccacccgccttcggtaaagcccaccagaatgcctacgcgctgccctccaactaccagccccctctcaaaggctgcggcgccccgcagaagtaccctccgaccccggcgcccgagtatgagccgcacgtcctccaagccaacgggggcgcctacgggacgcccaccatgcagggcagtccggtgtacgtgggcgggggcggctacgcggatccgctgccgccccctgccggcccctccctctatggcctcaaccacctttcccatcacccttccgggaacctggactacaacggggcgccccctatggcgcccagccagcaccacggaccctgcgaaccccaccccacctacacagacctctcctctcaccacgcgcctcctcctcagggtagaatccaagaagcgcccaaattaacacacctgtgatgggaaagggcgaacgaggattaggggatggggaggaagagagagactgtggagctctggggggcaacctggaggtctgaaaagaggagccagagaaggtggtacccaggcttcctggtcagaaccggcctggagctccttcccttccccctggcctgagaggttgcttttaagtcttccaccccttgttccatctgcctgccaacccatcggaaaggaatccacatcatattggagatgaccccatcaaccccagggctccagcactaccaagttggaattccacgcccgggagtggggtagaggaagacgagacaggacgaggcag

SEQ ID NO: 141268 - DNA, 943 bp, Homo sapiens
  Payload ID: 7755
  Gene Symbol: HOXB3
  Gene Name: homeobox B3
  ENST ID: ENST00000465120
  CDS Start-End: 251-610
caaagggatgtgagatttctattcgccgcggaggcggcgacaattagaacgtctcggacccatggcggggcggccattggctcggaggatcacgtgggcgcctaactttgttcacttgacacaaatctccttggaccggctgttgggggaaaaaagtgttagccgtctctcccggatctgcaagggggaaaaaatttggaaccataaagttgaaaacttttttctctcagtttggaagaagcccttcgtcatgaatgggatctgcagagttcgggcgagaggaggcgagaggcgcaaaggaggggagatttgtcgcctgccgctcgctctggggctcgatgtgaatatatattatgtctgcctgttctcccctcgtcggtggctaaggcctcggcgccctccaacccggagccctgctgagcaaagtcccgaagcggagtttctaaggcgccttttaattcggttacctccagctcccaaaacttgctgccgcccgcggggctcggccctcggccggctggtgtgctgggaacctgcctccgataaccgttttggtgtcctgatcgcttgctcttcttcgcctccttgggccatcgtaggtggctggtagcttgtcgccagtcgccgcggcagcagcgaccggctgaggcagcctggcagcagcagccagggactacccgggtgcacaaaccttcccagccctgtctgcaccaccggcggagtctccattctttcctatcgcgtctctggctccttcgctttccacactcgcctggcctccgtcccgcgatggtttggggtttattgcaaggggagcggcaggaatttcggccccaggcatctagttaaattattgttttattattattactatcatcatcatcgtcatcattattattgctgtaacaatcagactaaataaagccagggcctagccagccaa

SEQ ID NO: 141269 - DNA, 1109 bp, Homo sapiens
  Payload ID: 7755
  Gene Symbol: HOXB3
  Gene Name: homeobox B3
  ENST ID: ENST00000490677
  CDS Start-End: 139-1032
attcaacagcaaatctccttggaccggctgttgggggaaaaaagtgttagccgtctctcccggatctgcaagggggaaaaaatttggaaccataaagttgaaaacttttttctctcagtttggaagaagcccttcgtcatgaatgggatctgcagagttcgggcgagaggaggcgagaggcgcaaagagggctgtggtggcggcggcggtggcggcggcggcggaggcagtggtggcagcgggggcggtggcggcggcggcgggggaggggacaagagccccccggggtcggcggcgtccaagcgggcgcggacggcgtacacgagcgcgcagctggtggagctggagaaggagttccattttaaccgctacctgtgccggcctcgccgtgtagagatggccaacctgctgaacctcagcgagcggcagatcaagatctggttccagaaccggcgcatgaagtacaagaaggaccagaaggccaagggattggcctcgtcgtcggggggcccatctccagccggcagccccccgcagcccatgcagtccacggccggcttcatgaacgccttacactccatgacccccagctacgagagcccgtccccacccgccttcggtaaagcccaccagaatgcctacgcgctgccctccaactaccagccccctctcaaaggctgcggcgccccgcagaagtaccctccgaccccggcgcccgagtatgagccgcacgtcctccaagccaacgggggcgcctacgggacgcccaccatgcagggcagtccggtgtacgtgggcgggggcggctacgcggatccgctgccgccccctgccggcccctccctctatggcctcaaccacctttcccatcacccttccgggaacctggactacaacggggcgccccctatggcgcccagccagcaccacggaccctgcgaaccccaccccacctacacagacctctcctctcaccacgcgcctcctcctcagggtagaatccaagaagcgcccaaattaacacacctgtgatgggaaagggcgaacgaggattaggggatggggaggaagagagagactgtggagctctggggggcaacctggaggtc

SEQ ID NO: 141270 - DNA, 3757 bp, Homo sapiens
  Payload ID: 7756
  Gene Symbol: HOXB4
  Gene Name: homeobox B4
  Uniprot ID: P17483
  ENST ID: ENST00000332503
  CDS Start-End: 1793-2548
gagaattgaaaaccttgtaatcccaagaacagactcgcactgcctttttctgttcccagagctcaaaactagaacaaaacgaaataaaaccaaagcactcaaaccacaccccaaacgaagaaggcgcggaaagtaggagaactggaaaatttctgggccaagaagatctgtctgtcttctgtatataccctgtagatccgaatttgtgtaaggaattttgtggtcacaaattcgtatctaggggaatatgtagttgacataaacactccgctcttatttttccagaagaaaaaaatatatatatatgtatatgtagtatttttctgaatgaggacagtctggtgactggccacacgaagactccttcctctttattcctctatcttttcctccttcaactggttagagatggagaaatcatctacctgaactctccccacgcctgcccctgggagccttggtcccttttcacatctctttaagaggttaatgttattgttgttgaagttttaaatttatcttctcgtcccaaacgcacccattttctattctgggctcagggaggctttattggaaattgcgaaaaaaaatgacttgtcttcagtgtgcgaagaaggcaaaggaaatttgtttaacaaacggatgctgaggccgcctttccgtttcagttcagaacaagatgacctggaaatactcgattaccaaggagtgttattgtctgtgtgggtcacctctatggctgtatccccagtatcaaagggatgtgagatttctattcgccgcggaggcggcgacaattagaacgtctcggacccatggttagtattgctcgggtggttatggaattagcaaattgctaatcaattttgctctcaaaagttgcaggtttttttaccccagcgctctgtctatagtgtgggaaaccaagtcgtttctccaggcttgggccgtgtgggttaaagggaggagtggataggagaagggggacagacggactgacggacacagtctagctaaccgtgcagctaaatgagatttggaaggcgaagtctccccgaattagtgcatgaatttcctatcgatccgcccgcggttccattcatctctgacaagtccctctgcgcacccgccctctagctctggacgcctcctctctcacccctacccttccccatccagctgcagagaaaagccccaagctctgtgctctggcccccgtatgggttcccctttcgagacggagcccccaacccgccagtaacctaactccccatagagacgcagggtgctagcgctccctcccgccgaggggaggagactggggcctttggaaggtacagaatgctgggcagaggtgaggcagaacaggagggctacaccgggagccccaacttcttaagggatctagggtttgcgctctgcctagcgccccaacaggccctccagtcgcaacctgcgcgcgctctctctctcgctctctctctgatcccggagagagcgaggcaaggagggggtcgccccgcaggagccctatgtaaatcctggtgttgggtgggtgggtggggagggggaagggaagaaggggaaataaacctctttggctggagtggggtccgggtgagcagatttccttatccgggaatcgcaggcggggcggccattggctcggaggatcacgtgggcgcctaactttgttcacttgacagtaagtaggagggctttcggaaacaggaaaacgagtcaggggtcggaataaattttagtatattttgtgggcaattcccagaaattaatggctatgagttcttttttgatcaactcaaactatgtcgaccccaagttccctccatgcgaggaatattcacagagcgattacctacccagcgaccactcgcccgggtactacgccggcggccagaggcgagagagcagcttccagccggaggcgggcttcgggcggcgcgcggcgtgcaccgtgcagcgctacgcggcctgccgggaccctgggcccccgccgcctccgccaccacccccgccgcccccgccaccgcccggtctgtcccctcgggctcctgcgccgccacccgccggggccctcctcccggagcccggccagcgctgcgaggcggtcagcagcagccccccgccgcctccctgcgcccagaaccccctgcaccccagcccgtcccactccgcgtgcaaagagcccgtcgtctacccctggatgcgcaaagttcacgtgagcacggtaaaccccaattacgccggcggggagcccaagcgctctcggaccgcctacacgcgccagcaggtcttggagctggagaaggaatttcactacaaccgctacctgacacggcgccggagggtggagatcgcccacgcgctctgcctctccgagcgccagatcaagatctggttccagaaccggcgcatgaagtggaaaaaagaccacaagttgcccaacaccaagatccgctcgggtggtgcggcaggctcagccggagggccccctggccggcccaatggaggcccccgcgcgctctagtgcccccgcacgcgggagccacgaacctcggggtgggggtgggcagtgagtgcaggggatggggtggggggacaggagggggccctggggcctgggccccggaaaaatctatctgccctcccccacactttatatacgaataaacgcagaagagggggaggggaagctttatttatagaaatgacaatagagggccacggggaggcccccccagaagcaagattcaaatctcttgctttctttcttaaaaaaaagaaaaagaaaaagcaagaagaaggaagaaagaaaaagacagaaagagaaataggaggaggctgcagctcctcgttttcagctttggcgaagatggatccacgtttcatctttaatcacgccaggtccaggcccatctgtcttgtttcctctgccgaggagaagacgggcctcggtggcgaccattacctcgacacccgctaacaaatgaggcccggctcggccgcctccgcctctgctactgccgctgctggaagacagcctggatttcctttctttgtcccccactcccgatacccagcgaaagcaccctctgactgccagatagtgcagtgttttggtcacggtaacacacacacactctccctcatctttcgtgcccattcactgagggccagaatgactgctcacccacttccaccgtggggttgggggtgggcaacagaggaggggagcaagtagggaagggggtggccttgacaactcaggagtgagcaggaaaattgagtccaaggaaaaagagagactcagagacccgggagggccttcctctgaaaggccaagccaagccatgcttggcagggtgaggggccagttgagttctgggagctgggcactactctgccagtccagagttgtacagcagaagcctctctcctagactgaaaatgaatgtgaaactaggaaataaaatgtgcccctcccagtctgggaggaggatgttgcagagccctctcccatagtttattatgttgcatcgtttattattattattgataatattattattactatttttttgtgtcatgtgagtcctctctccttttctctttctgacattccaaaaccaggccccttcctacctctggggctgcttgagtctagaacccttcgtatgtgtgaatatctgtgtgctgtacagagtgacaatagaaataaatgtttggtttcttgtga

SEQ ID NO: 141271 - DNA, 2041 bp, Homo sapiens
  Payload ID: 7757
  Gene Symbol: HOXB5
  Gene Name: homeobox B5
  Uniprot ID: P09067
  ENST ID: ENST00000239151
  CDS Start-End: 280-1089
cattgaatcggccctaacgattctcggatcgtcattatttgtaaccatagagcatgaattacctcttgaggtcatcagcgagaatttacgactggtcaacaaaagcacgtgattccctaacgccccccaccccccttccaaccccccccccatatttggccgcatacatagcaaaacgaagtacagtgcatcgctataattcattaatacatcataaatcgtgaagcacagggttataacgaccacgatccacaaatcaagccctccaaaatcacccaaatgagctcgtactttgtaaactccttctcggggcgttatccaaatggcccggactatcagttgctaaattatggcagtggcagctctctgagcggctcttacagggatcccgctgccatgcacaccggctcttacggctacaattacaatgggatggacctcagcgtcaaccgctcctcggcctcctccagccactttggggcggtgggcgagagctcgcgcgccttccccgcgcccgcccaggagccccgcttcaggcaagcggcttcgagctgctccctgtcctcgcccgagtccctgccctgcaccaacggcgacagccacggcgccaagccctctgcttcgtccccctccgaccaggcgacctcagccagctccagcgccaatttcaccgaaatagacgaggccagcgcgtcctcggagcctgaggaagcggcaagccagctaagcagccccagcctagctcgggcgcagccagagcccatggccacctccacagccgcgcccgaggggcagactccgcaaatattcccctggatgaggaagcttcacatcagccatgatatgaccgggccggacgggaaaagggcccggaccgcgtatacccgctaccagaccctggagctggaaaaggagttccacttcaaccgctacctgacccggcgacggcgcatcgagatcgcccacgcactctgcctgtccgagcgccagatcaagatctggttccagaaccggcgcatgaagtggaagaaggacaacaaattgaaaagtatgagcctggctacagctggcagcgccttccagccctgagcccgcccagaggagcccagcggcccaagagcccgtgccacccccagccctggcccctccaatcctccccgctctgccgccgcccgctggggaccggttcccacaagcctgcctcgccttgtgttacgatatttcgtttggtcttaggtcttcctgtggctccctctctcctggactggttatcttgttattattgttaataataattattattattattttccttccatgctcccaactcccttctgcttgtcccaaatccgccagtgtttctgaatgtttgtgtctgtggttgcagtctttcccccaggaaaaaaaaaaaaagaaattcgcatgtttaatgtgaactctcccctccccatctgtgttctaacttatttataaaaagatgatcgctgtattttgagtttcagctggaaacttctgtaaggggcagcagttgaggtggggtagtgccgcagtggggtcaagctgagctggcttcggagatggagtcccttttcattctcctcctcctccctcctcactccctaggcccaagtctcctaggggcttggtcctagggtgggaaggggctagggaggaccaaagggatggtattgagaagagagaaagaagatagtgagatttaagttcctgctgcctgggtaggccccacaaggcctggtctgggagtatacggaaacaaaaatgatcctcagtgcaaaatgtcttgtgtatttctctgtgaatccatgggtctggctagagggcccaaagcttgtaaatatggggatagtctgggtcagacccatctctcccttacccatcttgcttccaagaccatttgtagtgagcgagtggatgctgtgctacgtgtgaaatctgtctttgcggggcctgtctcagtgattcgcttttggtatttgtttgtagctttcctggaagtcaaataaatgtttcccccactcca

SEQ ID NO: 141272 - DNA, 1660 bp, Homo sapiens
  Payload ID: 7758
  Gene Symbol: HOXB6
  Gene Name: homeobox B6
  Uniprot ID: P17509
  ENST ID: ENST00000225648
  CDS Start-End: 326-1000
caccacacctaggtcggagcactgtcgtccttcagggctccagcctcttgatatttttgtacttcagtatcagctcgatagagcaaaagagagagaggacgagagagggggtcagagaaggggaagcaacggctctcacgttgggacaatattatctggaagctgaagaagaaactgaatactccttccttcctccccacccattcctttaaatccggagggggaaaaaatcccaaggtctgcaaaggcgcggcgctcggactataaaacacaacaaatcataaacccggcggagcagcagcggccgcgcgcgcctcccctcccaatgagttcctatttcgtgaactccaccttccccgtcactctggccagcgggcaggagtccttcctgggccagctaccgctctattcgtcgggctatgcggacccgctgagacattaccccgcgccctacgggccagggccgggccaggacaagggctttgccacttcctcctattacccgccggcgggcggtggctacggccgagcggcgccctgcgactacgggccggcgccggccttctaccgcgagaaagagtcggcctgcgcactctccggcgccgacgagcagcccccgttccaccccgagccgcggaagtcggactgcgcgcaggacaagagcgtgttcggcgagacagaagagcagaagtgctccactccggtctacccgtggatgcagcggatgaattcgtgcaacagttcctcctttgggcccagcggccggcgaggccgccagacatacacacgttaccagacgctggagctggagaaggagtttcactacaatcgctacctgacgcggcggcggcgcatcgagatcgcgcacgccctgtgcctgacggagaggcagatcaagatatggttccagaaccgacgcatgaagtggaaaaaggagagcaaactgctcagcgcgtctcagctcagtgccgaggaggaggaagaaaaacaggccgagtgaaggtgctggaaagggagggaggacgcgaggggaaaggcctgtggggagccgagggcgtcagagagacccgggaaggaaggctctcgggtgggggagccaggagacctgctctccggcgcagacaggcggggcccagcgctctcctggacgcccccgcccgcacagctcccggcgggtgctctgaggcctcactactcgagcccacccagcatcccgcgcgcccttccttcccgaggaactcgcctcagcctgatcaggcttcctggtgagaactgaggagcggactcacttgatgtttcctggaagcagagcaaaatgctcttgtccctgtcgcgtctcattttgtccatgtcccccgtgcacggttcaatggtagattcgctgtcccctcagcgggggccttgaagactccctgatcccagacctgtcgtctctcccaccccctccccaaagccactggaaggagcacatactacctagaagtaagaagaggagcctcagaagaaaacaaagttctattttattaattttctatgtgttgtgtttgtagtcttgtcttagctctggacgtgaaatacttcgatgatgatgatgatgatgatgatgataataataataataataacaacaacaacaacaataataaagatgtgaaaactc

SEQ ID NO: 141273 - DNA, 1960 bp, Homo sapiens
  Payload ID: 7758
  Gene Symbol: HOXB6
  Gene Name: homeobox B6
  Uniprot ID: P17509
  ENST ID: ENST00000484302
  CDS Start-End: 624-1298
taatgcagcattcttttggacaccacacctaggtcggagcactgtcgtccttcagggctccagcctcttgatatttttgtacttcagtatcagctcgatagagcaaaagagagagaggacgagagaggggggtgaggagaaaagagagagagcgcgagagggagagggagagaaggaggggtgggaattacacaaagagagaaccaaaaataattttgattcctaagttaatttgctcactgatctgggattttagtcaccatggagggtaaatggacaatctgcccaggactgcagcccgatactatttttcaaagccagaacttactccattttctatgcaaatgtcagaaaaatgaaacaccctctctcccaagtcagagaaggggaagcaacggctctcacgttgggacaatattatctggaagctgaagaagaaactgaatactccttccttcctccccacccattcctttaaatccggagggggaaaaaatcccaaggtctgcaaagctaaaacccaatctcggatatactactaataggcgcggcgctcggactataaaacacaacaaatcataaacccggcggagcagcagcggccgcgcgcgcctcccctcccaatgagttcctatttcgtgaactccaccttccccgtcactctggccagcgggcaggagtccttcctgggccagctaccgctctattcgtcgggctatgcggacccgctgagacattaccccgcgccctacgggccagggccgggccaggacaagggctttgccacttcctcctattacccgccggcgggcggtggctacggccgagcggcgccctgcgactacgggccggcgccggccttctaccgcgagaaagagtcggcctgcgcactctccggcgccgacgagcagcccccgttccaccccgagccgcggaagtcggactgcgcgcaggacaagagcgtgttcggcgagacagaagagcagaagtgctccactccggtctacccgtggatgcagcggatgaattcgtgcaacagttcctcctttgggcccagcggccggcgaggccgccagacatacacacgttaccagacgctggagctggagaaggagtttcactacaatcgctacctgacgcggcggcggcgcatcgagatcgcgcacgccctgtgcctgacggagaggcagatcaagatatggttccagaaccgacgcatgaagtggaaaaaggagagcaaactgctcagcgcgtctcagctcagtgccgaggaggaggaagaaaaacaggccgagtgaaggtgctggaaagggagggaggacgcgaggggaaaggcctgtggggagccgagggcgtcagagagacccgggaaggaaggctctcgggtgggggagccaggagacctgctctccggcgcagacaggcggggcccagcgctctcctggacgcccccgcccgcacagctcccggcgggtgctctgaggcctcactactcgagcccacccagcatcccgcgcgcccttccttcccgaggaactcgcctcagcctgatcaggcttcctggtgagaactgaggagcggactcacttgatgtttcctggaagcagagcaaaatgctcttgtccctgtcgcgtctcattttgtccatgtcccccgtgcacggttcaatggtagattcgctgtcccctcagcgggggccttgaagactccctgatcccagacctgtcgtctctcccaccccctccccaaagccactggaaggagcacatactacctagaagtaagaagaggagcctcagaagaaaacaaagttctattttattaattttctatgtgttgtgtttgtagtcttgtcttagctctggacgtgaaatacttcgatgatgatgatgatgatgatgatgataataataataataataacaacaacaacaacaataataaagatgtgaaaactcga

SEQ ID NO: 141274 - DNA, 1371 bp, Homo sapiens
  Payload ID: 7759
  Gene Symbol: HOXB7
  Gene Name: homeobox B7
  Uniprot ID: P09629
  ENST ID: ENST00000239165
  CDS Start-End: 103-756
gtcctttttggtgtaaatctggactctaattctgtaatatatcaaggaatctcgtaaaaccgacactaaaacgtccctgcctacaaatcatccggccaaattatgagttcattgtattatgcgaatactttattttctaaatatccagcctcaagttcggttttcgctaccggagccttcccagaacaaacttcttgtgcgtttgcttccaacccccagcgcccgggctatggagcgggttcgggcgcttccttcgccgcctcgatgcagggcttgtaccccggcggggggggcatggcgggccagagcgcggccggcgtctacgcggccggctatgggctcgagccgagttccttcaacatgcactgcgcgccctttgagcagaacctctccggggtgtgtcccggcgactccgccaaggcggcgggcgccaaggagcagagggactcggacttggcggccgagagtaacttccggatctacccctggatgcgaagctcaggaactgaccgcaaacgaggccgccagacctacacccgctaccagaccctggagctggagaaagaatttcactacaatcgctacctgacgcggcggcggcgcatcgagatcgcgcacacgctctgcctcacggaaagacagatcaagatttggtttcagaaccggcgcatgaagtggaaaaaggagaacaagaccgcgggcccggggaccaccggccaagacagggctgaagcagaggaggaagaggaagagtgagggatggagaaagggcagaggaagagacatgagaaagggagaggaagagaagcccagctctgggaactgaatcaggaaactcaaatcgaatagggaagtaaaaaaacaaaacaaaaaacaaaaaaaacaaaaaaaaaaccctatttaaatgaaaggagtttaaaaacattttttaaggagggagaaaggagaaattttggtttttcaacactgaaaaaatactacctataggaaagtctgtcaggtttggtttttttgtacaatatgaaaaggatattatctacctgttctgtagctttctggaatttacctccccttttctatgttgctattgtaaggtctttgtaaaatcttgcagttttgtaagccctctttaatgctgtctttgtggactgtgggtctggactaaccctgtggttgcctgccctcctgagcctccgccttcccagcagcggcaccaaggggccttagggagccccaaaacctaccactcgcgtgttccccaagcgcctggctgctgcttcttgcttcccgtcccccagccccatgctcccttttacattctgtgtgtatctaaaggatggaaaaataaaacgcaattaaaaataaacagat

SEQ ID NO: 141275 - DNA, 1823 bp, Homo sapiens
  Payload ID: 7760
  Gene Symbol: HOXB8
  Gene Name: homeobox B8
  Uniprot ID: P17481
  ENST ID: ENST00000239144
  CDS Start-End: 236-967
ccttttctattcctggaaaccacaaaaagtgtgtcggcttcgagatcttcttcgccttttctttcttttctttttttccctcctctctttccctctcctttcctggcgagggtgactaggagccggcgaatccgcgtttttttctctctctccctccctttccccctccccaccccctccccaacagcccccaactatagcctccgccgccgccgccgcctcaaaattcaataaaatgagctcttatttcgtcaactcactgttctccaaatacaaaaccggggagtccctgcgccccaattattatgactgcggcttcgcccaggacctgggcggccgacccaccgtggtgtacggtcccagcagcggcggcagcttccagcacccgtcgcaaatccaggagttctaccacgggccgtcgtcgctgtccacggctccctaccagcagaacccgtgcgccgtggcgtgccacggggaccccggcaatttctacggctacgacccgctgcaacgccagagcctattcggtgcgcaggatccagacctggtgcagtacgcagactgcaagcttgccgccgccagcggcctgggcgaggaggccgagggctccgagcagagcccgtcgcccacacagctcttcccctggatgcgcccgcaagcagccgccggacgcaggcgaggccgacagacctacagccgctaccagaccctggagctggagaaggagttcctatttaatccctatctgactcgtaagcggcgaatcgaggtatcgcacgccctgggactgacagagagacaggtcaaaatctggttccagaaccggaggatgaagtggaaaaaagagaacaacaaagacaagttccccagcagcaaatgcgagcaggaggagctggagaaacagaagctggagcgggccccagaggcggcggacgagggcgacgcgcagaagggcgacaagaagtaggcttcagctgggactgccagggccgcggccgcccgcacgtccgcgggtcccggccgcgccgccgccgcgcgcccctgcccgagagagctctggccccgctagcggggccaggagccgggcctcccaccgcagcgtcccccgccgcgccagtccccgctagtggtagtatctcgtaatagcttctgtgtgtgagctaccgtggatctccttcccttctcttgggggccggggggaaagaaaaggatttaagcaaaggctccctcgccctgtgagggcgagcggcaaaggcccggctgagccccccatgcccctcccctccccgtgtaaaaagcctccttgtgcaattgtcttttttttcctttgaacgtgcttctttgtaatgaccaaggtaccgatttctgctaagttctcccaacaacatgaaactgcctattcacgccgtaattctttctgtctcccttctctctctctctctcgctcgctcgctctcgctctcgctctctctcgctgcgtcctcatttcccctcccaatcctctctcccctctgcaaccccccagctcgctggctttctctctggcttctctcttttcctcctccacccaccccctttggtttgacaattttgtcttaagtgtttctcaaaagaggttactttagttagcatgcgcgctgtgggcaattgttacaagtgttcttaggtttactgtgaagagaatgtattctgtatccgtgaattgctttatgggggggagggagggctaattatatattttgttgttcctctatactttgttctgttgtctgcgcctgaaaagggcggaagagttacaataaagtttacaagcgagaacccga

SEQ ID NO: 141276 - DNA, 502 bp, Homo sapiens
  Payload ID: 7760
  Gene Symbol: HOXB8
  Gene Name: homeobox B8
  ENST ID: ENST00000498634
  CDS Start-End: 1-386
cctacagccgctaccagaccctggagctggagaaggagttcctatttaatccctatctgactcgtaagcggcgaatcgaggtatcgcacgccctgggactgacagagagacaggtcaaaatctggttccagaaccggaggatgaagtggaaaaaagagaacaacaaagacaagttccccagcagcaaatgcgagcaggaggagctggagaaacagaagctggagcgggccccagaggcggcggacgagggcgacgcgcagaagggcgacaagaaaaacggcagcgtccaaggcccgtgggctggatcctgtgccctaggagcacctaggaagacttgctccatctccgcccgcatatctggggcaccaagagagacagagtcgtgagccaggctcgcctcattcctcgtcttgggagaaccggaccaacttccccaaaaggccttgccgtgcagaattggcctggtttaataaagaacagacctgccccaagcacccaccca

SEQ ID NO: 141277 - DNA, 743 bp, Homo sapiens
  Payload ID: 7760
  Gene Symbol: HOXB8
  Gene Name: homeobox B8
  ENST ID: ENST00000576562
  CDS Start-End: 1-729
atgagctcttatttcgtcaactcactgttctccaaatacaaaaccggggagtccctgcgccccaattattatgactgcggcttcgcccaggacctgggcggccgacccaccgtggtgtacggtcccagcagcggcggcagcttccagcacccgtcgcaaatccaggagttctaccacgggccgtcgtcgctgtccacggctccctaccagcagaacccgtgcgccgtggcgtgccacggggaccccggcaatttctacggctacgacccgctgcaacgccagagcctattcggtgcgcaggatccagacctggtgcagtacgcagactgcaagcttgccgccgccagcggcctgggcgaggaggccgagggctccgagcagagcccgtcgcccacacagctcttcccctggatgcgcccgcaagccgccggacgcaggcgaggccgacagacctacagccgctaccagaccctggagctggagaaggagttcctatttaatccctatctgactcgtaagcggcgaatcgaggtatcgcacgccctgggactgacagagagacaggtcaaaatctggttccagaaccggaggatgaagtggaaaaaagagaacaacaaagacaagttccccagcagcaaatgcgagcaggaggagctggagaaacagaagctggagcgggccccagaggcggcggacgagggcgacgcgcagaagggcgacaagaagtaggcttcagctgggac

SEQ ID NO: 141278 - DNA, 2581 bp, Homo sapiens
  Payload ID: 7761
  Gene Symbol: HOXB9
  Gene Name: homeobox B9
  Uniprot ID: P17482
  ENST ID: ENST00000311177
  CDS Start-End: 88-840
accggtccgggtgccacctctccctgcttgggcgccgccgcgcgagcgcttcccttccccctgcaagcgcccggataatgtctgagaatgtccatttctgggacgcttagcagctattatgtcgactcgatcataagtcacgagagtgaggacgcgcctccagccaagtttccttctggccagtacgcgagctcgcggcagccgggccacgcggagcacctggagttcccctcgtgcagcttccagcccaaagcgccggtgttcggcgcctcctgggcgccgctgagcccgcacgcgtccgggagcctgccgtccgtctaccacccttacatccagccccagggcgtcccgccggccgagagcaggtacctccgcacctggctggagccggcgccgcgcggcgaagcggccccggggcagggccaggcggcggtgaaggcggagccgctgctgggcgcgcctggggagctgctcaaacagggcacgcccgagtacagtttggaaacttcggcgggcagggaggccgtgctgtctaatcaaagacccggctacggggacaataaaatttgcgaaggaagcgaggacaaagagaggccggatcaaaccaacccctccgccaactggctgcacgctcgctcttcccggaaaaagcgctgtccctacaccaaataccagacgctggagctagagaaggagtttctgttcaatatgtacctcaccagggaccgtaggcacgaagtggccagactcctcaatctgagtgagagacaagtcaaaatctggtttcagaaccggcggatgaaaatgaagaaaatgaataaggagcagggcaaagagtaaagattaaagattacccccagtcctccctagctcttccccatctcactcttagttatgtgacgactgcaaagccagtgctgtctgggatgtattcaagtgaatggggaagggagtctctcttccaagtcctttatctgcacctagaacctccctcctttcctttgcccttacctgtctctctcttctctctaggtgtcaggagaaagttttgttgatttagaagatagaaatagttggttcctaagaatgtgatgggccacaaggaaagagagaccccagtcaagctcctagtatgccctgtaatttttctgggaagtcctagcccctcacttccagcttgcctgtttcttctctacacccacccaaaagtcacccagggacactccaactctacacagctcagcagacatccacacacagtaatggggtgagctcacaaccaccattcagtcaagtgaggtgacactccagttgcagaccatcgcacaccaaatttggcaaaacagccctcagactgtcaggcaagcccgggttctacccctaatgcaaatacccaccagggagatgtctagaggcagactcctgagtgaggtgttgcagcccaaaggctgcagcattgccataccattcccatggagttgccaactattctcaggccaagggccatggggaagatggagcaaacctagcccccaagccggtgggctagaaagtacaagaaaaggcagcacgtggttttatgaagctatcttaggtggagctactccccacctcccaccaacatatacattttgttgcaggaaatgtttaattccgcatgatgtttccctctccttccaacaaaagaaggtcaaactgtgggtcgtagagccttgacaatgttgtcctcctgttcatctgtgcaccacttgacagactgtagcttctcttgctctcgaccggccctgcattcttccgcaccctccctagctctgaaatcaactctcttcggtcgtatccaccttgcacccgcaagtcaagccgccccttgtagaaaaatccctccaccttccgttccccgctaggtcaaccccactgtagacaggaaagccaggccaggagagtccgaatgagaatttattgtgaatcgattcccaagctcccttccgggacaagtggtctgggacagggaggagcaacggccccagcgcgcaacgctctgcgcgttcctccgaatcccgtcggcttctcgacccacgcagagaagccccgggcttggcggctctagccccagcgccaaaggagacccgccccagggccgggcttggcctcctgcttcatgggcctggatgcagatctgcgtggctggtgcgtgcgcgcgcttctgggaaacagtcccgcgtgcaaaggaaaggggcaaaatggcacctaagcatcagatggaagcttactctctgcttccgttcctccccctgctcccctacttctcagtccccttcaatttgtagactcttgctcctgcttctcctgatcctgcaaggggacattccagtagaagttttttgctttgtcggtggctgtcgtgaaattgtgcttgtgtttcgtgatttctttgggggtgattgtctcgcttgttttcagttgtcgattatatgggagggttctgggtgggagtggggagggcgaggggcctagagctctaattgtttgttttggaagaaaaaaagaaaaagaacaaaaaatatatatcactctagaaaat

SEQ ID NO: 141279 - DNA, 1936 bp, Homo sapiens
  Payload ID: 7762
  Gene Symbol: HOXC10
  Gene Name: homeobox C10
  Uniprot ID: Q9NYD6
  ENST ID: ENST00000303460
  CDS Start-End: 75-1103
tcccggatggggaaaaaaaaagatgtcagctcctccgctgtagtattgctccttaaaaacccctctctctgaaaatgacatgccctcgcaatgtaactccgaactcgtacgcggagcccttggctgcgcccggcggaggagagcgctatagccggagcgcaggcatgtatatgcagtctgggagtgacttcaattgcggggtgatgaggggctgcgggctcgcgccctcgctctccaagagggacgagggcagcagccccagcctcgccctcaacacctatccgtcctacctctcgcagctggactcctggggcgaccccaaagccgcctatcgcctggaacaacctgttggcaggccgctgtcctcctgctcctacccacctagtgtcaaggaggagaatgtctgctgcatgtacagcgcagagaagcgggcgaaaagtggccccgaggcagctctctactcccaccccttgccggagtcctgccttggggagcacgaggtacccgtgcccagctactaccgcgccagcccgagctactccgcgctggacaagacgccccactgttctggggccaacgacttcgaagcccctttcgagcagcgggccagtctcaacccgcgcgccgaacatctggaatcgcctcagctggggggcaaagtgagtttccctgagacccccaagtccgacagccagacccccagccccaatgaaatcaagacggagcagagcctggcgggccctaaagggagcccctcggagagcgaaaaggagagggccaaagctgccgactccagcccagacacctcggataacgaagcgaaagaggagataaaggcagaaaacaccacaggaaattggctgacagcaaagagcggaaggaagaagaggtgcccctatactaaacaccagacgctggaattggagaaagaatttctgttcaatatgtatttgacgcgagagcgccgcctggagattagcaagaccattaaccttacagacagacaagtcaaaatctggtttcaaaatcgcagaatgaaactcaagaaaatgaaccgagagaatcggatccgggaactgacctccaattttaatttcacctgagagcgcggcctctcctcctcccttcccgctccttcctctccccgcccctcctccctttgtgcctggtgatatatttttttttcctccctgagtataaatgcaatgcgactgcaaaaaaggcaaagacctcagactctccttccaagggacctgtggttcgtgctgcgaagatgcttccacttaaagcatgagaaatggggtgccgggatgtggggtgtggtgtgtgccctcatagatgggggtgggagtgtggctggtgtgtgtgtcaagccctcactcacccacgcactcacacacagcattctgttctccatgcaaagttaagatcgaatccatccgcttgtaggggaaaaaaaggaaaaaaattaaccagagagggtctgtaatctcgcagagcacaggcagaatcgttccttccttgctgcatttcctccttagactaatagacgttttggaaagttcggctagtgttcgtgtgtttgtcgtagcacccagagcctccaccaaaccctctccatgtctttacctcccagtcgctctaagaatctgcttgaagtctcgtatttgtactgctttctgcttttctcccacccctcctagcacccccacatcccccatctagtaacatctcagaaatttcatccagaggaacaaaaaaattaaaaatagaacatagcaaagcaaagacagaatgcccccccccccaaatattgtcctgtccctgtctgggagttgtgttatttaaagatattctgtatgttgtatcttttgcatgtagcttccttaatggagaaaaaaaaacctaataaatttccagaatcataatcctcaaa

SEQ ID NO: 141280 - DNA, 526 bp, Homo sapiens
  Payload ID: 7762
  Gene Symbol: HOXC10
  Gene Name: homeobox C10
  ENST ID: ENST00000515593
  CDS Start-End: 145-526
attttcaaatcccattggtctagccgtcacatgctggactcctggggcgaccccaaagccgcctatcgcctggaacaacctgttggcaggccgctgtcctcctgctcctacccacctagtgtcaaggaggagaatgtctgctgcatgtacagcgcagagaagcgggcgaaaagtggccccgaggcagctctctactcccaccccttgccggagtcctgccttggggagcacgaggtacccgtgcccagctactaccgcgccagcccgagctactccgcgctggacaagacgccccactgttctggggccaacgacttcgaagcccctttcgagcagcgggccagtctcaacccgcgcgccgaacatctggaatcgcctcagctggggggcaaagtgagtttccctgagacccccaagtccgacagccagacccccagccccaatgaaatcaagacggagcagagcctggcgggccctaaagggagcccctcggagagcgaaaaggagagggccaaagctgccgact

SEQ ID NO: 141281 - DNA, 2039 bp, Homo sapiens
  Payload ID: 7763
  Gene Symbol: HOXC11
  Gene Name: homeobox C11
  ENST ID: ENST00000243082
  CDS Start-End: 115-1251
gctcagagagagagagactaagacggataacgcgtcatctcgccttcccaaattttcccccctcgctagaccgggtccaaaacctccatccggagccggcaggagaggagaacgatgtttaactcggtcaacctgggcaacttctgctctccgtcgcgcaaggagaggggcgcagatttcggcgagcgagggagctgcgcctccaacctctatctgcccagttgcacttactacatgcccgagttctccacggtctcctccttcctgccccaggccccctctcgtcagatctcctatccctactcggcccaagtgcccccggtccgggaggtctcctacggcctggagccatccggcaagtggcaccatcggaacagctactcctcctgctatgcggcggccgacgagcttatgcaccgggagtgcctgcctccttccaccgtcaccgagatcctcatgaaaaacgaaggctcctacggcggccaccaccaccccagcgccccgcacgcaacccccgccggcttctactcctcagtcaacaagaacagcgtcctgcctcaagccttcgaccgtttcttcgacaacgcctactgcggtggcggcgacccgcccgccgagcccccctgctccggcaagggcgaggccaagggggagcccgaggcacccccggcctcgggactggcgtcccgggctgaggcgggtgccgaggcggaggctgaggaggagaacacaaatcccagctcgtccggttcagcccactccgtggccaaggagccggccaaaggagccgcccccagtagacgccccccgcacccgcaagaagcgctgcccttattcgaaattccagatccgggaactggagcgagagtttttcttcaacgtgtatatcaacaaagagaagcggctgcagctgtcccggatgctgaacctgacggaccgacaagtgaaaatttggtttcagaacagaaggatgaaagaaaagaaactgagcagagaccggctgcagtatttctcgggaaatcctctgctgtaacctgcagaccgggcccttttgggggcggggggaggggaaaattattttattttatttttattttttattttctaactcgtcttctttccgccggtggaaaactggactgtggccagggctggcccccaccgctgtggccggcactccattccggaacctcctggaccctctatctgactctcgctgtgggacagggaccgggcctggaaagggggtgaagggaagtgtctgatgcacggcgagtgaacaccgttggcgccgaggccaagactttgatttaaaagaaaacacacctcggcgacaatgtcttgctgctcggattaggtgggggaggggcgacagtagtgagcgcctgagccgaacaatcctcgaactaaaagccttcccttgcccatgtgaaaagatccgctaagacagcatgtctgccagcggaaacttctcgagctcccccctctaccccgccccaccttgcagctaaatgtgatcctgccttgctgtgaaatttctgtaccttcaacctggtgttaggtgtgcaaagtccgtgtcctacctccgtcttcgccaaggccccgcccgagcctagttgttctccccctgaatgtgtagaaccttcctttgaaatttcttaatcggtgcattgaggtttccacatctttttccaagcagtgccccacttcatggatttatagctatagtctatgcagtcgttacctcttttttttttttttttaagaaaattgaagattggggtggtggaggcagtagggagatgggattgggcacctcccccgtgctggggcctggatttttgtaaataaatttcccaagcgtttctttccacctggagggaaagggggggacgcccccagtgagattcaaatcacgcatctctactcctctgcgtgagtgcgtgtgtacatgtgcactccccaccctgctcccttcccagagggattgctgtgaaatttttttggtggcaaataaagataaatttcattctgttcaa

SEQ ID NO: 141282 - DNA, 3261 bp, Homo sapiens
  Payload ID: 7763
  Gene Symbol: HOXC11
  Gene Name: homeobox C11
  Uniprot ID: O43248
  ENST ID: ENST00000546378
  CDS Start-End: 117-1031
gtgctcagagagagagagactaagacggataacgcgtcatctcgccttcccaaattttcccccctcgctagaccgggtccaaaacctccatccggagccggcaggagaggagaacgatgtttaactcggtcaacctgggcaacttctgctctccgtcgcgcaaggagaggggcgcagatttcggcgagcgagggagctgcgcctccaacctctatctgcccagttgcacttactacatgcccgagttctccacggtctcctccttcctgccccaggccccctctcgtcagatctcctatccctactcggcccaagtgcccccggtccgggaggtctcctacggcctggagccatccggcaagtggcaccatcggaacagctactcctcctgctatgcggcggccgacgagcttatgcaccgggagtgcctgcctccttccaccgtcaccgagatcctcatgaaaaacgaaggctcctacggcggccaccaccaccccagcgccccgcacgcaacccccgccggcttctactcctcagtcaacaagaacagcgtcctgcctcaagccttcgaccgtttcttcgacaacgcctactgcggtggcggcgacccgcccgccgagcccccctgctccggcaagggcgaggccaagggggagcccgaggcacccccggcctcgggactggcgtcccgggctgaggcgggtgccgaggcggaggctgaggaggagaacacaaatcccagctcgtccggttcagcccactccgtggccaaggagccggccaaaggagccgcccccaacgccccccgcacccgcaagaagcgctgcccttattcgaaattccagatccgggaactggagcgagagtttttcttcaacgtgtatatcaacaaagagaagcggctgcagctgtcccggatgctgaacctgacggaccgacaagtgaaaatttggtttcagaacagaaggatgaaagaaaagaaactgagcagagaccggctgcagtatttctcgggaaatcctctgctgtaacctgcagaccgggcccttttgggggcggggggaggggaaaattattttattttatttttattttttattttctaactcgtcttctttccgccggtggaaaactggactgtggccagggctggcccccaccgctgtggccggcactccattccggaacctcctggaccctctatctgactctcgctgtgggacagggaccgggcctggaaagggggtgaagggaagtgtctgatgcacggcgagtgaacaccgttggcgccgaggccaagactttgatttaaaagaaaacacacctcggcgacaatgtcttgctgctcggattaggtgggggaggggcgacagtagtgagcgcctgagccgaacaatcctcgaactaaaagccttcccttgcccatgtgaaaagatccgctaagacagcatgtctgccagcggaaacttctcgagctcccccctctaccccgccccaccttgcagctaaatgtgatcctgccttgctgtgaaatttctgtaccttcaacctggtgttaggtgtgcaaagtccgtgtcctacctccgtcttcgccaaggccccgcccgagcctagttgttctccccctgaatgtgtagaaccttcctttgaaatttcttaatcggtgcattgaggtttccacatctttttccaagcagtgccccacttcatggatttatagctatagtctatgcagtcgttacctcttttttttttttttttaagaaaattgaagattggggtggtggaggcagtagggagatgggattgggcacctcccccgtgctggggcctggatttttgtaaataaatttcccaagcgtttctttccacctggagggaaagggggggacgcccccagtgagattcaaatcacgcatctctactcctctgcgtgagtgcgtgtgtacatgtgcactccccaccctgctcccttcccagagggattgctgtgaaatttttttggtggcaaataaagataaatttcattctgttcaatattatgattttatttgacccttttattaacccctctcctcttaaaatcctccatgctcccatggcagcggcggaggaggaggaggcaggcaggcagagcccagcgggtgaggacaggcaggcagaggtgagataggccggtgctagccggcctggagctcctctccgctggcagggccaagagtatggccgtagtctcctcacattctcaagctgaggacattccatagctactctgaagctctcctttctcacgtgcagctcgagctgtgtccaaacgcccagcaacggctttctgtttaagtacacgtttgttgtggagttaattgtaaccatcatcgaatttaaatttataggaatttttttggctccaccgcccttctgccagatgtctccgtctgtcgcagttaaatgtgtagtgtggaggttagggcttttttttttttttctctaggagaaatctgtattggaatttttatacactgtttttaaggaaggaggggacagaaggagaaaccagccccctccctctcctctccacagctcctgggggtgggaaggtggggcctggctgctttccctctggcacaaatggccaggctcttccagacacaacaagacgcctatactggggccaccctgatgtttatacattgggtgtcccacagtagaaagccccagaggtttgttttgtaggggttggcactggggatggagatgacctgcggggacagtcaccatacccatctatatttgctgcatgtttcttctgtataaagataatcatggcccttgcagtgctttcagtgagggcacttcgttggtctctgtttcaaattcgttatttgggggcagaggttcaggacaactcatctcatctttccctcctctttctgtctttgtataattcaaagaaaatatttttgtcaatacaattctgttggatgaaaggaaaaagcatcatgactatcaaatctaggttctgtcatttttgatggtaggaatccctgcagcttaggtatctaaatttctaatttgtaaacgtgggtcgggtcgtgagacaagatttgcaaactagggtgtatatgcagcccacaattccctcatgtgcccacacacaaacgttttatttaactcggtgtgcctatgggtgcacataagaaggaatattatttatatgcttttgtctgttgcatggagtaaacctgaccacatacacatcta

SEQ ID NO: 141283 - DNA, 3335 bp, Homo sapiens
  Payload ID: 7764
  Gene Symbol: HOXC12
  Gene Name: homeobox C12
  Uniprot ID: P31275
  ENST ID: ENST00000243103
  CDS Start-End: 97-945
cgtgagtggggcggccaatgggtgactggtgcagatttaactatgtttaatgtcagatagcaataaagtagaagctgccggtcgggccccgcggaaatgggcgagcataatctcctgaatcccgggtttgtggggccgctggtaaacatccacacgggagacaccttctacttccccaacttccgcgcgtccggggcgcagcttcccgggctgccttcgctgtcctacccacgccgcgacaacgtgtgctccctgtcctggccgtcggcggagccgtgcaatggctacccgcagccctacctcggcagcccagtgtctctcaaccctcccttcggccgcacgtgcgagctggcgcgcgtggaggacggcaagggttactaccgcgagccgtgcgccgagggtggcggcgggggcctgaagcgtgaggagcgcgggcgcgacccgggagccgggcccggggcagcgctgctcccgctggagccgtcggggccgcctgcgctcggcttcaagtacgactacgcggcgggcggcggcggtggcgacggcggcggcggcgcaggacctccgcacgacccgccctcctgccagtcgctggaatccgactccagttcgtccctgctcaacgagggcaacaagggcgccggcgcaggcgaccccggcagcttggtatcgccgttgaaccccggcggcgggctctcggccagcggcgcgccctggtacccgatcaacagccgctctcggaagaagcgcaagccctattcgaagttgcaactggcagagctggagggcgagtttctggtcaacgagttcatcacacgccagcgccggagggaactctcagaccgcttgaatcttagtgaccagcaggtcaagatctggtttcagaaccggagaatgaaaaagaaaagacttctgttgagggagcaagctctctccttcttttaaggtgcaggacacgggcgccagccccagactgagcctgtccctggcagagagcaaaagagggcgccgcctagaacacagtccccacttagaacgccaggcgtctctggcaggccctccctggatatcctcttgtctgttttgttcgtggttccctcccatacacacccaaaacaccctgccaggtcccagagagaagggaagaaacctagccagggagagcagaagccggcagctgcctgcggttggcaggggcaggaaggctgaggtgctgcgggctggtttatttgaggcaggactggggcactgcacctccgctgaggatctggagaagcagcggcccagatgtccccttcctctacttcccttccatggtcttaattctctttgccgtcaggagcaaagagcagggccagtggaaccaaggcacctcaacctcacagttcctggggttagaagaggctgggaagagagaggagggtggagggtcagcggagagagctgagggagtcaggtgtctctggtagggctggaggaagtggggaaccaaggaggaagtgtggtttgtgagaaaatgattagcaagaaccagagtctgcttgggtctgggtcccccaggacacccagtgggcagaagcttgggcatttggctggccgggctgtggacaaggactatcagcctcatgttccctctaggaccagaacagtgtcctggtccccagccctctcctgatcccgctgcccgcaccgggcgaatgtctgttcataggtgtgctgccatccactcctccgttgcctgcggtggctgcaggcctgatgcagcaagcagggacctgagagcccaggggacacagcctcaggttcagtagccaccccagaggtccccagctggctctccagaaagaaagtgcaagaggctgtagatggggctacggagcaccacactgattggccgggagaatttctgacagccacagccgaggcctctgattctcccttccccgctggcgttcacggtcactgcctcacgggccggccagagggtggaccagcgtaatttacgaggcgggaggagaattcacccttaaaggggctaccagccattgaggtcccactcagccccagtttcccaggcccgtgagaatgaaggaggggggcgctccagccccccacccaactcccttctctcttcctcgcccgccccccaacattgccctttgtcttcagaagggctgcctccgcctcctggcctgcaaacctccacagcctagcacatggaccagagcagagggaggggcacagccctagaacccattggaggtctgagaatggcttctctgagtgggaaggactttcatccagactccttcagaccccagccccagcccagtagacgctgggctggcttggaagagaggagcagtgagagaaccatcaacctttctgtacttcatttttatccttctccccaagagtcccccagcctcccatctgctgtccggccctttccaggagcaagaggggtgagaagcagggcactgatgggagttaactgcagcctggacagtgtgaaactggcctgctggcttggagtgtttcccatatggggagagtctcccctaacaaactctccaaaggcaatccaccgagctttttactctcccaccagcacacagcttctgtacaggcagaggcaaaggcaaacacatacacacagctgagcccagcacagcactgggcccaccccactctccctagtgcactcgcaagcaggcagcctcataatccccacatggcccagcagaatggagataaaatcacatgcctccatcccccgctgggtatctgacacctgacaattccccatccacacatacttgcttcacccatgtacaagttcccccaaattaccaccattccagctgtctgcagtctcctgtggtcttcccctgggcatgaagcactccccaccttgactggtcacccactgtaccccctttatgcagcccttcctgtgacctctgggctctagggtgctggatttgagctctaccactccagactaacctgattcccaatctaataatgaagagggaccagaacactctaaaaggagtgaggggacaaagatatgcaatattctctttccatttgctttaaacttgacttctgtgaggttctctgtcaatctgtgtcttgttctctgtgtctgtcgctggtacctagtgtagtccctgtggatagttgcccttcccctagctgcctccccagctctctgtagtgtaattctcctattccaacgtctgtctttagcacgttttccctttatatagtccttgtacagagttgcttcatcatattaatattgataataataataattaaaacatgaa

SEQ ID NO: 141284 - DNA, 2423 bp, Homo sapiens
  Payload ID: 7765
  Gene Symbol: HOXC13
  Gene Name: homeobox C13
  Uniprot ID: P31276
  ENST ID: ENST00000243056
  CDS Start-End: 143-1135
gggaggtggaagcactaggaggaggggaggggtggagagaaaagaggggagggatggggggaggggaaacaggagcgaggtgtctccctagctcgctgcctctggcaagtggagtttttaaaaagctccagcagatcatgtcatgacgacttcgctgctcctgcatccacgctggccggagagccttatgtacgtctatgaggacagcgcggcggagagcggcatcggcggcggcggcggaggaggaggcggcggcacgggcggagcggggggtggctgcagcggagcgagccccggcaaagccccgagcatggatggtctgggcagcagctgcccggccagccactgccgcgacctgcttccgcaccccgtgctgggccgcccgccggctcccctgggcgcccctcagggcgccgtctatacggacatcccggccccggaggcggcgcgccagtgtgccccgccgcccgcaccccccacctcgtccagcgccaccctgggctacggctaccccttcgggggcagctactacggctgccgcctgtcgcacaacgtgaacctgcagcagaagccttgcgcctaccacccgggcgataaatacccggagccgtcgggcgccctgcccggtgacgacctgtcctctagggccaaggagttcgccttctaccccagcttcgccagctcctaccaggcgatgcccggctacctggacgtgtcggtggtgcccgggatcagcgggcacccggagccgcgtcacgacgccctcatccccgtcgaaggctaccagcactgggctctctccaatggctgggacagtcaggtgtactgctccaaggagcagtcgcagtccgcccacctctggaagtctcccttcccagacgtggttcccctgcagcccgaggtgagcagctaccggcgcgggcgcaagaaacgcgtgccctacactaaggtgcagctgaaggagctagagaaggaatacgcggctagcaagttcatcaccaaagagaagcgccggcgcatctccgccaccacgaacctctctgagcgccaggtaaccatctggttccagaaccggcgggtcaaagagaagaaggtggtcagcaaatcgaaagcgcctcatctccactccacctgaccacccacccgctgcttgccccatctatttatgtctccgctttgtaccataaccgaacccacggaaagacgctgcgcgggtgcagaagagtatttaatgttaaggaaagagaagaaccgcgccgcccggaggcagagaggctccatggccgtgctgctgggccatccccaactccctatcccatccccagcctccacccccatccagatgggactcacgtggcttcaacagctttggaaatgggtcccgagtgggccgtgcgaggaaggctgtcgacctctactcctccttgcgctcaccttgccagaaagtctggtggcagcgcagagcccaatcattccaaccaaagcagggttggggaatcccgaatggccccaattcttgcctcatcctatgaccaggcttttagaggaccttccctaagggcgcagcttcggagcaggatctgtccagctcatactttccttcgctgtccctcccgcactccttaggcaagatttcccagtaaagattttctgtgcgtattttaaaagtcgtgttaatactcatgataattattagggacctggcagcgtgattggagtatggatgtttccgtaaaagctggaattccgtaaaagcattgacgcagcccctacactccatcccaaccaagaaactgcatttcctggggccaggtgggagctgcctttgccccactgcctcccctgttctgctctctcagtcaacatgtggaaatccaaggaggacaaagactccagccacgctgctaaatagggctcctctctcctctctctctctctaggtggtaaggttggggattagtccaggtacagaagcagaacttttttctaaggataaacatctcttccaaggggatggagagtgggtccctcaacaaagtccctgtccagtcacctttccatcagggcactagcccaggaatgactcctcacactttcacctttactgatttccagaggaaagctagaggatctagttcaagaggcaagaagatctggccctcaattagctagatgtagatgctgcctaacagttccctcctcaaaggccaccttggtgctgtgggggccccttgcctcttcccttcccactggtgcattacaaaacagtgttcttttgaaatgttcatcaggaataggcttttttaaaaaatgttgtgtatctgtatatagtattgtgatgtctgaatgacaatgtactgaatgcaaaaaggaaaaaaacccacaaacatgtttttaaaataaaatatctttttttgccttga

SEQ ID NO: 141285 - DNA, 1524 bp, Homo sapiens
  Payload ID: 7766
  Gene Symbol: HOXC4
  Gene Name: homeobox C4
  Uniprot ID: P09017
  ENST ID: ENST00000303406
  CDS Start-End: 608-1402
acctgccctgggcgctcccttcattagcagtattttttttaaattaatctgattaataattatttttcccccatttaattttttttcctcccaggtggagttgccgaagctgggggcagctggggagggtggggatgggaggggagagacagaagttgagggcatctctctcttccttcccgaccctctggcccccaaggggcaggaggaatgcaggagcaggagttgagcttgggagctgcagatgcctccgcccctcctctctcccaggctcttcctcctgcccccttcttgcaactctccttaattttgtttggcttttggatgattataattatttttatttttgaatttatataaagtatatgtgtgtgtgtgtggagctgagacaggctcggcagcggcacagaatgagggaagacgagaaagagagtgggagagagagaggcagagagggagagagggagagtgacagcagcgctcgcgggggctcaacccccagacctccagaaatgacgtcagaatcatttgcatcccgctgcctctacctgcctggtccagctgggaccctgcctcgccggccgcatggccagagggttggaaattaatgatcatgagctcgtatttgatggactctaactacatcgatccgaaatttcctccatgcgaagaatattcgcaaaatagctacatccctgaacacagtccggaatattacggccggaccagggaatcgggattccagcatcaccaccaggagctgtacccaccaccgcctccgcgccctagctaccctgagcgccagtatagctgcaccagtctccaggggcccggcaattcgcgaggccacgggccggcccaggcgggccaccaccaccccgagaaatcacagtcgctctgcgagccggcgcctctctcaggcgcctccgcctccccgtccccagccccgccagcctgcagccagccagcccccgaccatccctccagcgccgccagcaagcaacccatagtctacccatggatgaaaaaaattcacgttagcacggtgaaccccaattataacggaggggaacccaagcgctcgaggacagcctatacccggcagcaagtcctggaattagagaaagagtttcattacaaccgctacctgacccgaaggagaaggatcgagatcgcccactcgctgtgcctctctgagaggcagatcaaaatctggttccaaaaccgtcgcatgaaatggaagaaggaccaccgactccccaacaccaaagtcaggtcagcacccccggccggcgctgcgcccagcaccctttcggcagctaccccgggtacttctgaagaccactcccagagcgccacgccgccggagcagcaacgggcagaggacattaccaggttataaaacataactcacacccctgcccccaccccatgcccccaccctcccctcacacacaaattgactcttatttatagaatttaatatatatatatatatatatatatataggttcttttctctct

SEQ ID NO: 141286 - DNA, 1666 bp, Homo sapiens
  Payload ID: 7766
  Gene Symbol: HOXC4
  Gene Name: homeobox C4
  Uniprot ID: P09017
  ENST ID: ENST00000430889
  CDS Start-End: 47-841
agaaaaacgacaaagcgagaaaaattattttccactccagaaattaatgatcatgagctcgtatttgatggactctaactacatcgatccgaaatttcctccatgcgaagaatattcgcaaaatagctacatccctgaacacagtccggaatattacggccggaccagggaatcgggattccagcatcaccaccaggagctgtacccaccaccgcctccgcgccctagctaccctgagcgccagtatagctgcaccagtctccaggggcccggcaattcgcgaggccacgggccggcccaggcgggccaccaccaccccgagaaatcacagtcgctctgcgagccggcgcctctctcaggcgcctccgcctccccgtccccagccccgccagcctgcagccagccagcccccgaccatccctccagcgccgccagcaagcaacccatagtctacccatggatgaaaaaaattcacgttagcacggtgaaccccaattataacggaggggaacccaagcgctcgaggacagcctatacccggcagcaagtcctggaattagagaaagagtttcattacaaccgctacctgacccgaaggagaaggatcgagatcgcccactcgctgtgcctctctgagaggcagatcaaaatctggttccaaaaccgtcgcatgaaatggaagaaggaccaccgactccccaacaccaaagtcaggtcagcacccccggccggcgctgcgcccagcaccctttcggcagctaccccgggtacttctgaagaccactcccagagcgccacgccgccggagcagcaacgggcagaggacattaccaggttataaaacataactcacacccctgcccccaccccatgcccccaccctcccctcacacacaaattgactcttatttatagaatttaatatatatatatatatatatatatataggttcttttctctcttcctctcaccttgtcccttgtcagttccaaacagacaaaacagataaacaaacaagccccctgccctcctctccctcccactgttaaggacccttttaagcatgtgatgttgtcttagcatggtacctgctgggtgtttttttttaaaaggccattttggggggttatttattttttaagaaaaaaagctgcaaaaattatatattgcaaggtgtgatggtctggcttgggtgaatttcaggggaaatgaggaaaagaaaaaaggaaagaaattttaaagccaattctcatccttctcctcctcctccttccccccctctttccttaggccttttgcattgaaaatgcaccaggggaggttagtgagggggaagtcattttaaggagaacaaagctatgaagttcttttgtattattgttgggggggggtgtgggaggagagggggcgaagacagcagacaaagctaaatgcatctggagagcctctcagagctgttcagtttgaggagccaaaagaaaatcaaaatgaactttcagttcagagaggcagtctataggtagaatctctccccacccctatcgtggttattgtgtttttggactgaatttacttgattattgtaaaacttgcaataaagaattttagtgtcgatgtgaaatgccccgtgatcaataataaaccagtggatgtgaattagtttta

SEQ ID NO: 141287 - DNA, 1805 bp, Homo sapiens
  Payload ID: 7767
  Gene Symbol: HOXC5
  Gene Name: homeobox C5
  Uniprot ID: Q00444
  ENST ID: ENST00000312492
  CDS Start-End: 271-939
ggttgggctttgccaacatatcgagatgcttttcgccggcttccatcactaacctcccggaggtcatcaagccaaatttatgagtggccgctcgagtcacgtgactctatttaaggctcccttatttgggaagagcgcataggataaagaaagagatatctccacctataaattgtccactttggagaacaaaaaacccctcaacttcaaagagtcacaaatcacccttaatcaaaaagggtgcagaaatttttttgggccctccccgccatgagctcctacgtagccaattcattctataagcagagccccaatatccctgcctataacatgcaaacttgtgggaactatggatcggcctcagaggtgcaggcatccaggtactgctacggcggattggacttaagcatcactttcccaccgcctgcgccttccaactctctccacggggtagacatggctgccaacccccgggctcaccccgaccgccccgcctgcagcgccgcggccgctccgggacacgctccgggcagagacgaagcggctcctctgaaccccgggatgtacagtcagaaggcggctcgcccggcgctggaggagcgagctaagagcagtggggagatcaaagaggagcaggcgcagacagggcagcccgccggactgagccagccaccggccccgccacagatttacccgtggatgaccaaactgcacatgagccacgagacggacggcaagcggtcccgaaccagttacacgcgctaccagactctggaactcgagaaagaattccactttaaccgctacctcactcgccgcaggcgcatagagatcgccaacaacttgtgtctcaatgagagacagatcaagatctggttccagaaccgcaggatgaagtggaagaaagattccaaaatgaaaagcaaagaggctctttagaggcagcgggggaggcccgcagagcgcgcccctagccggttcctgtccctgcgcctttccttttcgcctttcctctctatatttcgggtcgggggcaggtgctggagcactgggctcccgggccccacagacaaaagcgcttttccttggcattccgcatccctaccgacccagggttcccgcggggctgtcggcgctgccccatctcccctcagctcggctcagctcggtacccggggcccagggcaagctccgcaggacttccccggagggctgcggcgtacaggctggcgcagaacgaaccttggcctgggccgtatctccggctcccagcctcagcgcggccctcccgagttaaggtgggcccggcccgcgccacaggaccctcgccggaccctctaacctcgccctctcctttgttcccggctggacgggttagacagccaaaggctggcgagagtctggccctagactcggggtgcttccttgtagcgactaaactagattttcacttatgaatgatttgcatatgaaaggagagcatcggcctagggcccccacagttgctctatgctttccaaaccttatctccacaacctcttccccccaaaacccgggaacctccccagcctgcgcctgctgcatgccctctcaggccggcagccccagcctgctagctagctcaactagtggggtttcctggcactggaccccagcaagtggtcctagaggccctttgctgtcccatagtccctgccacgaatttctgtgccctcctgacccattgctgttgtccaactatttattgactctgggtccttcctgaaactatattttgtcatatcaaataaagagagaacaggact

SEQ ID NO: 141288 - DNA, 1733 bp, Homo sapiens
  Payload ID: 7768
  Gene Symbol: HOXC6
  Gene Name: homeobox C6
  Uniprot ID: P09630
  ENST ID: ENST00000243108
  CDS Start-End: 165-872
ttcctgacatctggcttgcgattggctgggagggggtcagctgactttgtcattttgtctgtcctggattggagccgtccctataaccatctagttccgagtacaaactggagacagaaataaatattaaagaaatcatagaccgaccaggtaaaggcaaagggatgaattcctacttcactaacccttccttatcctgccacctcgccgggggccaggacgtcctccccaacgtcgccctcaattccaccgcctatgatccagtgaggcatttctcgacctatggagcggccgttgcccagaaccggatctactcgactcccttttattcgccacaggagaatgtcgtgttcagttccagccgggggccgtatgactatggatctaattccttttaccaggagaaagacatgctctcaaactgcagacaaaacaccttaggacataacacacagacctcaatcgctcaggattttagttctgagcagggcaggactgcgccccaggaccagaaagccagtatccagatttacccctggatgcagcgaatgaattcgcacagtggggtcggctacggagcggaccggaggcgcggccgccagatctactcgcggtaccagaccctggaactggagaaggaatttcacttcaatcgctacctaacgcggcgccggcgcatcgagatcgccaacgcgctttgcctgaccgagcgacagatcaaaatctggttccagaaccgccggatgaagtggaaaaaagaatctaatctcacatccactctctcggggggcggcggaggggccaccgccgacagcctgggcggaaaagaggaaaagcgggaagagacagaagaggagaagcagaaagagtgaccaggactgtccctgccacccctctctccctttctccctcgctccccaccaactctcccctaatcacacactctgtatttatcactggcacaattgatgtgttttgattccctaaaacaaaattagggagtcaaacgtggacctgaaagtcagctctggaccccctccctcaccgcacaactctctttcaccacgcgcctcctcctcctcgctcccttgctagctcgttctcggcttgtctacaggcccttttccccgtccaggccttgggggctcggaccctgaactcagactctacagattgccctccaagtgaggacttggctcccccactccttcgacgcccccacccccgccccccgtgcagagagccggctcctgggcctgctggggcctctgctccagggcctcagggcccggcctggcagccggggagggccggaggcccaaggagggcgcgccttggccccacaccaacccccagggcctccccgcagtccctgcctagcccctctgccccagcaaatgcccagcccaggcaaattgtatttaaagaatcctgggggtcattatggcattttacaaactgtgaccgtttctgtgtgaagatttttagctgtatttgtggtctctgtatttatatttatgtttagcaccgtcagtgttcctatccaatttcaaaaaaggaaaaaaaagagggaaaattacaaaaagagagaaaaaaagtgaatgacgtttgtttagccagtaggagaaaataaataaataaataaatcccttcgtgttaccctcctgtataaatccaacctctgggtccgttctcgaatatttaataaaactgatattatttttaaaacttta

SEQ ID NO: 141289 - DNA, 2943 bp, Homo sapiens
  Payload ID: 7768
  Gene Symbol: HOXC6
  Gene Name: homeobox C6
  Uniprot ID: P09630
  ENST ID: ENST00000394331
  CDS Start-End: 1711-2172
acattgaatcaggaaatttttctgagaaaggcaggtgggtatgggcaatctgacacgatccaaaaggcttactgccttgcacccctccccgcaaaaaggaagtagagaccaagatcttgggctttaattttatttttaattgtaaaaagatttcaaataagccaccatttgaactgggaagggaaactagggatggtcttgggggaaaatgtcattctctctaagaaagggaccccggggatgtgggtcgttttgagggtcctagaagttgaccccaattctcacctctcctgctgcactgcaggattgcccagggtaggtctagtcccctaggttcttcagaccactccaggtcaggtttggttgggtggctgccagtggtcttccactactgttcctgtctagggtggagtaggagctttcaggggtacggcatagaggggatgttgttctcttactaaaaaaaaaaaaaaaaaaaaaaggtaggggtagggaggcaccctttcaatccctgcaattcaccagccatcactgcctcaaggccacaaatctttgcaaagctttgaattccgcctgatccaaccttaatgcccccatttattaaggacaatatttaaaactcggcaagccaggagaggcaaccgaccctcagtgcttgaagctttctttcgcctgggcgtccgccctcagctctttctgcgctcgcctgcagcagcctggcccgtggggagtgggcggtgggtgggggtaggggtggggtgggggtccggggatgctccctctatgagagaattgggtaaacatggcgaccgcggcgcccatttgcacacgctacacaaatgcatcgcattcccggttgtttgcagaaaatttacagctgagtaataaaagtttacgatcgactcacaagttggattggccacaagaagtcatgtggattccatccatgaacgtgaactttttattgtggtttgtccgttccgagcgctccgcagaacagtcctccctgtaagagcctaaccattgccagggaaacctgccctgggcgctcccttcattagcagtattttttttaaattaatctgattaataattatttttcccccatttaattttttttcctcccaggtggagttgccgaagctgggggcagctggggagggtggggatgggaggggagagacagaagttgagggcatctctctcttccttcccgaccctctggcccccaaggggcaggaggaatgcaggagcaggagttgagcttgggagctgcagatgcctccgcccctcctctctcccaggctcttcctcctgcccccttcttgcaactctccttaattttgtttggcttttggatgattataattatttttatttttgaatttatataaagtatatgtgtgtgtgtgtggagctgagacaggctcggcagcggcacagaatgagggaagacgagaaagagagtgggagagagagaggcagagagggagagagggagagtgacagcagcgctcggacgtcctccccaacgtcgccctcaattccaccgcctatgatccagtgaggcatttctcgacctatggagcggccgttgcccagaaccggatctactcgactcccttttattcgccacaggagaatgtcgtgttcagttccagccgggggccgtatgactatggatctaattccttttaccaggagaaagacatgctctcaaactgcagacaaaacaccttaggacataacacacagacctcaatcgctcaggattttagttctgagcagggcaggactgcgccccaggaccagaaagccagtatccagatttacccctggatgcagcgaatgaattcgcacagtggggtcggctacggagcggaccggaggcgcggccgccagatctactcgcggtaccagaccctggaactggagaaggaatttcacttcaatcgctacctaacgcggcgccggcgcatcgagatcgccaacgcgctttgcctgaccgagcgacagatcaaaatctggttccagaaccgccggatgaagtggaaaaaagaatctaatctcacatccactctctcggggggcggcggaggggccaccgccgacagcctgggcggaaaagaggaaaagcgggaagagacagaagaggagaagcagaaagagtgaccaggactgtccctgccacccctctctccctttctccctcgctccccaccaactctcccctaatcacacactctgtatttatcactggcacaattgatgtgttttgattccctaaaacaaaattagggagtcaaacgtggacctgaaagtcagctctggaccccctccctcaccgcacaactctctttcaccacgcgcctcctcctcctcgctcccttgctagctcgttctcggcttgtctacaggcccttttccccgtccaggccttgggggctcggaccctgaactcagactctacagattgccctccaagtgaggacttggctcccccactccttcgacgcccccacccccgccccccgtgcagagagccggctcctgggcctgctggggcctctgctccagggcctcagggcccggcctggcagccggggagggccggaggcccaaggagggcgcgccttggccccacaccaacccccagggcctccccgcagtccctgcctagcccctctgccccagcaaatgcccagcccaggcaaattgtatttaaagaatcctgggggtcattatggcattttacaaactgtgaccgtttctgtgtgaagatttttagctgtatttgtggtctctgtatttatatttatgtttagcaccgtcagtgttcctatccaatttcaaaaaaggaaaaaaaagagggaaaattacaaaaagagagaaaaaaagtgaatgacgtttgtttagccagtaggagaaaataaataaataaat

SEQ ID NO: 141290 - DNA, 358 bp, Homo sapiens
  Payload ID: 7768
  Gene Symbol: HOXC6
  Gene Name: homeobox C6
  ENST ID: ENST00000509328
  CDS Start-End: 146-358
aagcgggattggaccaaaccagagggacagagtcttctgggtctctctgcctgaggccctggagggagagaaggagaatgtcgtgttcagttccagccgggggccgtatgactatggatctaattccttttaccaggagaaagacatgctctcaaactgcagacaaaacaccttaggacataacacacagacctcaatcgctcaggattttagttctgagcagggcaggactgcgccccaggaccagaaagccagtatccagatttacccctggatgcagcgaatgaattcgcacagtgtgtgttttgtgcccggatctttaggggtcggctacggagcggaccggaggcgcggccgc

SEQ ID NO: 141291 - DNA, 538 bp, Homo sapiens
  Payload ID: 7768
  Gene Symbol: HOXC6
  Gene Name: homeobox C6
  ENST ID: ENST00000504315
  CDS Start-End: 384-538
cggatctgattgcctggggtgctgggctgggcgcaccccactgctgctgggggtcaccccaagagccccccacccatccaaggaaaggaataaacttaaccgctggaggggcatgaggagctcagcccccccaacctcgacagcagctaacagaaacgccaggagcagcaggaggaggaggcagcgacaaggacgtcctccccaacgtcgccctcaattccaccgcctatgatccagtgaggcatttctcgacctatggagcggccgttgcccagaaccggatctactcgactcccttttattcgccacaggagaatgtcgtgttcagttccagccgggggccgtatgactatggatctaattccttttaccaggagaaagacatgctctcaaactgcagacaaaacaccttaggacataacacacagacctcaatcgctcaggattttagttctgagcagggcaggactgcgccccaggaccagaaagccagtatccagatttacccctggatgcagcgaatgaattcgcacagtgg

SEQ ID NO: 141292 - DNA, 1889 bp, Homo sapiens
  Payload ID: 7769
  Gene Symbol: HOXC8
  Gene Name: homeobox C8
  Uniprot ID: P31273
  ENST ID: ENST00000040584
  CDS Start-End: 180-908
gccgagctcagcaccgaggcgccccccaacctgcccagcccccagcccaccagcccagcccagtcccggggagccagctggcctggggttcggtcccggggggaggggagtttcgggggtactgggcggggtactcgtgagccagaggggagggggccgcgggttttcatgtacccagcatgagctcctacttcgtcaaccccctgttctccaaatacaaagccggcgagtccctggaaccggcctattacgactgccggttccctcagagcgtgggcaggagccatgcgctggtgtacgggcccggcggctcggcgcccggcttccagcacgcttcgcaccacgttcaagacttcttccaccacggcacctccggcatctccaactcaggctaccagcagaacccgtgctcgcttagctgccacggagacgcctccaaattctatggctacgaggcgctccccagacagtccctttatggggctcagcaagaggcgagcgtggtgcaatatcccgactgtaaatcctccgccaacactaacagtagcgaaggacaaggccacttaaatcaaaactcgtctcccagcctcatgtttccatggatgagaccccacgctccggggaggcgcagtggacggcaaacttacagccggtatcagaccttggaactagaaaaggagtttctctttaatccttatttgacacgaaaacgtcggattgaagtctctcatgccctgggactgaccgagagacaagtgaagatctggttccagaaccgaaggatgaagtggaaaaaggagaacaacaaggataaactgccgggagcccgagatgaggagaaggtggaggaagaaggaaatgaggaagaggagaaagaagaggaggaaaaggaagaaaacaaggactaagcaaaaaagaaagacccccccccccttagcaactcccttgaagtttcgttttatggtagcagataaattgagaagtttacgactgtcatttgcttttatagagaatagaatgacactcacaactctaactacctgtcagatacttgcagctctggttttattacctttggacttcccccactctttatttgtttgggggctggaggggggagacggagaaacagtgaaaagttcggactctctgtctcactccttgccccacacacacttgtccctgcccccacccttctgagtccttcctggattttaaggtctgagacctggcctccgtgctcctcggtctgtctctcaccacactcccacctccctgcttctctggtatttattttagaggggagccccctcgaaatgcagaaaaggacttgtggttttgtttttatgctaaggctagtgtactagatgtactttttctaaaaaggaaaggacagaaaaaaatgaagaaaggaaaggaagacaaatgtaaagaaataaggaaaaaagcaaggaatatcccctccccctccccctccccctccccagggctccctgcttagaaaaacccccttgactttctctaggaacctgatggaaacctgaaggagatgtgggtctttcccctccccccatttccagaagggtagataggagcctgcagtcgcctctaaaatcctacctaaccatcccatggtcactcgggcccatgccttcctctccttcgctgtttgatttctattctgttgggcccgccttcctctgagctgcattagtgttagtgctcagaaatcaccataatcacgaaaataataataataaatctttaacatactacctaaagggaacctgcaataatcttgaaaaagaaaaagagaaaaattttaaaatcctgctataggagaaaaaaagagaaaaaaataaaaatcaaaaaaaaaaaaaagaaagaaa

SEQ ID NO: 141293 - DNA, 1516 bp, Homo sapiens
  Payload ID: 7770
  Gene Symbol: HOXC9
  Gene Name: homeobox C9
  Uniprot ID: P31274
  ENST ID: ENST00000303450
  CDS Start-End: 71-853
gttctgtgagcagataaaaagtacatatacagttcatacaataatcttatgtatgtaaaaccccgttacgatgtcggcgacggggcccatcagtaactattacgtggactcgctcatctctcacgacaatgaagacctcctagcgtccaggtttccggccaccggggctcatcccgccgccgccagacccagcggtttggtgccggactgtagcgattttccgtcctgtagcttcgcgcccaagccggcagtgttcagcacgtcgtgggcgcccgtgccctctcagtcgtccgtggtatatcacccgtacggcccccagccccacctcggcgccgacacgcgctacatgcggacttggctcgagccgctgtccggcgccgtctccttccccagcttcccggccgggggccgtcactacgccctcaagccggacgcctaccccgggcgccgcgcggactgcggcccaggggagggccgcagctacccggactacatgtacggctcgcccggggagctgcgcgaccgcgccccgcagacactgccctcgcccgaggcggacgcgctcgccggcagcaagcacaaagaggagaaggccgacctggaccccagcaaccccgtggccaactggattcacgcccgctccacgaggaagaagcgctgcccctacaccaagtaccagacgctggaactggagaaggagtttctcttcaatatgtatttaaccagggaccgtcggtatgaggtggcccgggttctcaatctcaccgagcggcaggtcaaaatctggtttcagaatcgaaggatgaagatgaaaaagatgaataaagagaaaaccgacaaggagcagtcctaaaccctacccagcctgctgcctcagcacagccaagggaaaaacaaaaaccccacaaaataccccaacacaggcgggggagagacgaaaaagaaaaggaaagagcaagatagacaaaagccaatcagcttaaaaagaaaaacaaggaaggggaaaagaaaactcttgcgatttgggagggttcagtgttgagatattggtgttttagagttagttctacccagcgaggaggaggcggggagagaaactgcgttctctttccccagcgcaaccgaaataaatgacacatacaaatgtgatttttttcctcctttcttcagagaagccagtacttgaatcgctatatttctatttttttttccctgtatcgtatttggtccaggtcatccctccccgggcctggggcgctctgcgtgcagattttgtacaaaaaaaaaaaagacacacacacatacatgataatgattcccagcccaggagctgaggggtgagggctggggaccatgccgcgggctaggtcgggcccgtgcaggccggcgccttgggctgtacatagtgttccctctcatccccagggttcgtccccagcgtccgtcctgtaacgtgcttctgtttgttatggtagaacagccctgtgttaatatattgaagtcacttaaccagaaa

SEQ ID NO: 141294 - DNA, 1505 bp, Homo sapiens
  Payload ID: 7770
  Gene Symbol: HOXC9
  Gene Name: homeobox C9
  Uniprot ID: P31274
  ENST ID: ENST00000508190
  CDS Start-End: 99-881
tgcaaatttccttgcgacacatacatcacacaaaagatcagataaaaagtacatatacagttcatacaataatcttatgtatgtaaaaccccgttacgatgtcggcgacggggcccatcagtaactattacgtggactcgctcatctctcacgacaatgaagacctcctagcgtccaggtttccggccaccggggctcatcccgccgccgccagacccagcggtttggtgccggactgtagcgattttccgtcctgtagcttcgcgcccaagccggcagtgttcagcacgtcgtgggcgcccgtgccctctcagtcgtccgtggtatatcacccgtacggcccccagccccacctcggcgccgacacgcgctacatgcggacttggctcgagccgctgtccggcgccgtctccttccccagcttcccggccgggggccgtcactacgccctcaagccggacgcctaccccgggcgccgcgcggactgcggcccaggggagggccgcagctacccggactacatgtacggctcgcccggggagctgcgcgaccgcgccccgcagacactgccctcgcccgaggcggacgcgctcgccggcagcaagcacaaagaggagaaggccgacctggaccccagcaaccccgtggccaactggattcacgcccgctccacgaggaagaagcgctgcccctacaccaagtaccagacgctggaactggagaaggagtttctcttcaatatgtatttaaccagggaccgtcggtatgaggtggcccgggttctcaatctcaccgagcggcaggtcaaaatctggtttcagaatcgaaggatgaagatgaaaaagatgaataaagagaaaaccgacaaggagcagtcctaaaccctacccagcctgctgcctcagcacagccaagggaaaaacaaaaaccccacaaaataccccaacacaggcgggggagagacgaaaaagaaaaggaaagagcaagatagacaaaagccaatcagcttaaaaagaaaaacaaggaaggggaaaagaaaactcttgcgatttgggagggttcagtgttgagatattggtgttttagagttagttctacccagcgaggaggaggcggggagagaaactgcgttctctttccccagcgcaaccgaaataaatgacacatacaaatgtgatttttttcctcctttcttcagagaagccagtacttgaatcgctatatttctatttttttttccctgtatcgtatttggtccaggtcatccctccccgggcctggggcgctctgcgtgcagattttgtacaaaaaaaaaaaagacacacacacatacatgataatgattcccagcccaggagctgaggggtgagggctggggaccatgccgcgggctaggtcgggcccgtgcaggccggcgccttgggctgtacatagtgttccctctcatccccagggttcgtccccagcgtccgtcctgtaacgtgcttctgtttgttatggtagaa

SEQ ID NO: 141295 - DNA, 3184 bp, Homo sapiens
  Payload ID: 7771
  Gene Symbol: HMBOX1
  Gene Name: homeobox containing 1
  Uniprot ID: Q6NT76
  ENST ID: ENST00000287701
  CDS Start-End: 343-1605
tgttgatatcaatatggcggttgtcagccagacaaagacagtcagtctgatgtgattgagacaagggaggtttttcagggggagactgggagataggggcctcccctcccccttctcctcttcctgcgccggcctcaacccctccccagtcccctcccgacgggcgccccacgcggaagacacccctccccctcccgccttccctcctccctatctcagcccttcgtactgggacgttggggagggggctgtgccgggcggagagaactcagcgaggattctgagaatggtagataacgcagatcatctctggaaaggatattgatccgcctcatgtaaagtatgcttagttcctttccagtggttttgctggaaaccatgtctcattatacagatgaacccagatttaccatagagcagatagatctgcttcagcgacttcggcgtactggaatgactaaacatgaaattctccatgccttggaaactttggaccgtcttgatcaagagcatagtgacaagtttggaagaaggtccagctatggaggaagttcatatgggaatagtactaacaatgtcccagcatcttcctctacagctacagcttccacacagacgcagcattcgggaatgtccccgtcacctagcaacagttatgatacttccccacagccttgcactaccaatcaaaatgggagggagaataatgagcgattatctacatccaatggaaagatgtcaccaactcgctaccatgcaaacagcatgggtcagaggtcatacagttttgaagcctcagaagaggacctagatgtagatgataaagtggaagaattaatgaggagggacagcagtgtgataaaagaggaaatcaaagcctttcttgccaatcggaggatttcccaagcagttgttgcacaggtaacaggtatcagtcagagccggatctctcattggctgttgcagcagggatcagacctgagtgaacagaagaaaagagcattttaccgatggtatcaacttgagaagacaaaccctggcgctacactaagtatgagaccagcccccattccaatagaggaccctgaatggagacaaacgcctcccccagtctctgccacatctggtactttccgactgcgacgagggagtcgatttacctggagaaaggagtgcctggctgttatggaaagttacttcaatgagaatcaatacccagatgaagcaaagagggaagaaattgcaaacgcttgcaatgcagttatacagaagccaggcaaaaagctgtcagatctggaaagagttacctccctgaaagtatataattggtttgctaacagaaggaaggagatcaagaggagagccaatattgaagcagcaatcctggagagtcatgggatagatgtgcagagtccaggaggccactcaaacagtgatgatgtcgacgggaatgactactctgagcaggatgacagtacgagccatagtgaccaccaagaccccatctcattagctgtggaaatggcagcagtcaaccacactatcttggcattggcccgacaaggagccaacgaaatcaagacagaggccctggatgatgactgatcagggaggttaaacatgacaagttaacttagtttagacgtagcaccttagcagactttcctcggtccttaacatgtgttcttacagtataacttgcagtttcttgtatgtcaggtagctgttagggtcttgttctgtgaagatggcatggtgccctcagcctttgcatatactctctcagtattaactcccagtaaataataaccaaccaaccaaccaaacttccctctcccagcccccgaggctagaaaatcttgctgctccgtcttagcattccaagaaagtgcttccaggtatttagatagccctcagttctcaaatattagactacgtgtaaaatcttgggtacctttagattcttgtaacactagtctgtactcccttttccttccccaagactgataggatgcaagctgaggtcgtggcacaggaatgacagacaccatttggggagtatccacagagtcaaaggaacactagaatccccacctcagcgtgaggataattgatttccagctgcaataagccgtgcctcattatagccacactgtggctagattatacttctttgggtgctgtgctaagaatgtcaatggaaaaagccgatctcagattttgtttgaagttaacatgcctgacacagacatcctttcctctcacaagctgtgtgacttagtagataaaatactgccttctgcctttgggaccatgattaaaaacaaagacaaaaaccaaaagtcattaaaaaaaaaaaaaaaaaaaacccagcttgagagcattggaaaaaaaaaatatgagctgaatgtctaatggatgctaagtccagttttcagaaccactgtacattccacggcacagttagcagtgcctgcctggaaaagttttggaggtcatcgtggaagttgctttgcctcctgtcagtgtcccctttccctgctaccaaaaaagtctttcaaggatggagctaaggtcaaaaatgagtgaaaaaacttgcagtgtttgtatccattaaacggaagccccctcactctgagaggtcactagaggacttcatagtggggttgtgctgcttatcacagatgcagacacttgcccagataggagcagagaaaagcaggggacgtttcctactcacattgtggctgtatgagaacacgatgggactgctttgctgttctctttactctgtccttggagaggtgtgaaaagctgtattgctacaggcaatttatttaataattggaagccatattgataatggatgtggtaatatttgtaaagtttaatctactttaagcggcagtaactaatggaatttttttccttgatcacatatgtagcacttttgttactttttaaagatatttatatttgataaatctttttttcattttgagaactcaaaataccaaacagtgaacttgcattctaaagtcaccctgtgatcaccttgtcatctagtagcaaaatgatgaactattcatgcatcaaagaaaattacatctgctggccttgtatgaaaatgatctcttggcatcccgattaaatgacacactgtcactgtgggtaagaggaaaga

SEQ ID NO: 141296 - DNA, 4082 bp, Homo sapiens
  Payload ID: 7771
  Gene Symbol: HMBOX1
  Gene Name: homeobox containing 1
  Uniprot ID: Q6NT76
  ENST ID: ENST00000397358
  CDS Start-End: 705-1967
aatatggcggttgtcagccagacaaagacagtcagtctgatgtgattgagacaagggaggtttttcagggggagactgggagataggggcctcccctcccccttctcctcttcctgcgccggcctcaacccctccccagtcccctcccgacgggcgccccacgcggaagacacccctccccctcccgccttccctcctccctatctcagcccttcgtactgggacgttggggagggggctgtgccgggcggagagaactcagcgaggattctgaggtgagtcgagcggttttgaagccggactacctcaagtctctttcctcacttctttctcttcacttaaaacaatttttttggaggggttttggggaggaagtgagcggacgctggggatgggtctcgtaagcggccggattgagaggagggaggaagcagggggcttccgagtgggtgacccagacgcgggctgtggggtggggcagttcgtggggtccggtcctggaaaggcgtcgactgccccccaactcttctggtttcctctacgatgagcggaaggtttgaatcctggaggtggggtctccggtgtggagttctggaaactgtgaggtgatttgcagctggtggaatggaacagtgaagaagcattggaatggtagataacgcagatcatctctggaaaggatattgatccgcctcatgtaaagtatgcttagttcctttccagtggttttgctggaaaccatgtctcattatacagatgaacccagatttaccatagagcagatagatctgcttcagcgacttcggcgtactggaatgactaaacatgaaattctccatgccttggaaactttggaccgtcttgatcaagagcatagtgacaagtttggaagaaggtccagctatggaggaagttcatatgggaatagtactaacaatgtcccagcatcttcctctacagctacagcttccacacagacgcagcattcgggaatgtccccgtcacctagcaacagttatgatacttccccacagccttgcactaccaatcaaaatgggagggagaataatgagcgattatctacatccaatggaaagatgtcaccaactcgctaccatgcaaacagcatgggtcagaggtcatacagttttgaagcctcagaagaggacctagatgtagatgataaagtggaagaattaatgaggagggacagcagtgtgataaaagaggaaatcaaagcctttcttgccaatcggaggatttcccaagcagttgttgcacaggtaacaggtatcagtcagagccggatctctcattggctgttgcagcagggatcagacctgagtgaacagaagaaaagagcattttaccgatggtatcaacttgagaagacaaaccctggcgctacactaagtatgagaccagcccccattccaatagaggaccctgaatggagacaaacgcctcccccagtctctgccacatctggtactttccgactgcgacgagggagtcgatttacctggagaaaggagtgcctggctgttatggaaagttacttcaatgagaatcaatacccagatgaagcaaagagggaagaaattgcaaacgcttgcaatgcagttatacagaagccaggcaaaaagctgtcagatctggaaagagttacctccctgaaagtatataattggtttgctaacagaaggaaggagatcaagaggagagccaatattgaagcagcaatcctggagagtcatgggatagatgtgcagagtccaggaggccactcaaacagtgatgatgtcgacgggaatgactactctgagcaggatgacagtacgagccatagtgaccaccaagaccccatctcattagctgtggaaatggcagcagtcaaccacactatcttggcattggcccgacaaggagccaacgaaatcaagacagaggccctggatgatgactgatcagggaggttaaacatgacaagttaacttagtttagacgtagcaccttagcagactttcctcggtccttaacatgtgttcttacagtataacttgcagtttcttgtatgtcaggtagctgttagggtcttgttctgtgaagatggcatggtgccctcagcctttgcatatactctctcagtattaactcccagtaaataataaccaaccaaccaaccaaacttccctctcccagcccccgaggctagaaaatcttgctgctccgtcttagcattccaagaaagtgcttccaggtatttagatagccctcagttctcaaatattagactacgtgtaaaatcttgggtacctttagattcttgtaacactagtctgtactcccttttccttccccaagactgataggatgcaagctgaggtcgtggcacaggaatgacagacaccatttggggagtatccacagagtcaaaggaacactagaatccccacctcagcgtgaggataattgatttccagctgcaataagccgtgcctcattatagccacactgtggctagattatacttctttgggtgctgtgctaagaatgtcaatggaaaaagccgatctcagattttgtttgaagttaacatgcctgacacagacatcctttcctctcacaagctgtgtgacttagtagataaaatactgccttctgcctttgggaccatgattaaaaacaaagacaaaaaccaaaagtcattaaaaaaaaaaaaaaaaaaaacccagcttgagagcattggaaaaaaaaaatatgagctgaatgtctaatggatgctaagtccagttttcagaaccactgtacattccacggcacagttagcagtgcctgcctggaaaagttttggaggtcatcgtggaagttgctttgcctcctgtcagtgtcccctttccctgctaccaaaaaagtctttcaaggatggagctaaggtcaaaaatgagtgaaaaaacttgcagtgtttgtatccattaaacggaagccccctcactctgagaggtcactagaggacttcatagtggggttgtgctgcttatcacagatgcagacacttgcccagataggagcagagaaaagcaggggacgtttcctactcacattgtggctgtatgagaacacgatgggactgctttgctgttctctttactctgtccttggagaggtgtgaaaagctgtattgctacaggcaatttatttaataattggaagccatattgataatggatgtggtaatatttgtaaagtttaatctactttaagcggcagtaactaatggaatttttttccttgatcacatatgtagcacttttgttactttttaaagatatttatatttgataaatctttttttcattttgagaactcaaaataccaaacagtgaacttgcattctaaagtcaccctgtgatcaccttgtcatctagtagcaaaatgatgaactattcatgcatcaaagaaaattacatctgctggccttgtatgaaaatgatctcttggcatcccgattaaatgacacactgtcactgtgggtaagaggaaagagccttcaatgtagcagcacagggtgcgcctgaaagaggcacaactgctgtggattttctgcctcgctccatctctcctatgtataatgaagccttgtttaaaggggcatgtggggctggatgttaagcacggcttctttttgtccgttacctgaaaacaatttctaagataaaaggaaggtgccatttccttacctcttcacccatcctcctccaccaaatgtattcaacttaaaactgtgagagagagagactgaatgaccttcctcagttttccctttctcattcaggagatactgaatatccgccagtttgtagttggtttccttccacttaaggcacacgctgactgcatcatttccttatctgttaatcctgcttatgtgagtgtgaggaaagtctttgagagggcatgaaagtgccaccttatatatgtctgtgactttaaagagctatatgcagggcctggtcccacttttgtccatggatttcagggggaaaaaatatatgtacttttttcagcttccaagcattgaa

SEQ ID NO: 141297 - DNA, 811 bp, Homo sapiens
  Payload ID: 7771
  Gene Symbol: HMBOX1
  Gene Name: homeobox containing 1
  ENST ID: ENST00000519662
  CDS Start-End: 458-811
gttgatatcaatatggcggttgtcagccagacaaagacagtcagtctgatgtgattgagacaagggaggtttttcagggggagactgggagataggggcctcccctcccccttctcctcttcctgcgccggcctcaacccctccccagtcccctcccgacgggcgccccacgcggaagacacccctccccctcccgccttccctcctccctatctcagcccttcgtactgggacgttggggagggggctgtgccgggcggagagaactcagcgaggattctgagagtttcgctcttgtccatgctggagtgcaatggtgtaatctcagctcaccacaacctccgcctcctgggttcaagtgattctcctgcctcagcttcctgagtagctgggattacagaatggtagataacgcagatcatctctggaaaggatattgatccgcctcatgtaaagtatgcttagttcctttccagtggttttgctggaaaccatgtctcattatacagatgaacccagatttaccatagagcagatagatctgcttcagcgacttcggcgtactggaatgactaaacatgaaattctccatgccttggaaactttggaccgtcttgatcaagagcatagtgacaagtttggaagaaggtccagctatggaggaagttcatatgggaatagtactaacaatgtcccagcatcttcctctacagctacagcttccacacagacgcagcattcgggaatgtccccgtcacctagcaacagttatgatacttccccacagccttgcactaccaatcaaaatggg

SEQ ID NO: 141298 - DNA, 817 bp, Homo sapiens
  Payload ID: 7771
  Gene Symbol: HMBOX1
  Gene Name: homeobox containing 1
  ENST ID: ENST00000522468
  CDS Start-End: 1-138
gatgacagtacgagccatagtgaccaccaagaccccatctcattagctgtggaaatggcagcagtcaaccacactatcttggcattggcccgacaaggagccaacgaaatcaagacagaggccctggatgatgactgatcagggagctgcagtatctctcttcctgaggtccagaggccattaaagaataaacatggggcttagaggtgtcttggccaccaaacacaggaagggacacaggatctctctgaactttggaacagaccctcatattctggggccagaagtttgcccagaaagcagcaggtggctctgcctggctgtagagcccagctcattggctgtccctgggcttcgtctccctcttccgagtagttgctgcctttcttcagatcaggttaccacaatgcctccccgctgctgacgcttcatcccccacacctccagccccagttacctggagcttctcagaacccactttgccggtgctaaaacacaagagggggtgaaagtggctgccagtaatggccagaaaccaaccaccagaggccaggctgaaagacaagctccgggtgtccaggggctgacgggccaaccatgtggcaggtcccaggccccacccactgcgccatccgcctctgagctccacagtggtcccactaatgggaacctcctctagggagagtgatactgcaccttcacccgtaggactcatatttataacaatgtgtaatggctgtagcaaaaagcccttgtttctagatgtaaatggtcaaagaaacaagcgctctattgttttgaataaaatagttcaaat

SEQ ID NO: 141299 - DNA, 1551 bp, Homo sapiens
  Payload ID: 7771
  Gene Symbol: HMBOX1
  Gene Name: homeobox containing 1
  ENST ID: ENST00000519047
  CDS Start-End: 112-1272
ggacgttggggagggggctgtgccgggcggagagaactcagcgaggattctgagaatggtagataacgcagatcatctctggaaaggatattgatccgcctcatgtaaagtatgcttagttcctttccagtggttttgctggaaaccatgtctcattatacagatgaacccagatttaccatagagcagatagatctgcttcagcgacttcggcgtactggaatgactaaacatgaaattctccatgccttggaaactttggaccgtcttgatcaagagcatagtgacaagtttggaagaaggtccagctatggaggaagttcatatgggaatagtactaacaatgtcccagcatcttcctctacagctacagcttccacacagacgcagcattcgggaatgtccccgtcacctagcaacagttatgatacttccccacagccttgcactaccaatcaaaatgggagggagaataatgagcgattatctacatccaatggaaagatgtcaccaactcgctaccatgcaaacagcatgggtcagaggtcatacagttttgaagcctcagaagaggacctagatgtagatgataaagtggaagaattaatgaggagggacagcagtgtgataaaagaggaaatcaaagcctttcttgccaatcggaggatttcccaagcagttgttgcacaggtaacaggtatcagtcagagccggatctctcattggctgttgcagcagggatcagacctgagtgaacagaagaaaagagcattttaccgatggtatcaacttgagaagacaaaccctggcgctacactaagtatgagaccagcccccattccaatagaggaccctgaatggagacaaacgcctcccccagtctctgccacatctggtactttccgactgcgacgagggagtcgatttacctggagaaaggagtgcctggctgttatggaaagttacttcaatgagaatcaatacccagatgaagcaaagagggaagaaattgcaaacgcttgcaatgcagttatacagaagccaggcaaaaagctgtcagatctggaaagagttacctccctgaaagtatataattggtttgctaacagaaggaaggagatcaagaggagagccaatattgcagcaatcctggagagtcatgggatagatgtgcagagtccaggaggccactcaaacagtgatgatgtcgacgggaatgactactctgagcagactgataggatgcaagctgaggtcgtggcacaggaatgacagacaccatttggggagtatccacagagtcaaaggaacactagaatccccacctcagcgtgaggataattgatttccagctgcaataagccgtgcctcattatagccacactgtggctagattatacttctttgggtgctgtgctaagaatgtcaatggaaaaagccgatctcagattttgtttgaagttaacatgcctgacacagacatcctttcctctcacaagctgtgtgacttagtagataaaatactgccttctgcctttgggaccatgatta

SEQ ID NO: 141300 - DNA, 1731 bp, Homo sapiens
  Payload ID: 7771
  Gene Symbol: HMBOX1
  Gene Name: homeobox containing 1
  Uniprot ID: Q6NT76
  ENST ID: ENST00000524238
  CDS Start-End: 6-1337
aaagtatgcttagttcctttccagtggttttgctggaaaccatgtctcattatacagatgaacccagatttaccatagagcagatagatctgcttcagcgacttcggcgtactggaatgactaaacatgaaattctccatgccttggaaactttggaccgtcttgatcaagagcatagtgacaagtttggaagaaggtccagctatggaggaagttcatatgggaatagtactaacaatgtcccagcatcttcctctacagctacagcttccacacagacgcagcattcgggaatgtccccgtcacctagcaacagttatgatacttccccacagccttgcactaccaatcaaaatgggagggagaataatgagcgattatctacatccaatggaaagatgtcaccaactcgctaccatgcaaacagcatgggtcagaggtcatacagttttgaagcctcagaagaggacctagatgtagatgataaagtggaagaattaatgaggagggacagcagtgtgataaaagaggaaatcaaagcctttcttgccaatcggaggatttcccaagcagttgttgcacaggtaacaggtatcagtcagagccggatctctcattggctgttgcagcagggatcagacctgagtgaacagaagaaaagagcattttaccgatggtatcaacttgagaagacaaaccctggcgctacactaagtatgagaccagcccccattccaatagaggaccctgaatggagacaaacgcctcccccagtctctgccacatctggtactttccgactgcgacgagggagtcgatttacctggagaaaggagtgcctggctgttatggaaagttacttcaatgagaatcaatacccagatgaagcaaagagggaagaaattgcaaacgcttgcaatgcagttatacagaagccaggcaaaaagctgtcagatctggaaagagttacctccctgaaagtatataattggtttgctaacagaaggaaggagatcaagaggagagccaatattgcagcaatcctggagagtcatgggatagatgtgcagagtccaggaggccactcaaacagtgatgatgtcgacgggaatgactactctgagcaggatacttggcaagtacgcaatggggaggaggaggagggaagaagttcagagggaggcagagaagcagagaaggatgacagtacgagccatagtgaccaccaagaccccatctcattagctgtggaaatggcagcagtcaaccacactatcttggcattggcccgacaaggagccaacgaaatcaagacagaggccctggatgatgactgatcagggaggttaaacatgacaagttaacttagtttagacgtagcaccttagcagactttcctcggtccttaacatgtgttcttacagtataacttgcagtttcttgtatgtcaggtagctgttagggtcttgttctgtgaagatggcatggtgccctcagcctttgcatatactctctcagtattaactcccagtaaataataaccaaccaaccaaccaaacttccctctcccagcccccgaggctagaaaatcttgctgctccgtcttagcattccaagaaagtgcttccaggtatttagatagccctcagttctcaaatattagactacgtgtaaaatcttgggtacctttagattcttgtaacactagtctgtactcccttttccttcccc

SEQ ID NO: 141301 - DNA, 2216 bp, Homo sapiens
  Payload ID: 7771
  Gene Symbol: HMBOX1
  Gene Name: homeobox containing 1
  Uniprot ID: Q6NT76
  ENST ID: ENST00000521516
  CDS Start-End: 112-1026
ggacgttggggagggggctgtgccgggcggagagaactcagcgaggattctgagaatggtagataacgcagatcatctctggaaaggatattgatccgcctcatgtaaagtatgcttagttcctttccagtggttttgctggaaaccatgtctcattatacagatgaacccagatttaccatagagcagatagatctgcttcagcgacttcggcgtactggaatgactaaacatgaaattctccatgccttggaaactttggaccgtcttgatcaagagcatagtgacaagtttggaagaaggtccagctatggaggaagttcatatgggaatagtactaacaatgtcccagcatcttcctctacagctacagcttccacacagacgcagcattcgggaatgtccccgtcacctagcaacagttatgatacttccccacagccttgcactaccaatcaaaatgggagggagaataatgagcgattatctacatccaatggaaagatgtcaccaactcgctaccatgcaaacagcatgggtcagaggtcatacagttttgaagcctcagaagaggacctagatgtagatgataaagtggaagaattaatgaggagggacagcagtgtgataaaagaggaaatcaaagcctttcttgccaatcggaggatttcccaagcagttgttgcacaggtaacaggtatcagtcagagccggatctctcattggctgttgcagcagggatcagacctgagtgaacagaagaaaagagcattttaccgatggtatcaacttgagaagacaaaccctggcgctacactaagtatgagaccagcccccattccaatagaggaccctgaatggagacaaacgcctcccccagtctctgccacatctggtactttccgactgcgacgagggagtcgatttacctggagaaaggagtgcctggctgttatggaaaggaacacttggtcccctgagagaaggatggaagaaaataaatggaagttgctttctgcagggtaggagattggctggacagttacttcaatgagaatcaatacccagatgaagcaaagagggaagaaattgcaaacgcttgcaatgcagttatacagaagccaggcaaaaagctgtcagatctggaaagagttacctccctgaaagtatataattggtttgctaacagaaggaaggagatcaagaggagagccaatattgaagcagcaatcctggagagtcatgggatagatgtgcagagtccaggaggccactcaaacagtgatgatgtcgacgggaatgactactctgagcaggatgacagtacgagccatagtgaccaccaagaccccatctcattagctgtggaaatggcagcagtcaaccacactatcttggcattggcccgacaaggagccaacgaaatcaagacagaggccctggatgatgactgatcagggaggttaaacatgacaagttaacttagtttagacgtagcaccttagcagactttcctcggtccttaacatgtgttcttacagtataacttgcagtttcttgtatgtcaggtagctgttagggtcttgttctgtgaagatggcatggtgccctcagcctttgcatatactctctcagtattaactcccagtaaataataaccaaccaaccaaccaaacttccctctcccagcccccgaggctagaaaatcttgctgctccgtcttagcattccaagaaagtgcttccaggtatttagatagccctcagttctcaaatattagactacgtgtaaaatcttgggtacctttagattcttgtaacactagtctgtactcccttttccttccccaagactgataggatgcaagctgaggtcgtggcacaggaatgacagacaccatttggggagtatccacagagtcaaaggaacactagaatccccacctcagcgtgaggataattgatttccagctgcaataagccgtgcctcattatagccacactgtggctagattatacttctttgggtgctgtgctaagaatgtcaatggaaaaagccgatctcagattttgtttgaagttaacatgcctgacacagacatcctttcctctcacaagctgtgtgacttagtagataaaatactgccttctgcctttgggaccatgattaaaaacaaagacaaaaaccaaaagtcattaaaaaaaaaaaaaaaaaaa

SEQ ID NO: 141302 - DNA, 1730 bp, Homo sapiens
  Payload ID: 7771
  Gene Symbol: HMBOX1
  Gene Name: homeobox containing 1
  ENST ID: ENST00000523613
  CDS Start-End: 333-1523
aatatggcggttgtcagccagacaaagacagtcagtctgatgtgattgagacaagggaggtttttcagggggagactgggagataggggcctcccctcccccttctcctcttcctgcgccggcctcaacccctccccagtcccctcccgacgggcgccccacgcggaagacacccctccccctcccgccttccctcctccctatctcagcccttcgtactgggacgttggggagggggctgtgccgggcggagagaactcagcgaggattctgagaatggtagataacgcagatcatctctggaaaggatattgatccgcctcatgtaaagtatgcttagttcctttccagtggttttgctggaaaccatgtctcattatacagatgaacccagatttaccatagagcagatagatctgcttcagcgacttcggcgtactggaatgactaaacatgaaattctccatgccttggaaactttggaccgtcttgatcaagagcatagtgacaagtttggaagaaggtccagctatggaggaagttcatatgggaatagtactaacaatgtcccagcatcttcctctacagctacagcttccacacagacgcagcattcgggaatgtccccgtcacctagcaacagttatgatacttccccacagccttgcactaccaatcaaaatgggagggagaataatgagcgattatctacatccaatggaaagatgtcaccaactcgctaccatgcaaacagcatgggtcagaggtcatacagttttgaagcctcagaagaggacctagatgtagatgataaagtggaagaattaatgaggagggacagcagtgtgataaaagaggaaatcaaagcctttcttgccaatcggaggatttcccaagcagttgttgcacaggtaacaggtatcagtcagagccggatctctcattggctgttgcagcagggatcagacctgagtgaacagaagaaaagagcattttaccgatggtatcaacttgagaagacaaaccctggcgctacactaagtatgagaccagcccccattccaatagaggaccctgaatggagacaaacgcctcccccagtctctgccacatctggtactttccgactgcgacgagggagtcgatttacctggagaaaggagtgcctggctgttatggaaagttacttcaatgagaatcaatacccagatgaagcaaagagggaagaaattgcaaacgcttgcaatgcagttatacagaagccaggcaaaaagctgtcagatctggaaagagttacctccctgaaagtatataattggtttgctaacagaaggaaggagatcaagaggagagccaatattgaagcagcaatcctggagagtcatgggatagatgtgcagagtccaggaggccactcaaacagtgatgatgtcgacgggaatgactactctgagcaggtgagcccctgcgcagctgggcgaggttcttggtgcctgagcagggggtatagtgggacagcttagttccttgggtgtggctgatggggtgggggaggggaaacagtcactgtccctccactctgctcctgtgtctagttagatttcatgtaatttgaaaggaatgtggtaagattcagttgtcctgttgaatttgtgagagatcgttattcacccacatggatttattgtcatacaacaggatacttggcaagtacgcaatggggaggagga

SEQ ID NO: 141303 - DNA, 1426 bp, Homo sapiens
  Payload ID: 7771
  Gene Symbol: HMBOX1
  Gene Name: homeobox containing 1
  ENST ID: ENST00000560599
  CDS Start-End: 333-1426
aatatggcggttgtcagccagacaaagacagtcagtctgatgtgattgagacaagggaggtttttcagggggagactgggagataggggcctcccctcccccttctcctcttcctgcgccggcctcaacccctccccagtcccctcccgacgggcgccccacgcggaagacacccctccccctcccgccttccctcctccctatctcagcccttcgtactgggacgttggggagggggctgtgccgggcggagagaactcagcgaggattctgagaatggtagataacgcagatcatctctggaaaggatattgatccgcctcatgtaaagtatgcttagttcctttccagtggttttgctggaaaccatgtctcattatacagatgaacccagatttaccatagagcagatagatctgcttcagcgacttcggcgtactggaatgactaaacatgaaattctccatgccttggaaactttggaccgtcttgatcaagagcatagtgacaagtttggaagaaggtccagctatggaggaagttcatatgggaatagtactaacaatgtcccagcatcttcctctacagctacagcttccacacagacgcagcattcgggaatgtccccgtcacctagcaacagttatgatacttccccacagccttgcactaccaatcaaaatgggagggagaataatgagcgattatctacatccaatggaaagatgtcaccaactcgctaccatgcaaacagcatgggtcagaggtcatacagttttgaagcctcagaagaggacctagatgtagatgataaagtggaagaattaatgaggagggacagcagtgtgataaaagaggaaatcaaagcctttcttgccaatcggaggatttcccaagcagttgttgcacaggtaacaggtatcagtcagagccggatctctcattggctgttgcagcagggatcagacctgagtgaacagaagaaaagagcattttaccgatggtatcaacttgagaagacaaaccctggcgctacactaagtatgagaccagcccccattccaatagaggaccctgaatggagacaaacgcctcccccagtctctgccacatctggtactttccgactgcgacgagggagtcgatttacctggagaaaggagtgcctggctgttatggaaagttacttcaatgagaatcaatacccagatgaagcaaagagggaagaaattgcaaacgcttgcaatgcagttatacagaagccagaagcagcaatcctggagagtcatgggatagatgtgcagagtccaggaggccactcaaacagtgatgatgtcgacgggaatgactactctgagcaggatacttggcaagtacgcaatggggaggaggaggagggaagaagttcagagggaggcagagaagc

SEQ ID NO: 141304 - DNA, 1765 bp, Homo sapiens
  Payload ID: 7771
  Gene Symbol: HMBOX1
  Gene Name: homeobox containing 1
  Uniprot ID: Q6NT76
  ENST ID: ENST00000558662
  CDS Start-End: 342-1559
gttgatatcaatatggcggttgtcagccagacaaagacagtcagtctgatgtgattgagacaagggaggtttttcagggggagactgggagataggggcctcccctcccccttctcctcttcctgcgccggcctcaacccctccccagtcccctcccgacgggcgccccacgcggaagacacccctccccctcccgccttccctcctccctatctcagcccttcgtactgggacgttggggagggggctgtgccgggcggagagaactcagcgaggattctgagaatggtagataacgcagatcatctctggaaaggatattgatccgcctcatgtaaagtatgcttagttcctttccagtggttttgctggaaaccatgtctcattatacagatgaacccagatttaccatagagcagatagatctgcttcagcgacttcggcgtactggaatgactaaacatgaaattctccatgccttggaaactttggaccgtcttgatcaagagcatagtgacaagtttggaagaaggtccagctatggaggaagttcatatgggaatagtactaacaatgtcccagcatcttcctctacagctacagcttccacacagacgcagcattcgggaatgtccccgtcacctagcaacagttatgatacttccccacagccttgcactaccaatcaaaatgggagggagaataatgagcgattatctacatccaatggaaagatgtcaccaactcgctaccatgcaaacagcatgggtcagaggtcatacagttttgaagcctcagaagaggacctagatgtagatgataaagtggaagaattaatgaggagggacagcagtgtgataaaagaggaaatcaaagcctttcttgccaatcggaggatttcccaagcagttgttgcacaggtaacaggtatcagtcagagccggatctctcattggctgttgcagcagggatcagacctgagtgaacagaagaaaagagcattttaccgatggtatcaacttgagaagacaaaccctggcgctacactaagtatgagaccagcccccattccaatagaggaccctgaatggagacaaacgcctcccccagtctctgccacatctggtactttccgactgcgacgagggagtcgatttacctggagaaaggagtgcctggctgttatggaaagttacttcaatgagaatcaatacccagatgaagcaaagagggaagaaattgcaaacgcttgcaatgcagttatacagaagccaggcaaaaagctgtcagatctggaaagagttacctccctgaaagtatataattggtttgctaacagaaggaaggagatcaagaggagagccaatattgcagcaatcctggagagtcatgggatagatgtgcagagtccaggaggccactcaaacagtgatgatgtcgacgggaatgactactctgagcaggatacttggcaagtacgcaatggggaggaggaggagggaagaagttcagagggaggcagagaagcagagaaggtagaagaagagaggaggatctgatccaaacaagcaagttacaccattcacgacacacactcagtgtttgagaaatactaggggcagctggaccccatgcctaaacacgtaccgacgcagggcacgatggaaggccccactcactctggccccactgcagtgggaaccctcctgcccaaaggagtggttcttccagagtctctggcacactgacacatgcatcctctcat

SEQ ID NO: 141305 - DNA, 1694 bp, Homo sapiens
  Payload ID: 7771
  Gene Symbol: HMBOX1
  Gene Name: homeobox containing 1
  ENST ID: ENST00000355231
  CDS Start-End: 227-1387
gagaactgtagagatggtgtgatgtggagatggattttttgcatcctcaagtcggtagataggtgggaaaggaaaagtgtttcttaatattttattccggaaccgtgttttggttacactattggggctactttgaaaggcgtcctccacccaccttcaccccgaaacaaatggtagataacgcagatcatctctggaaaggatattgatccgcctcatgtaaagtatgcttagttcctttccagtggttttgctggaaaccatgtctcattatacagatgaacccagatttaccatagagcagatagatctgcttcagcgacttcggcgtactggaatgactaaacatgaaattctccatgccttggaaactttggaccgtcttgatcaagagcatagtgacaagtttggaagaaggtccagctatggaggaagttcatatgggaatagtactaacaatgtcccagcatcttcctctacagctacagcttccacacagacgcagcattcgggaatgtccccgtcacctagcaacagttatgatacttccccacagccttgcactaccaatcaaaatgggagggagaataatgagcgattatctacatccaatggaaagatgtcaccaactcgctaccatgcaaacagcatgggtcagaggtcatacagttttgaagcctcagaagaggacctagatgtagatgataaagtggaagaattaatgaggagggacagcagtgtgataaaagaggaaatcaaagcctttcttgccaatcggaggatttcccaagcagttgttgcacaggtaacaggtatcagtcagagccggatctctcattggctgttgcagcagggatcagacctgagtgaacagaagaaaagagcattttaccgatggtatcaacttgagaagacaaaccctggcgctacactaagtatgagaccagcccccattccaatagaggaccctgaatggagacaaacgcctcccccagtctctgccacatctggtactttccgactgcgacgagggagtcgatttacctggagaaaggagtgcctggctgttatggaaagttacttcaatgagaatcaatacccagatgaagcaaagagggaagaaattgcaaacgcttgcaatgcagttatacagaagccaggcaaaaagctgtcagatctggaaagagttacctccctgaaagtatataattggtttgctaacagaaggaaggagatcaagaggagagccaatattgcagcaatcctggagagtcatgggatagatgtgcagagtccaggaggccactcaaacagtgatgatgtcgacgggaatgactactctgagcagactgataggatgcaagctgaggtcgtggcacaggaatgacagacaccatttggggagtatccacagagtcaaaggaacactagaatccccacctcagcgtgaggataattgatttccagctgcaataagccgtgcctcattatagccacactgtggctagattatacttctttgggtgctgtgctaagaatgtcaatggaaaaagccgatctcagattttgtttgaagttaacatgcctgacacagacatcctttcctctcacaagctgtgtgacttagtagataaaatactgccttctgcctttgggaccatgattaaaaacaaagacaaaaaccaaaagtcatt

SEQ ID NO: 141306 - DNA, 1975 bp, Homo sapiens
  Payload ID: 7772
  Gene Symbol: HOXD1
  Gene Name: homeobox D1
  Uniprot ID: Q9GZZ0
  ENST ID: ENST00000331462
  CDS Start-End: 224-1210
gccgagcggagaggccgcccattggccggccagcgccacgtggccgcccccgccggtatattaggccactatttacctccggctcactcgccatgggttggagagggcagctcgggtagagagggctggcggagcggcgcagacggcggcagtcctgctcagcctctgcccggctccgtactccggccccggcctgcgccctcagaaaggtggggcccgaaccatgagctcctacctggagtacgtgtcatgcagcagcagcggcggggtcggcggcgacgtgctcagcttggcacccaagttctgccgctccgacgcccggcccgtggctctgcagcccgccttccctctgggcaacggcgacggcgccttcgtcagctgtctgcccctggccgccgcccgaccctcgccttcgcccccggccgcccccgcgcggccgtccgtaccgcctccggccgcgccccagtacgcgcagtgcaccctggagggggcctacgaacctggtgccgcacctgccgcggcagctgggggcgcggactacggcttcctggggtccgggccggcgtacgacttcccgggcgtgctggggcgggcggccgacgacggcgggtctcacgtccactacgccacctcggccgtcttctcgggcggcggctctttcctcctcagcggccaggtggattacgcggccttcggcgaacccggcccttttccggcttgtctcaaagcgtcagccgacggccaccctggtgctttccagaccgcatccccggccccaggcacctaccccaagtccgtctctcccgcctccggcctccctgccgccttcagcacgttcgagtggatgaaagtgaagaggaatgcctctaagaaaggcaaactcgccgagtatggggccgctagcccctccagcgcgatccgcacgaatttcagcaccaagcaactgacagaactggaaaaagagtttcatttcaataagtacttaactcgagcccggcgcatcgagatagccaactgcttgcacctgaatgacacgcaagtcaaaatctggttccagaaccgcaggatgaaacagaagaaaagggaacgagaagggcttctggccacggccattcctgtggctcccctccaacttcccctctctggaacaacccccactaagtttatcaagaaccccggcagcccttctcagtcccaagagccttcgtgaggccggtacttggggccgaaaaactgtggcctgcagaagtcccaggcgacccccatccctatctagacttaggagctcagtttgggatggaggtgggagaacaaaaatgaatagggatttcacttgggaaatgaagtactttagttggcttccgagttccagactatatgtccagatattaattgactgtcttgtaagccacttgtttggttatgatttgtgtcttatcagggaaaaggtgcccagctgccagcccagctccgctgctatctttgcctcacttagtcatgtgcaattcgcgttgcagagtggcagaccattagttgctgagttctgtcagcactctgatgtgctcagaagagcacctgcccaaagtttttctggttttaatttaaaggacaaggctacatatattcagctttttgagatgaccaaagctagttagggtctccttgatgtagctaagctgcttcagtgatcttcacatttgcactccagtttttttttctttaaaaaagcggtttctacctctctatgtgcctgagtgatgatacaatcgctgtttagttactagatgaacaaatccacagaatgggtaaagagtagaatctgaactatatcttgacaaatattattcaaacttgaatgtaaatatatacagtatgtatattttttaaaaagatttgcttgcaatgaccttataagtgacatttaatgtcatagcatgtaaagggttttttttgtaataaaaattatagaatctgc

SEQ ID NO: 141307 - DNA, 1989 bp, Homo sapiens
  Payload ID: 7773
  Gene Symbol: HOXD10
  Gene Name: homeobox D10
  Uniprot ID: P28358
  ENST ID: ENST00000249501
  CDS Start-End: 256-1278
ctgggccggttgtctccagcgcgcactatcgcgggcgcgtagtagatgtcgctgttgtccgtgcttacccggccggccggccaggctctggagcacgtgacccgagaggaggctgcggctcaaggccattttcaaatctcattggcttggttgtcatgtggtcggcagaggcatccacaattacacggggaatgttttcctagagatgtcagcctacaaaggacacaatctctcttcttcaaattcttccccaaaatgtcctttcccaacagctctcctgctgctaatacttttttagtagattccttgatcagtgcctgcaggagtgacagtttttattccagcagcgccagcatgtacatgccaccacctagcgcagacatggggacctatggaatgcaaacctgtggactgctcccgtctctggccaaaagagaagtgaaccaccaaaatatgggtatgaatgtgcatccttatatacctcaagtagacagttggacagatccgaacagatcttgtcgaatagagcaacctgttacacagcaagtccccacttgctccttcaccaccaacattaaggaagaatccaattgctgcatgtattctgataagcgcaacaaactcatttcggccgaggtcccttcgtaccagaggctggtccctgagtcttgtcccgttgagaaccctgaggttcccgtccctggatattttagactgagtcagacctacgccaccgggaaaacccaagagtacaataatagccccgaaggcagctccactgtcatgctccagctcaaccctcgtggcgcggccaagccgcagctctccgctgcccagctgcagatggaaaagaagatgaacgagcccgtgagcggccaggagcccaccaaagtctcccaggtggagagccccgaggccaaaggcggccttcccgaagagaggagctgcctggctgaggtctccgtgtccagtcccgaagtgcaggagaaggaaagcaaagaggaaatcaagtctgatacaccaaccagcaattggctcactgcaaagagtggcagaaagaagaggtgcccttacactaagcaccaaacgctggaattagaaaaagagttcttgttcaatatgtacctcacccgcgagcgccgcctagagatcagtaagagcgttaacctcaccgacaggcaggtcaagatttggtttcaaaaccgccgaatgaaactcaagaagatgagccgagagaaccggatccgagaactgaccgccaacctcacgttttcttaggtctgaggccggtctgaggccggtcagaggccaggattggagagggggcaccgcgttccagggcccagtgctggaggactgggaaagcggaaacaaaaccttcaccgctctttgtttgttgttttgttgtattttgttttcctgctagaatgtgactttggggtcattatgttcgtgctgcaagtgatctgtaatccctatgagtatatatatatatatatatatatatatataaaaacttagcacgtgtaatttattattttttcatcgtaatgcagggtaactattattgcgcattttcatttgggtcttaacttattggaactgtagagcatccatccatccatccatccagcaatgtgactttttcatgtctttcctaacacaaaaggtctatgtgtgtggttagtccatgaactcatggcattttgaatacatccagtactttaaaaatgacatatatatttaaaaaaaaaagattaagaaaacccacaagttggagggagggggacttaaaaagcacattacaatgtatcttttcacaaatgaatttagcagttgtccttggtgagatgggatattggcgatttatgccttgtagcctttcccttgtggtgcatctgtggtttggtagaagtacaacagcaacctgtcctttctgtgcatgttctggtcgcatgtataatgcaataaactctggaaatgagttca

SEQ ID NO: 141308 - DNA, 1533 bp, Homo sapiens
  Payload ID: 7774
  Gene Symbol: HOXD11
  Gene Name: homeobox D11
  Uniprot ID: P31277
  ENST ID: ENST00000249504
  CDS Start-End: 71-1087
tgcaatcgatggctcaggttggctgcgcggggagcggccagaggctcgctggcgcgcacgccgcggagtcatgaacgactttgacgagtgcggccagagcgcagccagcatgtacctgccgggctgcgcctactatgtggccccgtctgacttcgctagcaagccttcgttcctttcccaaccgtcgtcctgccagatgactttcccctactcttccaacctggctccgcacgtccagcccgtgcgcgaagtggccttccgcgactacggcctggagcgcgccaagtggccgtaccgcggcggcggcggcggcggcagcgcggggggcggcagcagcgggggcggccccggcgggggcggcggcggcgcggggggctacgctccctactacgcggcggcggcggcggcggctgcggcggccgcggcggccgaggaggcggccatgcaacgcgagcttctcccgcccgcgggccgccggccggacgtgctcttcaaggcgcctgagccggtgtgcgctgcgccggggccgccgcacggccccgcgggcgccgcctccaacttctacagcgcggtgggccgcaatggcatcttgccacagggcttcgaccagttctacgaggcagcgcccgggcccccgttcgccgggccgcagcccccgccgccacccgcgccgccacagcccgagggcgcagccgacaagggcgaccccaggaccggggctggtggcggcgggggcagtccctgcaccaaggcgacccctggctcggagcccaagggggcagcagaaggcagcggtggcgacggcgagggccccccgggagaggcgggggccgagaagagcagcagcgcagttgccccccagcggtcccggaaaaagcgctgtccctataccaagtaccagatccgcgaactggaacgcgagtttttctttaacgtgtacataaacaaagagaaaagacttcaactctctcggatgctcaacctcactgaccggcaagtcaaaatctggttccagaatcgcaggatgaaagaaaagaaactgaacagagaccgtctgcagtatttcactggaaaccccttattttgagagctccaggaagcgccctcaccccagccccactcacccaccctccttcccaccagcctgctctccgcaggcccactgtccttgggtttaatgacgtctcttctctgtggaacttcacgattccttcccacggtcaactcgggacctcccagcgaccactgcagcctgcggacgaggccgggacttggccgagcggatcctaataaggggaaaatggtaaatgcaaacgtcccgttacaattttaccgccagtgtgctgtcgttccccctccccctctccgagtcctcgtggggacacggcggggtctgtaggaagttgggccgggttgggggttgctagaaggcgctggtgttttgctctgagttttaagagatcccttccttcctcttcggtgaatgcaggttatttaaactttgggaaatgtacttttagtctgtcatatcaa

SEQ ID NO: 141309 - DNA, 626 bp, Homo sapiens
  Payload ID: 7774
  Gene Symbol: HOXD11
  Gene Name: homeobox D11
  ENST ID: ENST00000619244
  CDS Start-End: 40-525
atgaacgactttgacgagtgcggccagagcgcagccagcatgtacctgccgggctgcgcctactatgtggccccgtctgacttcgctagcaagccttcgttcctttcccaaccgtcgtcctgccagatgactttcccctactcttccaacctggaccggggcggcggcgggggcagtccctgcaccaaggcgacccctggctcggagcccaagggggcagcagaaggcagcggtggcgacggcgagggccccccgggagaggcgggggccgagaagagcagcagcgcagttgccccccagcggtcccggaaaaagcgctgtccctataccaagtaccagatccgcgaactggaacgcgagtttttctttaacgtgtacataaacaaagagaaaagacttcaactctctcggatgctcaacctcactgaccggcaagtcaaaatctggttccagaatcgcaggatgaaagaaaagaaactgaacagagaccgtctgcagtatttcactggaaaccccttattttgagagctccaggaagcgccctcaccccagccccactcacccaccctccttcccaccagcctgctctccgcaggcccactgtccttgggtttaatgacgtctct

SEQ ID NO: 141310 - DNA, 841 bp, Homo sapiens
  Payload ID: 7775
  Gene Symbol: HOXD12
  Gene Name: homeobox D12
  ENST ID: ENST00000404162
  CDS Start-End: 1-741
atgtgtgagcgcagtctctacagagcgggctatgtgggctcgcttctgaatctgcagtcgccagactctttctacttctccaacctgaggccgaatggcggccagttggccgcgcttccccctatctcctacccgcgcggcgcgctgccctgggccgccacgcccgcctcctgcgcccccgcgcagcctgcgggcgccactgccttcggcggcttctcgcagccctacctggctggctccgggcctctcggcctgcagcccccaacagccaaagacggacccgaagagcaggctaagttctatgcgcccgaagcggccgctgggccagaggagcgcggtcgtacccggccgtccttcgcccccgagtctagcctggctcctgcagtggctgctctcaaagcggccaagtatgactacgctggtgtgggtcgtgccacgccgggctccacgaccctgctccagggggctccctgcgcccctggcttcaaggacgacaccaagggcccgctcaacttgaacatgacagtgcaggcggcgggcgttgcctcttgcctgcgaccttcactgcccgacggtaaacggtgcccatgctccccgggccggcctgccgtggggggcggccccggggagggcccgcaagaagcggaaaccctacacgaagcagcagattgcggagttggagaacgaattcctcgtcaacgaattcatcaacaggcagaaacgcaaggaattgtccaataggctgaacctcagcgaccagcaagtcaaaatctggttccagaacaggcgtatgaagaagaagcgcgtggtgcttcgggagcaggcgctggcgctctactag

SEQ ID NO: 141311 - DNA, 1318 bp, Homo sapiens
  Payload ID: 7775
  Gene Symbol: HOXD12
  Gene Name: homeobox D12
  Uniprot ID: P35452
  ENST ID: ENST00000406506
  CDS Start-End: 73-885
tctgagcctgtcctcttattcccggttgtaactaaatactgttgcgagcgcagccgaagccctttgttggagatgtgtgagcgcagtctctacagagcgggctatgtgggctcgcttctgaatctgcagtcgccagactctttctacttctccaacctgaggccgaatggcggccagttggccgcgcttccccctatctcctacccgcgcggcgcgctgccctgggccgccacgcccgcctcctgcgcccccgcgcagcctgcgggcgccactgccttcggcggcttctcgcagccctacctggctggctccgggcctctcggcctgcagcccccaacagccaaagacggacccgaagagcaggctaagttctatgcgcccgaagcggccgctgggccagaggagcgcggtcgtacccggccgtccttcgcccccgagtctagcctggctcctgcagtggctgctctcaaagcggccaagtatgactacgctggtgtgggtcgtgccacgccgggctccacgaccctgctccagggggctccctgcgcccctggcttcaaggacgacaccaagggcccgctcaacttgaacatgacagtgcaggcggcgggcgttgcctcttgcctgcgaccttcactgcccgacggcctgccgtggggggcggccccggggagggcccgcaagaagcggaaaccctacacgaagcagcagattgcggagttggagaacgaattcctcgtcaacgaattcatcaacaggcagaaacgcaaggaattgtccaataggctgaacctcagcgaccagcaagtcaaaatctggttccagaacaggcgtatgaagaagaagcgcgtggtgcttcgggagcaggcgctggcgctctactagccgcgcgcgtggccagggccgggttggatctgcccttttggacagaggccttgtttggggagggggatctggggctaaggctaaggcttttccttcggttccttctctgctggccccagaagccaccaagagatttacagaccaggccagttgggcctccttgctttcctcagtccctgagaagcccgtgagaaacgtgcggaagtaccagtgcaactctggctggccttaaggcttccacgttgggggactgaggccaactctccttgctcctggctggggcatttgcacccaccgctcattcttgctccccggtacctggatttttctgtttccacccaattcgttctccctttccccctctctccagccccttcagcgtatagcagtcgcctagttagggctcagagtggaaggcctcctgagggaatgg

SEQ ID NO: 141312 - DNA, 2240 bp, Homo sapiens
  Payload ID: 7776
  Gene Symbol: HOXD13
  Gene Name: homeobox D13
  Uniprot ID: P35453
  ENST ID: ENST00000392539
  CDS Start-End: 1-1032
atgagccgcgccgggagctgggacatggacgggctgcgggcagacggcgggggcgccggtggcgccccggcctcttcctcctcctcatcggtggcggcggcggcggcgtcaggccagtgccgcggctttctctccgcgcctgtgttcgccgggacgcattcggggcgggcggcggcggcggcagcggcggctgcggcggcggcggcggcagcctccggctttgcgtaccccgggacctctgagcgcacgggctcttcctcgtcgtcgtcctcttctgccgttgtagcggcgcgcccggaggctcccccagccaaagagtgcccagcacccacgcctgcagcggccgctgcagcgcccccgagcgctccagcgctgggctacggctaccacttcggcaacggctactacagctgccgtatgtcgcacggcgtgggcttacagcagaatgcgctcaagtcatcgccgcacgcctcgctgggaggctttcccgtggagaagtacatggacgtgtcaggcctggcgagcagcagcgtaccggccaacgaggtgccagcgcgagccaaggaggtatccttctaccagggctatacgagcccttaccagcacgtgcccggctatatcgacatggtgtccactttcggctccggggagcctcggcacgaggcctacatctccatggaggggtaccagtcctggacgctggctaacgggtggaacagccaggtgtactgcaccaaggaccagccacaggggtcccacttttggaaatcttcctttccaggggatgtggctctaaatcagccggacatgtgcgtctaccgaagagggaggaagaagagagtgccttacaccaaactgcagcttaaagaactggagaacgagtatgccattaacaaattcattaacaaggacaagcggcggcgtatctcggctgctacgaacctatctgagagacaagtgaccatttggtttcagaaccgaagagtgaaggacaagaaaattgtctccaagctcaaagatactgtctcctgatgtggtccaggttggccacagacagcttagaagccattcggttgtctccaaaaggcctttggaaagacttgaatatgtatttaattccccccaccccctgccaatggtggcaaattttgtgaattgtttttctctcttccccttatctggctctaaaaccttctgctgcccaacctgactttgtagttctgatttttacttgtttattattggttttgttcttgcctagggtttttaaaatatctgtttttaatgttttgtttctccctccaggccagtataaagggacttgaagtattttttaataatccgccccccaatgaacttcagaagtgccattctgatttaagggtttttttaaaaaattactttatttgttcattcccagcactgattatcttcataatccattaggacagaatggttttcagtcgttcatatcctgtaattaggtaattgaatcattagctctcagcagttgccctgaggcaagtggaaaggcaggcagtgctctggggtcaccgagaaagtctaaaaacaggaggctgaaggtactgtgatggctttaaaaatggccaccttattaaatagggattgtatcaatattgaaatgaagacaatctttccaactttgggtgtttcacttgctgttttaattgtttgtttttaacactttgtaggtttgtgttttcataatctttaatttgaaactcatgtgtcctcatggatcgtggatgccttcatttcttgagctctcaatgcagacatttaaatggctgcaatcagtagagtgacccgcggatggcataaatgcacctccttttcttggccttggatctatgggtctgggattgtggtcatctcctcaatcctcaaaaagaggctgaatcaatgtggccgtgggtgggaacttacatacagaacccaatgaagaacttgactgtctaaacaagggggcctcgcatggagctgtaaagcatctaacaaatatgaaaaatgtgaagttccaaggtccaagaagaaaaataatgatgtttctgaaagtgatgataaataattacttttaaagtgctgcatatttatacaattgagagattatttttgtaaatgcaatgtctgtgagctgggatacatgggcagtgcttcagacatttaaaaatcactttttactcctagggagatgccaataaacagaactcttttgtttc

SEQ ID NO: 141313 - DNA, 2303 bp, Homo sapiens
  Payload ID: 7777
  Gene Symbol: HOXD3
  Gene Name: homeobox D3
  Uniprot ID: P31249
  ENST ID: ENST00000249440
  CDS Start-End: 177-1475
gcctccacagatatcaaaagaaacctgaagagcctacaaaaaaaaaagagataaagacaaaattcaagaaaacacacacatacataattgtggtcacctggagcctgggggccggcccagctctctcaggattcagcagacattggaggtggcagtgaaggatacagtggtagtcaatgttatttgagcagggtcagcaggccctggagcttcctgagtgcacaatgcagaaggctgcttactatgaaaacccaggactgtttggaggctatggctacagcaaaactacggacacttacggctacagcaccccccaccagccctacccaccccctgctgctgccagctccctggacactgactatccaggttctgcctgctccatccagagctctgcccctctgagagccccagcccacaaaggagctgaactcaatggcagctgcatgcggccgggcactgggaacagccagggtgggggtggtggcagccagcctcctggtctgaactcagagcagcagccaccacaaccccctcctccaccaccgaccctgcccccatcttcacccaccaatcctggaggtggagtgcctgccaagaagcccaaaggtgggcccaatgcttctagctcctcagccaccatcagcaagcagatcttcccctggatgaaagagtctcgacagaactccaagcagaagaacagctgtgccactgcaggagagagctgcgaggacaagagcccgccaggcccagcatccaagcgggtacgcacggcatacacgagcgcgcagctggtggaattggaaaaggaattccacttcaaccgctacttgtgccggccgcgccgcgtggagatggccaacctgctgaatctcacggaacgccagatcaagatctggttccagaaccggcgcatgaagtacaagaaggaccagaaggccaagggcatcctgcactcgccggctagccagtcccctgagcgcagcccaccgctcggcggcgccgctggccacgtggcctactccggccagctgccgccagtgcccggcctggcctacgacgcgccctcgccgcctgctttcgccaaatcacagcccaatatgtacggcctggccgcctacacggcgccactcagcagctgcctgccacaacagaagcgctacgcagcgccggagttcgagccccatcccatggcgagcaacggcggcggcttcgccagcgccaacttgcagggcagcccggtgtacgtgggcggcaacttcgtcgagtccatggcgcccgcgtccgggcctgtcttcaacctgggccacctctcgcacccgtcgtcggccagcgtggactacagttgcgccgcgcagattccaggcaaccaccaccatggaccttgcgaccctcatcccacctacacagatctctcggcccaccactcgtctcagggacgactgccggaggctcccaaactgacgcatctgtagcggccgccgccagcccgaactcgcggcaaaattacctctcttgctgtagtggtggggtagagggtggggcccgcggggcagttcgggaacccccttccccgctcttgccctgccgccgcctcccgggtctcaggcctccagcggcggaggcgcaggcgaccgggcctcccctccatgggcgtcctttgggtgactcgccataaatcagccgcaaggatccttccctgtaaatttgacagtgccacatactgcggaccaagggactccaatctggtaatggtgtcccaaaggtaagtctgagacccatcagcggcgcgccctgcagagggaccagagcttggagagtcttgggcctggcccgcgtctagcttagtttcagagaccttaatttatattctccttcctgtgccgtaaggattgcatcggactaaactatctgtatttattatttgaagcgagtcatttcgttccctgattatttatccttgtctgaatgtatttatgtgtatatttgtagatttatccagccgagcttaggaattcgcttccaggccgtgggggccacatttcacctccttagtccccctggtctgaactagttgagagagtagttttgaacagtcgtaaccgtggctggtgtttgtagttgacataaaggattaagaccgcaaattgtccttcatgggtagagtcaggaagcccggtggcgtggcacaacacactttggtcatttctcaaaaaccacagtcctcaccacagtttattgatttcaaattgtctggtactattggaacaaatatttagaataaaaaaatttcccagtcggaa

SEQ ID NO: 141314 - DNA, 2384 bp, Homo sapiens
  Payload ID: 7777
  Gene Symbol: HOXD3
  Gene Name: homeobox D3
  Uniprot ID: P31249
  ENST ID: ENST00000410016
  CDS Start-End: 275-1573
agttgaacctcagcctggttccgttctaccgggaattccgtgtgctcgagtatatggccgtgtctgcgagcgcgcaagaccagggttgggacagtgttgtctgcagacaaagggggaaggctagctctgccccccactggcgcccactctgaggccgaggacaccaggtttatgataaattgggatccaggtcacctggagcctgggggccggcccagctctctcaggattcagcagacattggaggtggcagtgaaggatacagtggtagtcaatgttatttgagcagggtcagcaggccctggagcttcctgagtgcacaatgcagaaggctgcttactatgaaaacccaggactgtttggaggctatggctacagcaaaactacggacacttacggctacagcaccccccaccagccctacccaccccctgctgctgccagctccctggacactgactatccaggttctgcctgctccatccagagctctgcccctctgagagccccagcccacaaaggagctgaactcaatggcagctgcatgcggccgggcactgggaacagccagggtgggggtggtggcagccagcctcctggtctgaactcagagcagcagccaccacaaccccctcctccaccaccgaccctgcccccatcttcacccaccaatcctggaggtggagtgcctgccaagaagcccaaaggtgggcccaatgcttctagctcctcagccaccatcagcaagcagatcttcccctggatgaaagagtctcgacagaactccaagcagaagaacagctgtgccactgcaggagagagctgcgaggacaagagcccgccaggcccagcatccaagcgggtacgcacggcatacacgagcgcgcagctggtggaattggaaaaggaattccacttcaaccgctacttgtgccggccgcgccgcgtggagatggccaacctgctgaatctcacggaacgccagatcaagatctggttccagaaccggcgcatgaagtacaagaaggaccagaaggccaagggcatcctgcactcgccggctagccagtcccctgagcgcagcccaccgctcggcggcgccgctggccacgtggcctactccggccagctgccgccagtgcccggcctggcctacgacgcgccctcgccgcctgctttcgccaaatcacagcccaatatgtacggcctggccgcctacacggcgccactcagcagctgcctgccacaacagaagcgctacgcagcgccggagttcgagccccatcccatggcgagcaacggcggcggcttcgccagcgccaacttgcagggcagcccggtgtacgtgggcggcaacttcgtcgagtccatggcgcccgcgtccgggcctgtcttcaacctgggccacctctcgcacccgtcgtcggccagcgtggactacagttgcgccgcgcagattccaggcaaccaccaccatggaccttgcgaccctcatcccacctacacagatctctcggcccaccactcgtctcagggacgactgccggaggctcccaaactgacgcatctgtagcggccgccgccagcccgaactcgcggcaaaattacctctcttgctgtagtggtggggtagagggtggggcccgcggggcagttcgggaacccccttccccgctcttgccctgccgccgcctcccgggtctcaggcctccagcggcggaggcgcaggcgaccgggcctcccctccatgggcgtcctttgggtgactcgccataaatcagccgcaaggatccttccctgtaaatttgacagtgccacatactgcggaccaagggactccaatctggtaatggtgtcccaaaggtaagtctgagacccatcagcggcgcgccctgcagagggaccagagcttggagagtcttgggcctggcccgcgtctagcttagtttcagagaccttaatttatattctccttcctgtgccgtaaggattgcatcggactaaactatctgtatttattatttgaagcgagtcatttcgttccctgattatttatccttgtctgaatgtatttatgtgtatatttgtagatttatccagccgagcttaggaattcgcttccaggccgtgggggccacatttcacctccttagtccccctggtctgaactagttgagagagtagttttgaacagtcgtaaccgtggctggtgtttgtagttgacataaaggattaagaccgcaaattgtccttcatgggtagagtcaggaagcccggtggcgtggcacaacacactttggtcatttctcaaaaaccacagtcctcaccacagtttattgatttcaaattgtctggtactattggaacaaatatttagaataaaa

SEQ ID NO: 141315 - DNA, 428 bp, Homo sapiens
  Payload ID: 7777
  Gene Symbol: HOXD3
  Gene Name: homeobox D3
  ENST ID: ENST00000432796
  CDS Start-End: 128-428
agacgcccggaccgaccgccgcctgtagctcggcagccttcgggtcacctggagcctgggggccggcccagctctctcaggattcagcagacattggaggtggcagtgaaggatacagtggtagtcaatgttatttgagcagggtcagcaggccctggagcttcctgagtgcacaatgcagaaggctgcttactatgaaaacccaggactgtttggaggctatggctacagcaaaactacggacacttacggctacagcaccccccaccagccctacccaccccctgctgctgccagctccctggacactgactatccaggttctgcctgctccatccagagctctgcccctctgagagccccagcccacaaaggagctgaactcaatggcagctgcatgcggccgggcactgggaacagccagggtg

SEQ ID NO: 141316 - DNA, 1464 bp, Homo sapiens
  Payload ID: 7778
  Gene Symbol: HOXD4
  Gene Name: homeobox D4
  Uniprot ID: P09016
  ENST ID: ENST00000306324
  CDS Start-End: 413-1180
ataggaggattcattctcccttgagctgtgcctacttggtgtcggggggcgggggttgcattcagctgggggtgagtggaagggccacggaaggttggcaaaatcagtggcagacaaaagctgggattacctgaggggaatggggtgctggggactggaactacattaatatctggcaggggctctcaaatgtgccatagcaagctacttgattacacgtatgttatttagttaaatttgtgaaaattatgagatgctcaccaacccggtgataaacttgctccctcgccattggctggcctggtcacatggctgcccaactttattcagttgacagcaagtaggagggccctatggaaggagaaaaaaagacaacacgagaaaaattagtattttctaccttctgaaattaatggtcatgagttcgtatatggtgaactccaagtatgtggaccccaagttccctccgtgcgaggagtatttgcagggcggctacctaggcgagcagggcgccgactactacggcggcggcgcgcagggcgcagacttccagcccccggggctctacccacggcccgacttcggtgagcagcctttcggaggcagcggccccgggcctggctcggcgctgcctgcgcggggtcacggacaagagccaggcggccccggcggtcactacgccgctccaggagagccttgcccagctcccccggcgcctccgccggcgcccctgcctggcgcccgggcctacagtcagtccgaccccaagcagccgccctccgggacggcactcaagcagccggccgtggtctacccctggatgaagaaggtgcacgtgaattcggtgaaccccaactacaccggtggggaacccaagcggtcccgaacggcctacacccggcagcaagtcctagaactggaaaaagaatttcattttaacaggtatctgacaaggcgccgtcggattgaaatcgctcacaccctgtgtctgtcggagcgccagatcaagatctggttccagaaccggaggatgaagtggaaaaaagatcataagctgcccaacactaaaggcaggtcatcgtcctcatcttcctcctcatcttgctcctcctcagtcgcccccagccagcatttacagccgatggccaaagaccaccacacggacctgacgaccttatagaagtggggaccctgggcccatctctccctgcgcaccaggctgagccgaagctgcgggggcaggccgggcctgctgtcacctcgctgggctctaaggtactgtggggtggacctgggacaagcaggccgccctcggactaggttagcatcctgcccgagggcagccccctccctagagcgggatggggatgggagggggggcgggattctctctctaagtatattatatggcaggagctactgagaacataaaatcttggcgagtcattaaacttatgaaaatca

SEQ ID NO: 141317 - DNA, 1917 bp, Homo sapiens
  Payload ID: 7779
  Gene Symbol: HOXD8
  Gene Name: homeobox D8
  Uniprot ID: P13378
  ENST ID: ENST00000313173
  CDS Start-End: 628-1500
tccgtgcagtgctgtggtgcgaaaatgcctcgccggtgcgcaccgggtcggcagcctcggcggcgggggcgagattggcgggaggggggcgcggggggggcgcggtaagaggtggcggcgggcagagggtgttttttttcttttccctccagagccggggtttgtaaaccgaggccagagtgtccccgtgggccgagcgcacttttttcttgtccgggtgcgctcagtcactggtgcctgagaggaaacagtggaggcagcggggcaggtcgcctggggcgtcggcgattatattgcggccgagccggggcgcgccgggaaaggccgggagggcggcggcgcgcgggggctgggcgaggccccgcgacccgcgagggaggcggcgcgaagccgaggcggcgggcgcaagagccgggcatgagcgcccagtagctgagcgcccgcggctgcctggcctcagaagcgacgcgcgagcgcgggcgggcggcagcagcgacgtagcccggcggtcccggcggcgagagcagccgccccacaggcccccgcggcagtgcggccgagtcgaggctcgctctctggctgcttagcgccgcccgcccgcccggggccgccgccgctgacgccccaatgagttcgtacttcgtgaacccgctgtactccaagtacaaggcggcggctgcggcggcggcggcggcgggcgaggccatcaatcccacttactacgactgtcacttcgcgcccgaggtcggcggccgtcacgccgccgccgcagcagccctgcagctctatggcaacagcgccgccggcttcccgcacgcgcccccgcaggcgcacgcgcacccgcacccgtccccgccgccctccgggactgggtgcggcggtagggaaggccggggccaggagtacttccaccccggcgggggcagcccggccgctgcctaccaggccgccccccctcctcctccgcatcctccgcctccgccgccacctcccccctgcggcgggattgcctgtcacggggagcccgcgaagttttacggatacgataacttacagagacagccgatttttacgacccagcaagaggccgagctggtacaatatcctgactgtaaatcgtccagtggtaatattggcgaggacccagaccacttaaatcagagctcgtctccttctcaaatgtttccgtggatgagaccacaagcagctcctggtagacgaagaggaagacaaacctacagtcgcttccaaactctagagttggaaaaggaatttctttttaacccctatctgaccaggaaaagaagaatcgaggtttcccacgccctagccctcaccgagagacaggtaaaaatctggttccagaacaggagaatgaaatggaaaaaggaaaacaacaaggacaaatttcccgtttcccggcaggaggtgaaggacggggaaacgaaaaaggaagcccaagagctggaggaagacagagccgaaggcctgacaaattaacttctacctttaaaatttaccacagactattaaaactaataatcaccatatgctgtggacaccacctattttctttgttggaaaggaccttacctgtgtttcaagctaccttcatgtcactgctcttgaggttttctgtgctttgagagggatttgggtgtttaaaaaagtttctagtatcacatagaagctgtccttgagctgtcctatggaagggtaatttgatactgaccttgtagctatatttttataatggtttttaatgtctgagctagtgatttgcctcaacaacgtaaacttcctaatgattagcacttaataattgcatataaaatgctttattaattaaacaagtgcacttgaacattttaatatttgtggtgagtaaattaaaaggagtttattaattaaaaaaaa

SEQ ID NO: 141318 - DNA, 1608 bp, Homo sapiens
  Payload ID: 7779
  Gene Symbol: HOXD8
  Gene Name: homeobox D8
  ENST ID: ENST00000429017
  CDS Start-End: 205-525
cgcgcggatccctccgcggggctcctcgtccccgtcacgctgactttccgtgcagtgctgtggtgcgaaaatgcctcgccgagacagccgatttttacgacccagcaagaggccgagctggtacaatatcctgactgtaaatcgtccagtggtaatattggcgaggacccagaccacttaaatcagagctcgtctccttctcaaatgtttccgtggatgagaccacaagcagctcctggtagacgaagaggaagacaaacctacagtcgcttccaaactctagagttggaaaaggaatttctttttaacccctatctgaccaggaaaagaagaatcgaggtttcccacgccctagccctcaccgagagacaggtaaaaatctggttccagaacaggagaatgaaatggaaaaaggaaaacaacaaggacaaatttcccgtttcccggcaggaggtgaaggacggggaaacgaaaaaggaagcccaagagctggaggaagacagagccgaaggcctgacaaattaacttctacctttaaaatttaccacagactattaaaactaataatcaccatatgctgtggacaccacctattttctttgttggaaaggaccttacctgtgtttcaagctaccttcatgtcactgctcttgaggttttctgtgctttgagagggatttgggtgtttaaaaaagtttctagtatcacatagaagctgtccttgagctgtcctatggaagggtaatttgatactgaccttgtagctatatttttataatggtttttaatgtctgagctagtgatttgcctcaacaacgtaaacttcctaatgattagcacttaataattgcatataaaatgctttattaattaaacaagtgcacttgaacattttaatatttgtggtgagtaaattaaaaggagtttattaattaaaaaaaattatgtctgcagaatactttatattatttgattacaatgtattatttatggattttttattctttcctttataatgaatagttcgggtgcgttttgtttactcctaaaaggtttctttgcgtattttctaaatgtaatatctcggggaaaatattagaaaagcacgtattagctgaagaatgtaacttgtagtccagctctgcagcttccttaaacttaagaaaaagattgggccagtgacaagaatttaaagacaatgtccaagttgacaattatttttctatagtccatacaaattaaataatctggcaactctggcaaatcgccttgtaaaatgcgtctcattttttaacttgctttcgttttgaaccgcccttgtaatcgcctgaaatcgctagttctttatgcggtggctgccgctgtgttccgttattttcagtaggtgtcatatttatttgtattgcctttgttctgttcgccgctggttttaaaccagcttgctgtgtgcatctcagacgtcggttggtacgtcctccgctgttcttcaggaaagcgatagcctcacctatttgaaacaagccctgagaggaaacgcagaaaaacctgagtgtaaacaactccggaatgtcgctagctccttagtaaataaatgaatctctttctgga

SEQ ID NO: 141319 - DNA, 1268 bp, Homo sapiens
  Payload ID: 7779
  Gene Symbol: HOXD8
  Gene Name: homeobox D8
  Uniprot ID: P13378
  ENST ID: ENST00000450510
  CDS Start-End: 11-880
tgacgccccaatgagttcgtacttcgtgaacccgctgtactccaagtacaaggcggcggctgcggcggcggcggcggcgggcgaggccatcaatcccacttactacgactgtcacttcgcgcccgaggtcggcggccgtcacgccgccgccgcagcagccctgcagctctatggcaacagcgccgccggcttcccgcacgcgcccccgcaggcgcacgcgcacccgcacccgtccccgccgccctccgggactgggtgcggcggtagggaaggccggggccaggagtacttccaccccggcgggggcagcccggccgctgcctaccaggccgccccccctcctcctccgcatcctccgcctccgccgccacctcccccctgcggcgggattgcctgtcacggggagcccgcgaagttttacggatacgataacttacagagacagccgatttttacgacccagcaagaggccgagctggtacaatatcctgactgtaaatcgtccagtggtaatattggcgaggacccagaccacttaaatcagagctcgtctccttctcaaatgtttccgtggatgagaccacaagctcctggtagacgaagaggaagacaaacctacagtcgcttccaaactctagagttggaaaaggaatttctttttaacccctatctgaccaggaaaagaagaatcgaggtttcccacgccctagccctcaccgagagacaggtaaaaatctggttccagaacaggagaatgaaatggaaaaaggaaaacaacaaggacaaatttcccgtttcccggcaggaggtgaaggacggggaaacgaaaaaggaagcccaagagctggaggaagacagagccgaaggcctgacaaattaacttctacctttaaaatttaccacagactattaaaactaataatcaccatatgctgtggacaccacctattttctttgttggaaaggaccttacctgtgtttcaagctaccttcatgtcactgctcttgaggttttctgtgctttgagagggatttgggtgtttaaaaaagtttctagtatcacatagaagctgtccttgagctgtcctatggaagggtaatttgatactgaccttgtagctatatttttataatggtttttaatgtctgagctagtgatttgcctcaacaacgtaaacttcctaatgattagcacttaataattgcatataaaatgctttattaattaaacaagtgcacttgaacattttaatatttgtggtgagtaa

SEQ ID NO: 141320 - DNA, 1235 bp, Homo sapiens
  Payload ID: 7779
  Gene Symbol: HOXD8
  Gene Name: homeobox D8
  ENST ID: ENST00000544999
  CDS Start-End: 187-747
cggcgattatattgcggccgagccggggcgcgccgggaaaggccgggagggcggcggcgcgcgggggctgggcgaggccccgcgacccgcgagggaggcggcgcgaagccgaggcggcgggcgcaagagccgggcatgagcgcccacgccgcccgcccgcccggggccgccgccgctgacgccccaatgagttcgtacttcgtgaacccgctgtactccaagtacaaggcggcggctgcggcggcggcggcggcgggcgaggccatcaatcccacttactacgactgtcacttcgcgcccgagagacagccgatttttacgacccagcaagaggccgagctggtacaatatcctgactgtaaatcgtccagtggtaatattggcgaggacccagaccacttaaatcagagctcgtctccttctcaaatgtttccgtggatgagaccacaagcagctcctggtagacgaagaggaagacaaacctacagtcgcttccaaactctagagttggaaaaggaatttctttttaacccctatctgaccaggaaaagaagaatcgaggtttcccacgccctagccctcaccgagagacaggtaaaaatctggttccagaacaggagaatgaaatggaaaaaggaaaacaacaaggacaaatttcccgtttcccggcaggaggtgaaggacggggaaacgaaaaaggaagcccaagagctggaggaagacagagccgaaggcctgacaaattaacttctacctttaaaatttaccacagactattaaaactaataatcaccatatgctgtggacaccacctattttctttgttggaaaggaccttacctgtgtttcaagctaccttcatgtcactgctcttgaggttttctgtgctttgagagggatttgggtgtttaaaaaagtttctagtatcacatagaagctgtccttgagctgtcctatggaagggtaatttgatactgaccttgtagctatatttttataatggtttttaatgtctgagctagtgatttgcctcaacaacgtaaacttcctaatgattagcacttaataattgcatataaaatgctttattaattaaacaagtgcacttgaacattttaatatttgtggtgagtaaattaaaaggagtttattaattaaaaaaaattatgtctgcagaatactttatattatttgattacaatgtattatttatggattttttattctttccttta

SEQ ID NO: 141321 - DNA, 1870 bp, Homo sapiens
  Payload ID: 7780
  Gene Symbol: HOXD9
  Gene Name: homeobox D9
  Uniprot ID: P28356
  ENST ID: ENST00000249499
  CDS Start-End: 50-1108
gtcggtggctcgggcgccggcggggagctgctcggcggcggacagtgtaatgttgggtgggagtgcgggacgcctcaaaatgtcttccagtggcaccctcagcaactactacgtggactcgcttataggccatgagggcgacgaggtgttcgcggcgcgcttcgggccgccggggccaggcgcgcagggccggcctgcaggtgtggctgatggcccggccgccaccgccgccgagttcgcctcgtgtagttttgcccccagatcggccgtgttctctgcctcgtggtccgcggtgccctcccagcccccggcagcggcggcgatgagcggcctctaccacccgtacgttcccccgccgcccctggccgcctctgcctccgagcccggccgctacgtgcgctcctggatggagccgctgcccggcttcccgggcggtgcgggcggtggcggtggtggtggaggcggcggtccgggccgcggtcccagccctggccccagcggcccagccaacgggcgccactacgggattaagcctgaaacccgagcggccccggcccccgccacggccgcctccaccacctcctcctcctccacttccttatcctcctcctccaaacggactgagtgctccgtggcccgggagtcccaggggagcagcggccccgagttctcgtgcaactcgttcctgcaggagaaggcggcagcggcgacggggggaaccgggcctggggcagggatcggggccgcgactgggacgggcggctcgtcggagccctcagcttgcagcgaccacccgatcccaggctgttcgctgaaggaggaggagaagcagcattcgcagccgcagcagcagcaacttgacccaaacaaccccgccgcgaactggatccacgctcgctccacccggaaaaagcgctgtccctacaccaaataccagacgcttgagctggagaaagaattcctcttcaacatgtacctcacccgggaccggcgctacgaggtggccaggattctcaacctaacagagagacaggtcaaaatctggtttcagaaccgtaggatgaaaatgaaaaagatgagcaaggagaaatgccccaaaggagactgacccggcgcggtgctggcgggagcgctcaagggcagcggatttgttgttgttgctgttttcctttgtgggtgtttggtgcttgatttccagaaactctccagcgacttggacttcttcttctttttttttttctttttagatagaagtgactgtgtggttggtctctgaggtatttgggggactctgtatttgctcgtttacgtgttggaaaaaccaagtggctttggggtttcgccctatcccactccctctctttcctgctccattggttccttaagaaatgctatattttgtgagtgcaagctggcttggggagccctctcttgtgtaaatgtcccccatgtttctgaaaagtgctgtagtttagtcccctcacccccagcactgcccaaacaggggccaagtgcgccccaattccaagaatgaaggcagagcgacaacagtgcggacaccccggctgctagcccacggtgaagcccggcggggttgcccaccagttgcgaaagccccctttcctcagggagcacgcgggacctcggtggagatctccagtgaggcttagaggagcccagggcctcgggcgggttggggtttgtcctcagtgcattggacgcgctgctctctcccctgaaggctgggctcgcgtgggcggccgcgggtggtggccctcccggttcctgcccgaggaccagttgtaaatgttactgcttcctactaataaatgctgacctgatcaaatggagcccagacgctggccctaaa

SEQ ID NO: 141322 - DNA, 1131 bp, Homo sapiens
  Payload ID: 7780
  Gene Symbol: HOXD9
  Gene Name: homeobox D9
  ENST ID: ENST00000613849
  CDS Start-End: 37-1062
agtgtaatgttgggtgggagtgcgggacgcctcaaaatgtcttccagtggcaccctcagcaactactacgtggactcgcttataggccatgagggcgacgaggtgttcgcggcgcgcttcgggccgccggggccaggcgcgcagggccggcctgcaggtgtggctgatggcccggccgccaccgccgccgagttcgcctcgtgtagttttgcccccagatcggccgtgttctctgcctcgtggtccgcggtgccctcccagcccccggcagcggcggcgatgagcggcctctaccacccgtacgttcccccgccgcccctggccgcctctgcctccgagcccggccgctacgtgcgctcctggatggagccgctgcccggcttcccgggcggtgcgggcggtggcggtggtggtggaggcggcggtccgggccgcggtcccagccctggccccagcggcccagccaacgggcgccactacgggattaagcctgaaacccgagcggccccggcccccgccacggccgcctccaccacctcctcctcctccacttccttatcctcctcctccaaacggactgagtgctccgtggcccgggagtcccaggggagcagcggccccgagttctcgtgcaactcgttcctgcaggagaaggcggcaggcgacggggggaacgggcctggggcagggatcggggccgcgactgggacgggcggctcgtcggagccctcagcttgcagcgaccacccgatcccaggctgttcgctgaaggaggaggagaagcagcattcgcagccgcagcagcagcaacttgacccaaacaaccccgccgcgaactggatccacgctcgctccacccggaaaaagcgctgtccctacaccaaataccagacgcttgagctggagaaagaattcctcttcaacatgtacctcacccgggaccggcgctacgaggtggccaggattctcaacctaacagagagacaggtcaaaatctggtttcagaaccgtaggatgaaaatgaaaaagatgagcaaggagaaatgccccaaaggagactgacccggcgcggtgctggcgggagcgctcaagggcagcggatttgttgttgttgctgttttcctttgtggg

SEQ ID NO: 141323 - DNA, 6997 bp, Homo sapiens
  Payload ID: 7781
  Gene Symbol: HIPK1
  Gene Name: homeodomain interacting protein kinase 1
  Uniprot ID: Q86Z02
  ENST ID: ENST00000340480
  CDS Start-End: 195-2705
atagtaggcaatatttatgtgtcatttattattattgctattagtgttacctattattttctttttgaacccacttattgcctaattagtcatagtttgacaattgcccttgtattccaccatgtcaaatataaatttacatagatgaagctcctgaaattattcttgggttaccattttgtgaagctattgatatgtggtcactgggctgtgtgatagctgagctgttcctgggatggcctctttatcctggtgcttcagaatatgatcagattcgttatatttcacaaacacaaggcttgccagctgaatatcttctcagtgccggaacaaaaacaaccaggtttttcaacagagatcctaatttggggtacccactgtggaggcttaagacacctgaagaacatgaactggagactggaataaaatcaaaagaagctcggaagtacatttttaattgcttagatgacatggctcaggtgaatatgtctacagacctggagggaacagacatgttggcagagaaggcagaccgaagagaatacattgatctgttaaagaaaatgctcacaattgatgcagataagagaattacccctctaaaaactcttaaccatcagtttgtgacaatgactcaccttttggattttccacatagcaatcatgttaagtcttgttttcagaacatggagatctgcaagcggagggttcacatgtatgatacagtgagtcagatcaagagtcccttcactacacatgttgccccaaatacaagcacaaatctaaccatgagcttcagcaatcagctcaatacagtgcacaatcaggccagtgttctagcttccagttctactgcagcagctgctactctttctctggctaattcagatgtctcactactaaactaccagtcagctttgtacccatcatctgctgcaccagttcctggagttgcccagcagggtgtttccttgcagcctggaaccacccagatttgcactcagacagatccattccaacagacatttatagtatgtccacctgcgtttcaaactggactacaagcaacaacaaagcattctggattccctgtgaggatggataatgctgtaccgattgtaccccaggcaccagctgctcagccactacagattcagtcaggagttctcacgcagggaagctgtacaccactaatggtagcaactctccaccctcaagtagccaccatcacaccgcagtatgcggtgccctttactctgagctgcgcagccggccggccggcgctggttgaacagactgccgctgtactgcaggcgtggcctggagggactcagcaaattctcctgccttcaacttggcaacagttgcctggggtagctctacacaactctgtccagcccacagcaatgattccagaggccatggggagtggacagcagctagctgactggaggaatgcccactctcatggcaaccagtacagcactatcatgcagcagccatccttgctgactaaccatgtgacattggccactgctcagcctctgaatgttggtgttgcccatgttgtcagacaacaacaatccagttccctcccttcgaagaagaataagcagtcagctccagtctcttccaagtcctctctagatgttctgccttcccaagtctattctctggttgggagcagtcccctccgcaccacatcttcttataattccttggtccctgtccaagatcagcatcagcccatcatcattccagatactcccagccctcctgtgagtgtcatcactatccgaagtgacactgatgaggaagaggacaacaaatacaagcccagtagctctggactgaagccaaggtctaatgtcatcagttatgtcactgtcaatgattctccagactctgactcttctttgagcagcccttattccactgataccctgagtgctctccgaggcaatagtggatccgttttggaggggcctggcagagttgtggcagatggcactggcacccgcactatcattgtgcctccactgaaaactcagcttggtgactgcactgtagcaacccaggcctcaggtctcctgagcaataagactaagccagtcgcttcagtgagtgggcagtcatctggatgctgtatcacccccacagggtatcgagctcaacgcggggggaccagtgcagcacaaccactcaatcttagccagaaccagcagtcatcggcggctccaacctcacaggagagaagcagcaacccagccccccgcaggcagcaggcgtttgtggcccctctctcccaagccccctacaccttccagcatggcagcccgctacactcgacagggcacccacaccttgccccggcccctgctcacctgccaagccaggctcatctgtatacgtatgctgccccgacttctgctgctgcactgggctcaaccagctccattgctcatcttttctccccacagggttcctcaaggcatgctgcagcctataccactcaccctagcactttggtgcaccaggtccctgtcagtgttgggcccagcctcctcacttctgccagcgtggcccctgctcagtaccaacaccagtttgccacccaatcctacattgggtcttcccgaggctcaacaatttacactggatacccgctgagtcctaccaagatcagccagtattcctacttatagttggtgagcatgagggaggaggaatcatggctaccttctcctggccctgcgttcttaatattgggctatggagagatcctcctttaccctcttgaaatttcttagccagcaacttgttctgcaggggcccactgaagcagaaggtttttctctgggggaacctgtctcagtgttgactgcattgttgtagtcttcccaaagtttgccctatttttaaattcattatttttgtgacagtaattttggtacttggaagagttcagatgcccatcttctgcagttaccaaggaagagagattgttctgaagttaccctctgaaaaatattttgtctctctgacttgatttctataaatgcttttaaaaacaagtgaagcccctctttatttcattttgtgttattgtgattgctggtcaggaaaaatgctgatagaaggagttgaaatctgatgacaaaaaaagaaaaattactttttgtttgtttataaactcagacttgcctattttattttaaaagcggcttacacaatctcccttttgtttattggacatttaaacttacagagtttcagttttgttttaatgtcatattatacttaatgggcaattgttatttttgcaaaactggttacgtattactctgtgttactattgagattctctcaattgctcctgtgtttgttataaagtagtgtttaaaaggcagctcaccatttgctggtaacttaatgtgagagaatccatatctgcgtgaaaacaccaagtattctttttaaatgaagcaccatgaattcttttttaaattattttttaaaagtctttctctctctgattcagcttaaatttttttatcgaaaaagccattaaggtggttattattacatggtggtggtggttttattatatgcaaaatctctgtctattatgagatactggcattgatgagctttgcctaaagattagtatgaattttcagtaatacacctctgttttgctcatctctcccttctgttttatgtgatttgtttggggagaaagctaaaaaaacctgaaaccagataagaacatttcttgtgtatagcttttatacttcaaagtagcttcctttgtatgccagcagcaaattgaatgctctcttattaagacttatataataagtgcatgtaggaattgcaaaaaatattttaaaaatttattactgaatttaaaaatattttagaagttttgtaatggtggtgttttaatattttacataattaaatatgtacatattgattagaaaaatataacaagcaatttttcctgctaacccaaaatgttatttgtaatcaaatgtgtagtgattacacttgaattgtgtacttagtgtgtatgtgatcctccagtgttatcccggagatggattgatgtctccattgtatttaaaccaaaatgaactgatacttgttggaatgtatgtgaactaattgcaattatattagagcatattactgtagtgctgaatgagcaggggcattgcctgcaaggagaggagacccttggaattgttttgcacaggtgtgtctggtgaggagtttttcagtgtgtgtctcttccttccctttcttcctccttcccttattgtagtgccttatatgataatgtagtggttaatagagtttacagtgagcttgccttaggatggaccagcaagcccccgtggaccctaagttgttcaccgggatttatcagaacaggattagtagctgtattgtgtaatgcattgttctcagtttccctgccaacattgaaaaataaaaacagcagcttttctcctttaccaccacctctacccctttccattttggattctcggctgagttctcacagaagcattttccccatgtggctctctcactgtgcgttgctaccttgcttctgtgagaattcaggaagcaggtgagaggagtcaagccaatattaaatatgcattcttttaaagtatgtgcaatcacttttagaatgaatttttttttccttttcccatgtggcagtccttcctgcacatagttgacattcctagtaaaatatttgcttgttgaaaaaaacatgttaacagatgtgtttataccaaagagcctgttgtattgcttaccatgtccccatactatgaggagaagttttgtggtgccgctggtgacaaggaactcacagaaaggtttcttagctggtgaagaatatagagaaggaaccaaagcctgttgagtcattgaggcttttgaggtttcttttttaacagcttgtatagtcttggggcccttcaagctgtgaaattgtccttgtactctcagctcctgcatggatctgggtcaagtagaaggtactggggatggggacattcctgcccataaaggatttggggaaagaagattaatcctaaaatacaggtgtgttccatctgaattgaaaatgatatatttgagatataattttaggactggttctgtgtagatagagatggtgtcaaggaggtgcaggatggagatgggagatttcatggagcctggtcagccagctctgtaccaggttgaacaccgaggagctgtcaaagtatttggagtttcttcattgtaaggagtaagggcttccaagatggggcaggtagtccgtacagcctaccaggaacatgttgtgttttctttattttttaaaatcattatattgagttgtgttttcagcactatattggtcaagatagccaagcagtttgtataatttctgtcactagtgtcatacagttttctggtcaacatgtgtgatctttgtgtctcctttttgccaagcacattctgattttcttgttggaacacaggtctagtttctaaaggacaaattttttgttccttgtcttttttctgtaagggacaagatttgttgtttttgtaagaaatgagatgcaggaaagaaaaccaaatcccattcctgcaccccagtccaataagcagataccacttaagataggagtctaaactccacagaaaaggataataccaagagcttgtattgttaccttagtcacttgcctagcagtgtgtggctttaaaaactagagatttttcagtcttagtctgcaaactggcatttccgattttccagcataaaaatccacctgtgtctgctgaatgtgtatgtatgtgctcactgtggctttagattctgtccctggggttagccctgttggccctgacaggaagggaggaagcctggtgaatttagtgagcagctggcctgggtcacagtgacctgacctcaaaccagcttaaggctttaagtcctctctcagaacttggcatttccaacttcttcctttccgggtgagagaagaagcggagaagggttcagtgtagccactctgggctcatagggacacttggtcactccagagtttttaatagctcccaggaggtgatattattttcagtgctcagctgaaataccaaccccaggaataagaactccatttcaaacagttctggccattctgagcctgcttttgtgattgctcatccattgtcctccactagaggggctaagcttgactgcccttagccaggcaagcacagtaatgtgtgttttgttcagcattattatgcaaaaattcactagttgagatggtttgttttaggataggaaatgaaattgcctctcagtgacaggagtggcccgagcctgcttcctattttgattttttttttttttaactgatagatggtgcagcatgtctacatggttgtttgttgctaaactttatataatgtgtggtttcaattcagcttgaaaaataatctcactacatgtagcagtacattatatgtacattatatgtaatgttagtatttctgctttgaatccttgatattgcaatggaattcctactttattaaatgtatttgatatgctagttattgtgtgcgatttaaactttttttgctttctccctttttttggttgtgcgctttcttttacaacaagcctctagaaacagatagtttctgagaattactgagctatgtttgtaatgcagatgtacttagggagtatgtaaaataatcattttaacaaaagaaatagatatttaaaatttaatactaactatgggaaaagggtccattgtgtaaaacatagtttatctttggattcaatgtttgtctttggttttacaaagtagcttgtattttcagtattttctacataatatggtaaaatgtagagcaattgcaatgcatcaataaaatgggtaaattttctgactta

SEQ ID NO: 141324 - DNA, 5766 bp, Homo sapiens
  Payload ID: 7781
  Gene Symbol: HIPK1
  Gene Name: homeodomain interacting protein kinase 1
  ENST ID: ENST00000361587
  CDS Start-End: 1-1474
cacaccgcagtatgcggtgccctttactctgagctgcgcagccggccggccggcgctggttgaacagactgccgctgtactggcgtggcctggagggactcagcaaattctcctgccttcaacttggcaacagttgcctggggtagctctacacaactctgtccagcccacagcaatgattccagaggccatggggagtggacagcagctagctgactggaggaatgcccactctcatggcaaccagtacagcactatcatgcagcagccatccttgctgactaaccatgtgacattggccactgctcagcctctgaatgttggtgttgcccatgttgtcagacaacaacaatccagttccctcccttcgaagaagaataagcagtcagctccagtctcttccaagtcctctctagatgttctgccttcccaagtctattctctggttgggagcagtcccctccgcaccacatcttcttataattccttggtccctgtccaagatcagcatcagcccatcatcattccagatactcccagccctcctgtgagtgtcatcactatccgaagtgacactgatgaggaagaggacaacaaatacaagcccagtagctctggactgaagccaaggtctaatgtcatcagttatgtcactgtcaatgattctccagactctgactcttctttgagcagcccttattccactgataccctgagtgctctccgaggcaatagtggatccgttttggaggggcctggcagagttgtggcagatggcactggcacccgcactatcattgtgcctccactgaaaactcagcttggtgactgcactgtagcaacccaggcctcaggtctcctgagcaataagactaagccagtcgcttcagtgagtgggcagtcatctggatgctgtatcacccccacagggtatcgagctcaacgcggggggaccagtgcagcacaaccactcaatcttagccagaaccagcagtcatcggcggctccaacctcacaggagagaagcagcaacccagccccccgcaggcagcaggcgtttgtggcccctctctcccaagccccctacaccttccagcatggcagcccgctacactcgacagggcacccacaccttgccccggcccctgctcacctgccaagccaggctcatctgtatacgtatgctgccccgacttctgctgctgcactgggctcaaccagctccattgctcatcttttctccccacagggttcctcaaggcatgctgcagcctataccactcaccctagcactttggtgcaccaggtccctgtcagtgttgggcccagcctcctcacttctgccagcgtggcccctgctcagtaccaacaccagtttgccacccaatcctacattgggtcttcccgaggctcaacaatttacactggatacccgctgagtcctaccaagatcagccagtattcctacttatagttggtgagcatgagggaggaggaatcatggctaccttctcctggccctgcgttcttaatattgggctatggagagatcctcctttaccctcttgaaatttcttagccagcaacttgttctgcaggggcccactgaagcagaaggtttttctctgggggaacctgtctcagtgttgactgcattgttgtagtcttcccaaagtttgccctatttttaaattcattatttttgtgacagtaattttggtacttggaagagttcagatgcccatcttctgcagttaccaaggaagagagattgttctgaagttaccctctgaaaaatattttgtctctctgacttgatttctataaatgcttttaaaaacaagtgaagcccctctttatttcattttgtgttattgtgattgctggtcaggaaaaatgctgatagaaggagttgaaatctgatgacaaaaaaagaaaaattactttttgtttgtttataaactcagacttgcctattttattttaaaagcggcttacacaatctcccttttgtttattggacatttaaacttacagagtttcagttttgttttaatgtcatattatacttaatgggcaattgttatttttgcaaaactggttacgtattactctgtgttactattgagattctctcaattgctcctgtgtttgttataaagtagtgtttaaaaggcagctcaccatttgctggtaacttaatgtgagagaatccatatctgcgtgaaaacaccaagtattctttttaaatgaagcaccatgaattcttttttaaattattttttaaaagtctttctctctctgattcagcttaaatttttttatcgaaaaagccattaaggtggttattattacatggtggtggtggttttattatatgcaaaatctctgtctattatgagatactggcattgatgagctttgcctaaagattagtatgaattttcagtaatacacctctgttttgctcatctctcccttctgttttatgtgatttgtttggggagaaagctaaaaaaacctgaaaccagataagaacatttcttgtgtatagcttttatacttcaaagtagcttcctttgtatgccagcagcaaattgaatgctctcttattaagacttatataataagtgcatgtaggaattgcaaaaaatattttaaaaatttattactgaatttaaaaatattttagaagttttgtaatggtggtgttttaatattttacataattaaatatgtacatattgattagaaaaatataacaagcaatttttcctgctaacccaaaatgttatttgtaatcaaatgtgtagtgattacacttgaattgtgtacttagtgtgtatgtgatcctccagtgttatcccggagatggattgatgtctccattgtatttaaaccaaaatgaactgatacttgttggaatgtatgtgaactaattgcaattatattagagcatattactgtagtgctgaatgagcaggggcattgcctgcaaggagaggagacccttggaattgttttgcacaggtgtgtctggtgaggagtttttcagtgtgtgtctcttccttccctttcttcctccttcccttattgtagtgccttatatgataatgtagtggttaatagagtttacagtgagcttgccttaggatggaccagcaagcccccgtggaccctaagttgttcaccgggatttatcagaacaggattagtagctgtattgtgtaatgcattgttctcagtttccctgccaacattgaaaaataaaaacagcagcttttctcctttaccaccacctctacccctttccattttggattctcggctgagttctcacagaagcattttccccatgtggctctctcactgtgcgttgctaccttgcttctgtgagaattcaggaagcaggtgagaggagtcaagccaatattaaatatgcattcttttaaagtatgtgcaatcacttttagaatgaatttttttttccttttcccatgtggcagtccttcctgcacatagttgacattcctagtaaaatatttgcttgttgaaaaaaacatgttaacagatgtgtttataccaaagagcctgttgtattgcttaccatgtccccatactatgaggagaagttttgtggtgccgctggtgacaaggaactcacagaaaggtttcttagctggtgaagaatatagagaaggaaccaaagcctgttgagtcattgaggcttttgaggtttcttttttaacagcttgtatagtcttggggcccttcaagctgtgaaattgtccttgtactctcagctcctgcatggatctgggtcaagtagaaggtactggggatggggacattcctgcccataaaggatttggggaaagaagattaatcctaaaatacaggtgtgttccatctgaattgaaaatgatatatttgagatataattttaggactggttctgtgtagatagagatggtgtcaaggaggtgcaggatggagatgggagatttcatggagcctggtcagccagctctgtaccaggttgaacaccgaggagctgtcaaagtatttggagtttcttcattgtaaggagtaagggcttccaagatggggcaggtagtccgtacagcctaccaggaacatgttgtgttttctttattttttaaaatcattatattgagttgtgttttcagcactatattggtcaagatagccaagcagtttgtataatttctgtcactagtgtcatacagttttctggtcaacatgtgtgatctttgtgtctcctttttgccaagcacattctgattttcttgttggaacacaggtctagtttctaaaggacaaattttttgttccttgtcttttttctgtaagggacaagatttgttgtttttgtaagaaatgagatgcaggaaagaaaaccaaatcccattcctgcaccccagtccaataagcagataccacttaagataggagtctaaactccacagaaaaggataataccaagagcttgtattgttaccttagtcacttgcctagcagtgtgtggctttaaaaactagagatttttcagtcttagtctgcaaactggcatttccgattttccagcataaaaatccacctgtgtctgctgaatgtgtatgtatgtgctcactgtggctttagattctgtccctggggttagccctgttggccctgacaggaagggaggaagcctggtgaatttagtgagcagctggcctgggtcacagtgacctgacctcaaaccagcttaaggctttaagtcctctctcagaacttggcatttccaacttcttcctttccgggtgagagaagaagcggagaagggttcagtgtagccactctgggctcatagggacacttggtcactccagagtttttaatagctcccaggaggtgatattattttcagtgctcagctgaaataccaaccccaggaataagaactccatttcaaacagttctggccattctgagcctgcttttgtgattgctcatccattgtcctccactagaggggctaagcttgactgcccttagccaggcaagcacagtaatgtgtgttttgttcagcattattatgcaaaaattcactagttgagatggtttgttttaggataggaaatgaaattgcctctcagtgacaggagtggcccgagcctgcttcctattttgattttttttttttttaactgatagatggtgcagcatgtctacatggttgtttgttgctaaactttatataatgtgtggtttcaattcagcttgaaaaataatctcactacatgtagcagtacattatatgtacattatatgtaatgttagtatttctgctttgaatccttgatattgcaatggaattcctactttattaaatgtatttgatatgctagttattgtgtgcgatttaaactttttttgctttctccctttttttggttgtgcgctttcttttacaacaagcctctagaaacagatagtttctgagaattactgagctatgtttgtaatgcagatgtacttagggagtatgtaaaataatcattttaacaaaagaaatagatatttaaaatttaatactaactatgggaaaagggtccattgtgtaaaacatagtttatctttggattcaatgtttgtctttggttttacaaagtagcttgtattttcagtattttctacataatatggtaaaatgtagagcaattgcaatgcatcaataaaatgggtaaattttctgactta

SEQ ID NO: 141325 - DNA, 2883 bp, Homo sapiens
  Payload ID: 7781
  Gene Symbol: HIPK1
  Gene Name: homeodomain interacting protein kinase 1
  Uniprot ID: Q86Z02
  ENST ID: ENST00000369553
  CDS Start-End: 64-2514
agattgtttcacatcaccagtgtatcctcagctcctaacactgtgtctggtacacattgtttgatggttttgatgtttcagattcgttatatttcacaaacacaaggcttgccagctgaatatcttctcagtgccggaacaaaaacaaccaggtttttcaacagagatcctaatttggggtacccactgtggaggcttaagacacctgaagaacatgaactggagactggaataaaatcaaaagaagctcggaagtacatttttaattgcttagatgacatggctcaggtgaatatgtctacagacctggagggaacagacatgttggcagagaaggcagaccgaagagaatacattgatctgttaaagaaaatgctcacaattgatgcagataagagaattacccctctaaaaactcttaaccatcagtttgtgacaatgactcaccttttggattttccacatagcaatcatgttaagtcttgttttcagaacatggagatctgcaagcggagggttcacatgtatgatacagtgagtcagatcaagagtcccttcactacacatgttgccccaaatacaagcacaaatctaaccatgagcttcagcaatcagctcaatacagtgcacaatcaggccagtgttctagcttccagttctactgcagcagctgctactctttctctggctaattcagatgtctcactactaaactaccagtcagctttgtacccatcatctgctgcaccagttcctggagttgcccagcagggtgtttccttgcagcctggaaccacccagatttgcactcagacagatccattccaacagacatttatagtatgtccacctgcgtttcaaactggactacaagcaacaacaaagcattctggattccctgtgaggatggataatgctgtaccgattgtaccccaggcaccagctgctcagccactacagattcagtcaggagttctcacgcagggaagctgtacaccactaatggtagcaactctccaccctcaagtagccaccatcacaccgcagtatgcggtgccctttactctgagctgcgcagccggccggccggcgctggttgaacagactgccgctgtactgcaggcgtggcctggagggactcagcaaattctcctgccttcaacttggcaacagttgcctggggtagctctacacaactctgtccagcccacagcaatgattccagaggccatggggagtggacagcagctagctgactggaggaatgcccactctcatggcaaccagtacagcactatcatgcagcagccatccttgctgactaaccatgtgacattggccactgctcagcctctgaatgttggtgttgcccatgttgtcagacaacaacaatccagttccctcccttcgaagaagaataagcagtcagctccagtctcttccaagtcctctctagatgttctgccttcccaagtctattctctggttgggagcagtcccctccgcaccacatcttcttataattccttggtccctgtccaagatcagcatcagcccatcatcattccagatactcccagccctcctgtgagtgtcatcactatccgaagtgacactgatgaggaagaggacaacaaatacaagcccagtagctctggactgaagccaaggtctaatgtcatcagttatgtcactgtcaatgattctccagactctgactcttctttgagcagcccttattccactgataccctgagtgctctccgaggcaatagtggatccgttttggaggggcctggcagagttgtggcagatggcactggcacccgcactatcattgtgcctccactgaaaactcagcttggtgactgcactgtagcaacccaggcctcaggtctcctgagcaataagactaagccagtcgcttcagtgagtgggcagtcatctggatgctgtatcacccccacagggtatcgagctcaacgcggggggaccagtgcagcacaaccactcaatcttagccagaaccagcagtcatcggcggctccaacctcacaggagagaagcagcaacccagccccccgcaggcagcaggcgtttgtggcccctctctcccaagccccctacaccttccagcatggcagcccgctacactcgacagggcacccacaccttgccccggcccctgctcacctgccaagccaggctcatctgtatacgtatgctgccccgacttctgctgctgcactgggctcaaccagctccattgctcatcttttctccccacagggttcctcaaggcatgctgcagcctataccactcaccctagcactttggtgcaccaggtccctgtcagtgttgggcccagcctcctcacttctgccagcgtggcccctgctcagtaccaacaccagtttgccacccaatcctacattgggtcttcccgaggctcaacaatttacactggatacccgctgagtcctaccaagatcagccagtattcctacttatagttggtgagcatgagggaggaggaatcatggctaccttctcctggccctgcgttcttaatattgggctatggagagatcctcctttaccctcttgaaatttcttagccagcaacttgttctgcaggggcccactgaagcagaaggtttttctctgggggaacctgtctcagtgttgactgcattgttgtagtcttcccaaagtttgccctatttttaaattcattatttttgtgacagtaattttggtacttggaagagttcagatgcccatcttctgcagttaccaaggaagagagattgttctgaagttaccctctgaaaaatattttgtctctctgacttgatttctataaatgcttttaaaaacaa

SEQ ID NO: 141326 - DNA, 3966 bp, Homo sapiens
  Payload ID: 7781
  Gene Symbol: HIPK1
  Gene Name: homeodomain interacting protein kinase 1
  ENST ID: ENST00000369555
  CDS Start-End: 84-3581
ctgcggggccccagatctcgtctcctccgccgcctcctcacggcagccccagctcgcggctgagaaccagacacaccggcggtatggcatcacagctgcaagtgttttcgcccccatcagtgtcgtcgagtgccttctgcagtgcgaagaaactgaaaatagagccctctggctgggatgtttcaggacagagtagcaacgacaaatattatacccacagcaaaaccctcccagccacacaagggcaagccaactcctctcaccaggtagcaaatttcaacatccctgcttacgaccagggcctcctcctcccagctcctgcagtggagcatattgttgtaacagccgctgatagctcgggcagtgctgctacatcaaccttccaaagcagccagaccctgactcacagaagcaacgtttctttgcttgagccatatcaaaaatgtggattgaaacgaaaaagtgaggaagttgacagcaacggtagtgtgcagatcatagaagaacatccccctctcatgctgcaaaacaggactgtggtgggtgctgctgccacaaccaccactgtgaccacaaagagtagcagttccagcggagaaggggattaccagctggtccagcatgagatcctttgctctatgaccaatagctatgaagtcttggagttcctaggccgggggacatttggacaggtggctaagtgctggaagaggagcaccaaggaaattgtggctattaaaatcttgaagaaccacccctcctatgccagacaaggacagattgaagtgagcatcctttcccgcctaagcagtgaaaatgctgatgagtataattttgtccgttcatacgagtgctttcagcataagaatcacacctgccttgtttttgaaatgttggagcagaacttatatgattttctaaagcaaaacaaatttagcccactgccactcaagtacatcagaccaatcttgcagcaggtggccacagccttgatgaagctcaagagtcttggtctgatccacgctgaccttaagcctgaaaacatcatgctggttgatccagttcgccagccctaccgagtgaaggtcattgactttggttctgctagtcacgtttccaaagctgtgtgctcaacctacttacagtcacgttactacagagctcctgaaattattcttgggttaccattttgtgaagctattgatatgtggtcactgggctgtgtgatagctgagctgttcctgggatggcctctttatcctggtgcttcagaatatgatcagattcgttatatttcacaaacacaaggcttgccagctgaatatcttctcagtgccggaacaaaaacaaccaggtttttcaacagagatcctaatttggggtacccactgtggaggcttaagacacctgaagaacatgaactggagactggaataaaatcaaaagaagctcggaagtacatttttaattgcttagatgacatggctcaggtgaatatgtctacagacctggagggaacagacatgttggcagagaaggcagaccgaagagaatacattgatctgttaaagaaaatgctcacaattgatgcagataagagaattacccctctaaaaactcttaaccatcagtttgtgacaatgactcaccttttggattttccacatagcaatcatgttaagtcttgttttcagaacatggagatctgcaagcggagggttcacatgtatgatacagtgagtcagatcaagagtcccttcactacacatgttgccccaaatacaagcacaaatctaaccatgagcttcagcaatcagctcaatacagtgcacaatcaggccagtgttctagcttccagttctactgcagcagctgctactctttctctggctaattcagatgtctcactactaaactaccagtcagctttgtacccatcatctgctgcaccagttcctggagttgcccagcagggtgtttccttgcagcctggaaccacccagatttgcactcagacagatccattccaacagacatttatagtatgtccacctgcgtttcaaactggactacaagcaacaacaaagcattctggattccctgtgaggatggataatgctgtaccgattgtaccccaggcaccagctgctcagccactacagattcagtcaggagttctcacgcagcaggcgtggcctggagggactcagcaaattctcctgccttcaacttggcaacagttgcctggggtagctctacacaactctgtccagcccacagcaatgattccagaggccatggggagtggacagcagctagctgactggaggaatgcccactctcatggcaaccagtacagcactatcatgcagcagccatccttgctgactaaccatgtgacattggccactgctcagcctctgaatgttggtgttgcccatgttgtcagacaacaacaatccagttccctcccttcgaagaagaataagcagtcagctccagtctcttccaagtcctctctagatgttctgccttcccaagtctattctctggttgggagcagtcccctccgcaccacatcttcttataattccttggtccctgtccaagatcagcatcagcccatcatcattccagatactcccagccctcctgtgagtgtcatcactatccgaagtgacactgatgaggaagaggacaacaaatacaagcccagtagctctggactgaagccaaggtctaatgtcatcagttatgtcactgtcaatgattctccagactctgactcttctttgagcagcccttattccactgataccctgagtgctctccgaggcaatagtggatccgttttggaggggcctggcagagttgtggcagatggcactggcacccgcactatcattgtgcctccactgaaaactcagcttggtgactgcactgtagcaacccaggcctcaggtctcctgagcaataagactaagccagtcgcttcagtgagtgggcagtcatctggatgctgtatcacccccacagggtatcgagctcaacgcggggggaccagtgcagcacaaccactcaatcttagccagaaccagcagtcatcggcggctccaacctcacaggagagaagcagcaacccagccccccgcaggcagcaggcgtttgtggcccctctctcccaagccccctacaccttccagcatggcagcccgctacactcgacagggcacccacaccttgccccggcccctgctcacctgccaagccaggctcatctgtatacgtatgctgccccgacttctgctgctgcactgggctcaaccagctccattgctcatcttttctccccacagggttcctcaaggcatgctgcagcctataccactcaccctagcactttggtgcaccaggtccctgtcagtgttgggcccagcctcctcacttctgccagcgtggcccctgctcagtaccaacaccagtttgccacccaatcctacattgggtcttcccgaggctcaacaatttacactggatacccgctgagtcctaccaagatcagccagtattcctacttatagttggtgagcatgagggaggaggaatcatggctaccttctcctggccctgcgttcttaatattgggctatggagagatcctcctttaccctcttgaaatttcttagccagcaacttgttctgcaggggcccactgaagcagaaggtttttctctgggggaacctgtctcagtgttgactgcattgttgtagtcttcccaaagtttgccctatttttaaattcattatttttgtgacagtaattttggtacttggaagagttcagatgcccatcttctgcagttaccaaggaagagagattgttctgaagttaccctctgaaaaatattttgtctctctgacttgatttctataaatgcttttaaaaacaagtgaagcccctcttta

SEQ ID NO: 141327 - DNA, 8157 bp, Homo sapiens
  Payload ID: 7781
  Gene Symbol: HIPK1
  Gene Name: homeodomain interacting protein kinase 1
  Uniprot ID: Q86Z02
  ENST ID: ENST00000369558
  CDS Start-End: 233-3865
gaggcggcggcggcggcggcgggaaggggctgggtggtggagcgggagggaggctgaggaggctccccctgcgggacgggcgcggggacggctccggggggcgggggccggggcccgggccggctcgcgcggggggtatgatgacccggctgcggggccccagatctcgtctcctccgccgcctcctcacggcagccccagctcgcggctgagaaccagacacaccggcggtatggcatcacagctgcaagtgttttcgcccccatcagtgtcgtcgagtgccttctgcagtgcgaagaaactgaaaatagagccctctggctgggatgtttcaggacagagtagcaacgacaaatattatacccacagcaaaaccctcccagccacacaagggcaagccaactcctctcaccaggtagcaaatttcaacatccctgcttacgaccagggcctcctcctcccagctcctgcagtggagcatattgttgtaacagccgctgatagctcgggcagtgctgctacatcaaccttccaaagcagccagaccctgactcacagaagcaacgtttctttgcttgagccatatcaaaaatgtggattgaaacgaaaaagtgaggaagttgacagcaacggtagtgtgcagatcatagaagaacatccccctctcatgctgcaaaacaggactgtggtgggtgctgctgccacaaccaccactgtgaccacaaagagtagcagttccagcggagaaggggattaccagctggtccagcatgagatcctttgctctatgaccaatagctatgaagtcttggagttcctaggccgggggacatttggacaggtggctaagtgctggaagaggagcaccaaggaaattgtggctattaaaatcttgaagaaccacccctcctatgccagacaaggacagattgaagtgagcatcctttcccgcctaagcagtgaaaatgctgatgagtataattttgtccgttcatacgagtgctttcagcataagaatcacacctgccttgtttttgaaatgttggagcagaacttatatgattttctaaagcaaaacaaatttagcccactgccactcaagtacatcagaccaatcttgcagcaggtggccacagccttgatgaagctcaagagtcttggtctgatccacgctgaccttaagcctgaaaacatcatgctggttgatccagttcgccagccctaccgagtgaaggtcattgactttggttctgctagtcacgtttccaaagctgtgtgctcaacctacttacagtcacgttactacagagctcctgaaattattcttgggttaccattttgtgaagctattgatatgtggtcactgggctgtgtgatagctgagctgttcctgggatggcctctttatcctggtgcttcagaatatgatcagattcgttatatttcacaaacacaaggcttgccagctgaatatcttctcagtgccggaacaaaaacaaccaggtttttcaacagagatcctaatttggggtacccactgtggaggcttaagacacctgaagaacatgaactggagactggaataaaatcaaaagaagctcggaagtacatttttaattgcttagatgacatggctcaggtgaatatgtctacagacctggagggaacagacatgttggcagagaaggcagaccgaagagaatacattgatctgttaaagaaaatgctcacaattgatgcagataagagaattacccctctaaaaactcttaaccatcagtttgtgacaatgactcaccttttggattttccacatagcaatcatgttaagtcttgttttcagaacatggagatctgcaagcggagggttcacatgtatgatacagtgagtcagatcaagagtcccttcactacacatgttgccccaaatacaagcacaaatctaaccatgagcttcagcaatcagctcaatacagtgcacaatcaggccagtgttctagcttccagttctactgcagcagctgctactctttctctggctaattcagatgtctcactactaaactaccagtcagctttgtacccatcatctgctgcaccagttcctggagttgcccagcagggtgtttccttgcagcctggaaccacccagatttgcactcagacagatccattccaacagacatttatagtatgtccacctgcgtttcaaactggactacaagcaacaacaaagcattctggattccctgtgaggatggataatgctgtaccgattgtaccccaggcaccagctgctcagccactacagattcagtcaggagttctcacgcagggaagctgtacaccactaatggtagcaactctccaccctcaagtagccaccatcacaccgcagtatgcggtgccctttactctgagctgcgcagccggccggccggcgctggttgaacagactgccgctgtactgcaggcgtggcctggagggactcagcaaattctcctgccttcaacttggcaacagttgcctggggtagctctacacaactctgtccagcccacagcaatgattccagaggccatggggagtggacagcagctagctgactggaggaatgcccactctcatggcaaccagtacagcactatcatgcagcagccatccttgctgactaaccatgtgacattggccactgctcagcctctgaatgttggtgttgcccatgttgtcagacaacaacaatccagttccctcccttcgaagaagaataagcagtcagctccagtctcttccaagtcctctctagatgttctgccttcccaagtctattctctggttgggagcagtcccctccgcaccacatcttcttataattccttggtccctgtccaagatcagcatcagcccatcatcattccagatactcccagccctcctgtgagtgtcatcactatccgaagtgacactgatgaggaagaggacaacaaatacaagcccagtagctctggactgaagccaaggtctaatgtcatcagttatgtcactgtcaatgattctccagactctgactcttctttgagcagcccttattccactgataccctgagtgctctccgaggcaatagtggatccgttttggaggggcctggcagagttgtggcagatggcactggcacccgcactatcattgtgcctccactgaaaactcagcttggtgactgcactgtagcaacccaggcctcaggtctcctgagcaataagactaagccagtcgcttcagtgagtgggcagtcatctggatgctgtatcacccccacagggtatcgagctcaacgcggggggaccagtgcagcacaaccactcaatcttagccagaaccagcagtcatcggcggctccaacctcacaggagagaagcagcaacccagccccccgcaggcagcaggcgtttgtggcccctctctcccaagccccctacaccttccagcatggcagcccgctacactcgacagggcacccacaccttgccccggcccctgctcacctgccaagccaggctcatctgtatacgtatgctgccccgacttctgctgctgcactgggctcaaccagctccattgctcatcttttctccccacagggttcctcaaggcatgctgcagcctataccactcaccctagcactttggtgcaccaggtccctgtcagtgttgggcccagcctcctcacttctgccagcgtggcccctgctcagtaccaacaccagtttgccacccaatcctacattgggtcttcccgaggctcaacaatttacactggatacccgctgagtcctaccaagatcagccagtattcctacttatagttggtgagcatgagggaggaggaatcatggctaccttctcctggccctgcgttcttaatattgggctatggagagatcctcctttaccctcttgaaatttcttagccagcaacttgttctgcaggggcccactgaagcagaaggtttttctctgggggaacctgtctcagtgttgactgcattgttgtagtcttcccaaagtttgccctatttttaaattcattatttttgtgacagtaattttggtacttggaagagttcagatgcccatcttctgcagttaccaaggaagagagattgttctgaagttaccctctgaaaaatattttgtctctctgacttgatttctataaatgcttttaaaaacaagtgaagcccctctttatttcattttgtgttattgtgattgctggtcaggaaaaatgctgatagaaggagttgaaatctgatgacaaaaaaagaaaaattactttttgtttgtttataaactcagacttgcctattttattttaaaagcggcttacacaatctcccttttgtttattggacatttaaacttacagagtttcagttttgttttaatgtcatattatacttaatgggcaattgttatttttgcaaaactggttacgtattactctgtgttactattgagattctctcaattgctcctgtgtttgttataaagtagtgtttaaaaggcagctcaccatttgctggtaacttaatgtgagagaatccatatctgcgtgaaaacaccaagtattctttttaaatgaagcaccatgaattcttttttaaattattttttaaaagtctttctctctctgattcagcttaaatttttttatcgaaaaagccattaaggtggttattattacatggtggtggtggttttattatatgcaaaatctctgtctattatgagatactggcattgatgagctttgcctaaagattagtatgaattttcagtaatacacctctgttttgctcatctctcccttctgttttatgtgatttgtttggggagaaagctaaaaaaacctgaaaccagataagaacatttcttgtgtatagcttttatacttcaaagtagcttcctttgtatgccagcagcaaattgaatgctctcttattaagacttatataataagtgcatgtaggaattgcaaaaaatattttaaaaatttattactgaatttaaaaatattttagaagttttgtaatggtggtgttttaatattttacataattaaatatgtacatattgattagaaaaatataacaagcaatttttcctgctaacccaaaatgttatttgtaatcaaatgtgtagtgattacacttgaattgtgtacttagtgtgtatgtgatcctccagtgttatcccggagatggattgatgtctccattgtatttaaaccaaaatgaactgatacttgttggaatgtatgtgaactaattgcaattatattagagcatattactgtagtgctgaatgagcaggggcattgcctgcaaggagaggagacccttggaattgttttgcacaggtgtgtctggtgaggagtttttcagtgtgtgtctcttccttccctttcttcctccttcccttattgtagtgccttatatgataatgtagtggttaatagagtttacagtgagcttgccttaggatggaccagcaagcccccgtggaccctaagttgttcaccgggatttatcagaacaggattagtagctgtattgtgtaatgcattgttctcagtttccctgccaacattgaaaaataaaaacagcagcttttctcctttaccaccacctctacccctttccattttggattctcggctgagttctcacagaagcattttccccatgtggctctctcactgtgcgttgctaccttgcttctgtgagaattcaggaagcaggtgagaggagtcaagccaatattaaatatgcattcttttaaagtatgtgcaatcacttttagaatgaatttttttttccttttcccatgtggcagtccttcctgcacatagttgacattcctagtaaaatatttgcttgttgaaaaaaacatgttaacagatgtgtttataccaaagagcctgttgtattgcttaccatgtccccatactatgaggagaagttttgtggtgccgctggtgacaaggaactcacagaaaggtttcttagctggtgaagaatatagagaaggaaccaaagcctgttgagtcattgaggcttttgaggtttcttttttaacagcttgtatagtcttggggcccttcaagctgtgaaattgtccttgtactctcagctcctgcatggatctgggtcaagtagaaggtactggggatggggacattcctgcccataaaggatttggggaaagaagattaatcctaaaatacaggtgtgttccatctgaattgaaaatgatatatttgagatataattttaggactggttctgtgtagatagagatggtgtcaaggaggtgcaggatggagatgggagatttcatggagcctggtcagccagctctgtaccaggttgaacaccgaggagctgtcaaagtatttggagtttcttcattgtaaggagtaagggcttccaagatggggcaggtagtccgtacagcctaccaggaacatgttgtgttttctttattttttaaaatcattatattgagttgtgttttcagcactatattggtcaagatagccaagcagtttgtataatttctgtcactagtgtcatacagttttctggtcaacatgtgtgatctttgtgtctcctttttgccaagcacattctgattttcttgttggaacacaggtctagtttctaaaggacaaattttttgttccttgtcttttttctgtaagggacaagatttgttgtttttgtaagaaatgagatgcaggaaagaaaaccaaatcccattcctgcaccccagtccaataagcagataccacttaagataggagtctaaactccacagaaaaggataataccaagagcttgtattgttaccttagtcacttgcctagcagtgtgtggctttaaaaactagagatttttcagtcttagtctgcaaactggcatttccgattttccagcataaaaatccacctgtgtctgctgaatgtgtatgtatgtgctcactgtggctttagattctgtccctggggttagccctgttggccctgacaggaagggaggaagcctggtgaatttagtgagcagctggcctgggtcacagtgacctgacctcaaaccagcttaaggctttaagtcctctctcagaacttggcatttccaacttcttcctttccgggtgagagaagaagcggagaagggttcagtgtagccactctgggctcatagggacacttggtcactccagagtttttaatagctcccaggaggtgatattattttcagtgctcagctgaaataccaaccccaggaataagaactccatttcaaacagttctggccattctgagcctgcttttgtgattgctcatccattgtcctccactagaggggctaagcttgactgcccttagccaggcaagcacagtaatgtgtgttttgttcagcattattatgcaaaaattcactagttgagatggtttgttttaggataggaaatgaaattgcctctcagtgacaggagtggcccgagcctgcttcctattttgattttttttttttttaactgatagatggtgcagcatgtctacatggttgtttgttgctaaactttatataatgtgtggtttcaattcagcttgaaaaataatctcactacatgtagcagtacattatatgtacattatatgtaatgttagtatttctgctttgaatccttgatattgcaatggaattcctactttattaaatgtatttgatatgctagttattgtgtgcgatttaaactttttttgctttctccctttttttggttgtgcgctttcttttacaacaagcctctagaaacagatagtttctgagaattactgagctatgtttgtaatgcagatgtacttagggagtatgtaaaataatcattttaacaaaagaaatagatatttaaaatttaatactaactatgggaaaagggtccattgtgtaaaacatagtttatctttggattcaatgtttgtctttggttttacaaagtagcttgtattttcagtattttctacataatatggtaaaatgtagagcaattgcaatgcatcaataaaatgggtaaattttctgactta

SEQ ID NO: 141328 - DNA, 3424 bp, Homo sapiens
  Payload ID: 7781
  Gene Symbol: HIPK1
  Gene Name: homeodomain interacting protein kinase 1
  Uniprot ID: Q86Z02
  ENST ID: ENST00000369559
  CDS Start-End: 162-3389
gcagagtctgcagtgcggagggggcgggaagtccaggccccgcactcgatccacgctggctccctacggaggcccacctactcgaggcccaccgactcctactgcaatcagtactatgcgatcgtcctagagagtccattcagctgcacttccgcctcagtatggcatcacagctgcaagtgttttcgcccccatcagtgtcgtcgagtgccttctgcagtgcgaagaaactgaaaatagagccctctggctgggatgtttcaggacagagtagcaacgacaaatattatacccacagcaaaaccctcccagccacacaagggcaagccaactcctctcaccaggtagcaaatttcaacatccctgcttacgaccagggcctcctcctcccagctcctgcagtggagcatattgttgtaacagccgctgatagctcgggcagtgctgctacatcaaccttccaaagcagccagaccctgactcacagaagcaacgtttctttgcttgagccatatcaaaaatgtggattgaaacgaaaaagtgaggaagttgacagcaacggtagtgtgcagatcatagaagaacatccccctctcatgctgcaaaacaggactgtggtgggtgctgctgccacaaccaccactgtgaccacaaagagtagcagttccagcggagaaggggattaccagctggtccagcatgagatcctttgctctatgaccaatagctatgaagtcttggagttcctaggccgggggacatttggacaggtggctaagtgctggaagaggagcaccaaggaaattgtggctattaaaatcttgaagaaccacccctcctatgccagacaaggacagattgaagtgagcatcctttcccgcctaagcagtgaaaatgctgatgagtataattttgtccgttcatacgagtgctttcagcataagaatcacacctgccttgtttttgaaatgttggagcagaacttatatgattttctaaagcaaaacaaatttagcccactgccactcaagtacatcagaccaatcttgcagcaggtggccacagccttgatgaagctcaagagtcttggtctgatccacgctgaccttaagcctgaaaacatcatgctggttgatccagttcgccagccctaccgagtgaaggtcattgactttggttctgctagtcacgtttccaaagctgtgtgctcaacctacttacagtcacgttactacagagctcctgaaattattcttgggttaccattttgtgaagctattgatatgtggtcactgggctgtgtgatagctgagctgttcctgggatggcctctttatcctggtgcttcagaatatgatcagattcgttatatttcacaaacacaaggcttgccagctgaatatcttctcagtgccggaacaaaaacaaccaggtttttcaacagagatcctaatttggggtacccactgtggaggcttaagacacctgaagaacatgaactggagactggaataaaatcaaaagaagctcggaagtacatttttaattgcttagatgacatggctcaggtgaatatgtctacagacctggagggaacagacatgttggcagagaaggcagaccgaagagaatacattgatctgttaaagaaaatgctcacaattgatgcagataagagaattacccctctaaaaactcttaaccatcagtttgtgacaatgactcaccttttggattttccacatagcaatcatgttaagtcttgttttcagaacatggagatctgcaagcggagggttcacatgtatgatacagtgagtcagatcaagagtcccttcactacacatgttgccccaaatacaagcacaaatctaaccatgagcttcagcaatcagctcaatacagtgcacaatcaggccagtgttctagcttccagttctactgcagcagctgctactctttctctggctaattcagatgtctcactactaaactaccagtcagctttgtacccatcatctgctgcaccagttcctggagttgcccagcagggtgtttccttgcagcctggaaccacccagatttgcactcagacagatccattccaacagacatttatagtatgtccacctgcgtttcaaactggactacaagcaacaacaaagcattctggattccctgtgaggatggataatgctgtaccgattgtaccccaggcaccagctgctcagccactacagattcagtcaggagttctcacgcagggaagctgtacaccactaatggtagcaactctccaccctcaagtagccaccatcacaccgcagtatgcggtgccctttactctgagctgcgcagccggccggccggcgctggttgaacagactgccgctgtactgcaggcgtggcctggagggactcagcaaattctcctgccttcaacttggcaacagttgcctggggtagctctacacaactctgtccagcccacagcaatgattccagaggccatggggagtggacagcagctagctgactggaggaatgcccactctcatggcaaccagtacagcactatcatgcagcagccatccttgctgactaaccatgtgacattggccactgctcagcctctgaatgttggtgttgcccatgttgtcagacaacaacaatccagttccctcccttcgaagaagaataagcagtcagctccagtctcttccaagtcctctctagatgttctgccttcccaagtctattctctggttgggagcagtcccctccgcaccacatcttcttataattccttggtccctgtccaagatcagcatcagcccatcatcattccagatactcccagccctcctgtgagtgtcatcactatccgaagtgacactgatgaggaagaggacaacaaatacaagcccagtagctctggactgaagccaaggtctaatgtcatcagttatgtcactgtcaatgattctccagactctgactcttctttgagcagcccttattccactgataccctgagtgctctccgaggcaatagtggatccgttttggaggggcctggcagagttgtggcagatggcactggcacccgcactatcattgtgcctccactgaaaactcagcttggtgactgcactgtagcaacccaggcctcaggtctcctgagcaataagactaagccagtcgcttcagtgagtgggcagtcatctggatgctgtatcacccccacagggtatcgagctcaacgcggggggaccagtgcagcacaaccactcaatcttagccaggtaagtgctatgggctactgccttctgtttgggccctgcactgttgttactttctggagaaccctgcttctggctggatgctgaataaagccaaatgaagccccttttgtgtcaaacaa

SEQ ID NO: 141329 - DNA, 3777 bp, Homo sapiens
  Payload ID: 7781
  Gene Symbol: HIPK1
  Gene Name: homeodomain interacting protein kinase 1
  ENST ID: ENST00000369561
  CDS Start-End: 188-3718
gagggaggctgaggaggctccccctgcgggacgggcgcggggacggctccggggggcgggggccggggcccgggccggctcgcgcggggggtatgatgacccggctgcggggccccagatctcgtctcctccgccgcctcctcacggcagccccagctcgcggctgagaaccagacacaccggcggtatggcatcacagctgcaagtgttttcgcccccatcagtgtcgtcgagtgccttctgcagtgcgaagaaactgaaaatagagccctctggctgggatgtttcaggacagagtagcaacgacaaatattatacccacagcaaaaccctcccagccacacaagggcaagccaactcctctcaccaggtagcaaatttcaacatccctgcttacgaccagggcctcctcctcccagctcctgcagtggagcatattgttgtaacagccgctgatagctcgggcagtgctgctacatcaaccttccaaagcagccagaccctgactcacagaagcaacgtttctttgcttgagccatatcaaaaatgtggattgaaacgaaaaagtgaggaagttgacagcaacggtagtgtgcagatcatagaagaacatccccctctcatgctgcaaaacaggactgtggtgggtgctgctgccacaaccaccactgtgaccacaaagagtagcagttccagcggagaaggggattaccagctggtccagcatgagatcctttgctctatgaccaatagctatgaagtcttggagttcctaggccgggggacatttggacaggtggctaagtgctggaagaggagcaccaaggaaattgtggctattaaaatcttgaagaaccacccctcctatgccagacaaggacagattgaagtgagcatcctttcccgcctaagcagtgaaaatgctgatgagtataattttgtccgttcatacgagtgctttcagcataagaatcacacctgccttgtttttgaaatgttggagcagaacttatatgattttctaaagcaaaacaaatttagcccactgccactcaagtacatcagaccaatcttgcagcaggtggccacagccttgatgaagctcaagagtcttggtctgatccacgctgaccttaagcctgaaaacatcatgctggttgatccagttcgccagccctaccgagtgaaggtcattgactttggttctgctagtcacgtttccaaagctgtgtgctcaacctacttacagtcacgttactacagagctcctgaaattattcttgggttaccattttgtgaagctattgatatgtggtcactgggctgtgtgatagctgagctgttcctgggatggcctctttatcctggtgcttcagaatatgatcagattcgttatatttcacaaacacaaggcttgccagctgaatatcttctcagtgccggaacaaaaacaaccaggtttttcaacagagatcctaatttggggtacccactgtggaggcttaagacacctgaagaacatgaactggagactggaataaaatcaaaagaagctcggaagtacatttttaattgcttagatgacatggctcaggtgaatatgtctacagacctggagggaacagacatgttggcagagaaggcagaccgaagagaatacattgatctgttaaagaaaatgctcacaattgatgcagataagagaattacccctctaaaaactcttaaccatcagtttgtgacaatgactcaccttttggattttccacatagcaatcatgttaagtcttgttttcagaacatggagatctgcaagcggagggttcacatgtatgatacagccagtgttctagcttccagttctactgcagcagctgctactctttctctggctaattcagatgtctcactactaaactaccagtcagctttgtacccatcatctgctgcaccagttcctggagttgcccagcagggtgtttccttgcagcctggaaccacccagatttgcactcagacagatccattccaacagacatttatagtatgtccacctgcgtttcaaactggactacaagcaacaacaaagcattctggattccctgtgaggatggataatgctgtaccgattgtaccccaggcaccagctgctcagccactacagattcagtcaggagttctcacgcagggaagctgtacaccactaatggtagcaactctccaccctcaagtagccaccatcacaccgcagtatgcggtgccctttactctgagctgcgcagccggccggccggcgctggttgaacagactgccgctgtactgcaggcgtggcctggagggactcagcaaattctcctgccttcaacttggcaacagttgcctggggtagctctacacaactctgtccagcccacagcaatgattccagaggccatggggagtggacagcagctagctgactggaggaatgcccactctcatggcaaccagtacagcactatcatgcagcagccatccttgctgactaaccatgtgacattggccactgctcagcctctgaatgttggtgttgcccatgttgtcagacaacaacaatccagttccctcccttcgaagaagaataagcagtcagctccagtctcttccaagtcctctctagatgttctgccttcccaagtctattctctggttgggagcagtcccctccgcaccacatcttcttataattccttggtccctgtccaagatcagcatcagcccatcatcattccagatactcccagccctcctgtgagtgtcatcactatccgaagtgacactgatgaggaagaggacaacaaatacaagcccagtagctctggactgaagccaaggtctaatgtcatcagttatgtcactgtcaatgattctccagactctgactcttctttgagcagcccttattccactgataccctgagtgctctccgaggcaatagtggatccgttttggaggggcctggcagagttgtggcagatggcactggcacccgcactatcattgtgcctccactgaaaactcagcttggtgactgcactgtagcaacccaggcctcaggtctcctgagcaataagactaagccagtcgcttcagtgagtgggcagtcatctggatgctgtatcacccccacagggtatcgagctcaacgcggggggaccagtgcagcacaaccactcaatcttagccagaaccagcagtcatcggcggctccaacctcacaggagagaagcagcaacccagccccccgcaggcagcaggcgtttgtggcccctctctcccaagccccctacaccttccagcatggcagcccgctacactcgacagggcacccacaccttgccccggcccctgctcacctgccaagccaggctcatctgtatacgtatgctgccccgacttctgctgctgcactgggctcaaccagctccattgctcatcttttctccccacagggttcctcaaggcatgctgcagcctataccactcaccctagcactttggtgcaccaggtccctgtcagtgttgggcccagcctcctcacttctgccagcgtggcccctgctcagtaccaacaccagtttgccacccaatcctacattgggtcttcccgaggctcaacaatttacactggatacccgctgagtcctaccaagatcagccagtattcctacttatagttggtgagcatgagggaggaggaatcatggctaccttctcctggccctgcgttcttaat

SEQ ID NO: 141330 - DNA, 4112 bp, Homo sapiens
  Payload ID: 7781
  Gene Symbol: HIPK1
  Gene Name: homeodomain interacting protein kinase 1
  Uniprot ID: Q86Z02
  ENST ID: ENST00000426820
  CDS Start-End: 344-3976
aaacattaaagcctaacctgaggtaatccctcaccggcagtgaagctcctctgctaggcactgtcgtcccgtacactgcccaagctctgggggtgtcacactaaactgtggtgatgtcacactagctgggatgacattttacagttggatcccgtaccaccgccaggcacctttaaatcaccgcagagtctgcagtgcggagggggcgggaagtccaggccccgcactcgatccacgctggctccctacggaggcccacctactcgaggcccaccgactcctactgcaatcagtactatgcgatcgtcctagagagtccattcagctgcacttccgcctcagtatggcatcacagctgcaagtgttttcgcccccatcagtgtcgtcgagtgccttctgcagtgcgaagaaactgaaaatagagccctctggctgggatgtttcaggacagagtagcaacgacaaatattatacccacagcaaaaccctcccagccacacaagggcaagccaactcctctcaccaggtagcaaatttcaacatccctgcttacgaccagggcctcctcctcccagctcctgcagtggagcatattgttgtaacagccgctgatagctcgggcagtgctgctacatcaaccttccaaagcagccagaccctgactcacagaagcaacgtttctttgcttgagccatatcaaaaatgtggattgaaacgaaaaagtgaggaagttgacagcaacggtagtgtgcagatcatagaagaacatccccctctcatgctgcaaaacaggactgtggtgggtgctgctgccacaaccaccactgtgaccacaaagagtagcagttccagcggagaaggggattaccagctggtccagcatgagatcctttgctctatgaccaatagctatgaagtcttggagttcctaggccgggggacatttggacaggtggctaagtgctggaagaggagcaccaaggaaattgtggctattaaaatcttgaagaaccacccctcctatgccagacaaggacagattgaagtgagcatcctttcccgcctaagcagtgaaaatgctgatgagtataattttgtccgttcatacgagtgctttcagcataagaatcacacctgccttgtttttgaaatgttggagcagaacttatatgattttctaaagcaaaacaaatttagcccactgccactcaagtacatcagaccaatcttgcagcaggtggccacagccttgatgaagctcaagagtcttggtctgatccacgctgaccttaagcctgaaaacatcatgctggttgatccagttcgccagccctaccgagtgaaggtcattgactttggttctgctagtcacgtttccaaagctgtgtgctcaacctacttacagtcacgttactacagagctcctgaaattattcttgggttaccattttgtgaagctattgatatgtggtcactgggctgtgtgatagctgagctgttcctgggatggcctctttatcctggtgcttcagaatatgatcagattcgttatatttcacaaacacaaggcttgccagctgaatatcttctcagtgccggaacaaaaacaaccaggtttttcaacagagatcctaatttggggtacccactgtggaggcttaagacacctgaagaacatgaactggagactggaataaaatcaaaagaagctcggaagtacatttttaattgcttagatgacatggctcaggtgaatatgtctacagacctggagggaacagacatgttggcagagaaggcagaccgaagagaatacattgatctgttaaagaaaatgctcacaattgatgcagataagagaattacccctctaaaaactcttaaccatcagtttgtgacaatgactcaccttttggattttccacatagcaatcatgttaagtcttgttttcagaacatggagatctgcaagcggagggttcacatgtatgatacagtgagtcagatcaagagtcccttcactacacatgttgccccaaatacaagcacaaatctaaccatgagcttcagcaatcagctcaatacagtgcacaatcaggccagtgttctagcttccagttctactgcagcagctgctactctttctctggctaattcagatgtctcactactaaactaccagtcagctttgtacccatcatctgctgcaccagttcctggagttgcccagcagggtgtttccttgcagcctggaaccacccagatttgcactcagacagatccattccaacagacatttatagtatgtccacctgcgtttcaaactggactacaagcaacaacaaagcattctggattccctgtgaggatggataatgctgtaccgattgtaccccaggcaccagctgctcagccactacagattcagtcaggagttctcacgcagggaagctgtacaccactaatggtagcaactctccaccctcaagtagccaccatcacaccgcagtatgcggtgccctttactctgagctgcgcagccggccggccggcgctggttgaacagactgccgctgtactgcaggcgtggcctggagggactcagcaaattctcctgccttcaacttggcaacagttgcctggggtagctctacacaactctgtccagcccacagcaatgattccagaggccatggggagtggacagcagctagctgactggaggaatgcccactctcatggcaaccagtacagcactatcatgcagcagccatccttgctgactaaccatgtgacattggccactgctcagcctctgaatgttggtgttgcccatgttgtcagacaacaacaatccagttccctcccttcgaagaagaataagcagtcagctccagtctcttccaagtcctctctagatgttctgccttcccaagtctattctctggttgggagcagtcccctccgcaccacatcttcttataattccttggtccctgtccaagatcagcatcagcccatcatcattccagatactcccagccctcctgtgagtgtcatcactatccgaagtgacactgatgaggaagaggacaacaaatacaagcccagtagctctggactgaagccaaggtctaatgtcatcagttatgtcactgtcaatgattctccagactctgactcttctttgagcagcccttattccactgataccctgagtgctctccgaggcaatagtggatccgttttggaggggcctggcagagttgtggcagatggcactggcacccgcactatcattgtgcctccactgaaaactcagcttggtgactgcactgtagcaacccaggcctcaggtctcctgagcaataagactaagccagtcgcttcagtgagtgggcagtcatctggatgctgtatcacccccacagggtatcgagctcaacgcggggggaccagtgcagcacaaccactcaatcttagccagaaccagcagtcatcggcggctccaacctcacaggagagaagcagcaacccagccccccgcaggcagcaggcgtttgtggcccctctctcccaagccccctacaccttccagcatggcagcccgctacactcgacagggcacccacaccttgccccggcccctgctcacctgccaagccaggctcatctgtatacgtatgctgccccgacttctgctgctgcactgggctcaaccagctccattgctcatcttttctccccacagggttcctcaaggcatgctgcagcctataccactcaccctagcactttggtgcaccaggtccctgtcagtgttgggcccagcctcctcacttctgccagcgtggcccctgctcagtaccaacaccagtttgccacccaatcctacattgggtcttcccgaggctcaacaatttacactggatacccgctgagtcctaccaagatcagccagtattcctacttatagttggtgagcatgagggaggaggaatcatggctaccttctcctggccctgcgttcttaatattgggctatggagagatcctcctttaccctcttgaaatttcttagccagcaacttgttctgcaggggcccactgaa

SEQ ID NO: 141331 - DNA, 574 bp, Homo sapiens
  Payload ID: 7781
  Gene Symbol: HIPK1
  Gene Name: homeodomain interacting protein kinase 1
  ENST ID: ENST00000514621
  CDS Start-End: 218-574
atctgtacaagggagatctagaggtctggcccaaagggaaacttttgctgccaccactttcaaagctttcgttaaaaaaacaaaagggagggggaaggtggagaaacaaccaaaattctgtcattccaaataaatctaagtgaactattgattttgatacaaagcaacagcctctgccacactgaagaagtgagctttaagcagagactagaagggtatggcatcacagctgcaagtgttttcgcccccatcagtgtcgtcgagtgccttctgcagtgcgaagaaactgaaaatagagccctctggctgggatgtttcaggacagagtagcaacgacaaatattatacccacagcaaaaccctcccagccacacaagggcaagccaactcctctcaccaggtagcaaatttcaacatccctgcttacgaccagggcctcctcctcccagctcctgcagtggagcatattgttgtaacagccgctgatagctcgggcagtgctgctacatcaaccttccaaagcagccagaccctgactcacagaagcaacgtttctttgcttgagccatatcaa

SEQ ID NO: 141332 - DNA, 570 bp, Homo sapiens
  Payload ID: 7781
  Gene Symbol: HIPK1
  Gene Name: homeodomain interacting protein kinase 1
  ENST ID: ENST00000503968
  CDS Start-End: 252-570
gtttgttgtggtgacgagctgtgagcaatggcctgtgtttatgctgggcgagctttctttcctacttggggaggggggttcaggatgggaggatgcgggtagggaagagggggggaaaacccccaagctccacaacattttaagttttttgaagtcattccaaataaatctaagtgaactattgattttgatacaaagcaacagcctctgccacactgaagaagtgagctttaagcagagactagaagggtatggcatcacagctgcaagtgttttcgcccccatcagtgtcgtcgagtgccttctgcagtgcgaagaaactgaaaatagagccctctggctgggatgtttcaggacagagtagcaacgacaaatattatacccacagcaaaaccctcccagccacacaagggcaagccaactcctctcaccaggtagcaaatttcaacatccctgcttacgaccagggcctcctcctcccagctcctgcagtggagcatattgttgtaacagccgctgatagctcgggcagtgctgctacatcaaccttccaaagcagccagaccctga

SEQ ID NO: 141333 - DNA, 8016 bp, Homo sapiens
  Payload ID: 7781
  Gene Symbol: HIPK1
  Gene Name: homeodomain interacting protein kinase 1
  ENST ID: ENST00000626993
  CDS Start-End: 162-3659
gcagagtctgcagtgcggagggggcgggaagtccaggccccgcactcgatccacgctggctccctacggaggcccacctactcgaggcccaccgactcctactgcaatcagtactatgcgatcgtcctagagagtccattcagctgcacttccgcctcagtatggcatcacagctgcaagtgttttcgcccccatcagtgtcgtcgagtgccttctgcagtgcgaagaaactgaaaatagagccctctggctgggatgtttcaggacagagtagcaacgacaaatattatacccacagcaaaaccctcccagccacacaagggcaagccaactcctctcaccaggtagcaaatttcaacatccctgcttacgaccagggcctcctcctcccagctcctgcagtggagcatattgttgtaacagccgctgatagctcgggcagtgctgctacatcaaccttccaaagcagccagaccctgactcacagaagcaacgtttctttgcttgagccatatcaaaaatgtggattgaaacgaaaaagtgaggaagttgacagcaacggtagtgtgcagatcatagaagaacatccccctctcatgctgcaaaacaggactgtggtgggtgctgctgccacaaccaccactgtgaccacaaagagtagcagttccagcggagaaggggattaccagctggtccagcatgagatcctttgctctatgaccaatagctatgaagtcttggagttcctaggccgggggacatttggacaggtggctaagtgctggaagaggagcaccaaggaaattgtggctattaaaatcttgaagaaccacccctcctatgccagacaaggacagattgaagtgagcatcctttcccgcctaagcagtgaaaatgctgatgagtataattttgtccgttcatacgagtgctttcagcataagaatcacacctgccttgtttttgaaatgttggagcagaacttatatgattttctaaagcaaaacaaatttagcccactgccactcaagtacatcagaccaatcttgcagcaggtggccacagccttgatgaagctcaagagtcttggtctgatccacgctgaccttaagcctgaaaacatcatgctggttgatccagttcgccagccctaccgagtgaaggtcattgactttggttctgctagtcacgtttccaaagctgtgtgctcaacctacttacagtcacgttactacagagctcctgaaattattcttgggttaccattttgtgaagctattgatatgtggtcactgggctgtgtgatagctgagctgttcctgggatggcctctttatcctggtgcttcagaatatgatcagattcgttatatttcacaaacacaaggcttgccagctgaatatcttctcagtgccggaacaaaaacaaccaggtttttcaacagagatcctaatttggggtacccactgtggaggcttaagacacctgaagaacatgaactggagactggaataaaatcaaaagaagctcggaagtacatttttaattgcttagatgacatggctcaggtgaatatgtctacagacctggagggaacagacatgttggcagagaaggcagaccgaagagaatacattgatctgttaaagaaaatgctcacaattgatgcagataagagaattacccctctaaaaactcttaaccatcagtttgtgacaatgactcaccttttggattttccacatagcaatcatgttaagtcttgttttcagaacatggagatctgcaagcggagggttcacatgtatgatacagtgagtcagatcaagagtcccttcactacacatgttgccccaaatacaagcacaaatctaaccatgagcttcagcaatcagctcaatacagtgcacaatcaggccagtgttctagcttccagttctactgcagcagctgctactctttctctggctaattcagatgtctcactactaaactaccagtcagctttgtacccatcatctgctgcaccagttcctggagttgcccagcagggtgtttccttgcagcctggaaccacccagatttgcactcagacagatccattccaacagacatttatagtatgtccacctgcgtttcaaactggactacaagcaacaacaaagcattctggattccctgtgaggatggataatgctgtaccgattgtaccccaggcaccagctgctcagccactacagattcagtcaggagttctcacgcagcaggcgtggcctggagggactcagcaaattctcctgccttcaacttggcaacagttgcctggggtagctctacacaactctgtccagcccacagcaatgattccagaggccatggggagtggacagcagctagctgactggaggaatgcccactctcatggcaaccagtacagcactatcatgcagcagccatccttgctgactaaccatgtgacattggccactgctcagcctctgaatgttggtgttgcccatgttgtcagacaacaacaatccagttccctcccttcgaagaagaataagcagtcagctccagtctcttccaagtcctctctagatgttctgccttcccaagtctattctctggttgggagcagtcccctccgcaccacatcttcttataattccttggtccctgtccaagatcagcatcagcccatcatcattccagatactcccagccctcctgtgagtgtcatcactatccgaagtgacactgatgaggaagaggacaacaaatacaagcccagtagctctggactgaagccaaggtctaatgtcatcagttatgtcactgtcaatgattctccagactctgactcttctttgagcagcccttattccactgataccctgagtgctctccgaggcaatagtggatccgttttggaggggcctggcagagttgtggcagatggcactggcacccgcactatcattgtgcctccactgaaaactcagcttggtgactgcactgtagcaacccaggcctcaggtctcctgagcaataagactaagccagtcgcttcagtgagtgggcagtcatctggatgctgtatcacccccacagggtatcgagctcaacgcggggggaccagtgcagcacaaccactcaatcttagccagaaccagcagtcatcggcggctccaacctcacaggagagaagcagcaacccagccccccgcaggcagcaggcgtttgtggcccctctctcccaagccccctacaccttccagcatggcagcccgctacactcgacagggcacccacaccttgccccggcccctgctcacctgccaagccaggctcatctgtatacgtatgctgccccgacttctgctgctgcactgggctcaaccagctccattgctcatcttttctccccacagggttcctcaaggcatgctgcagcctataccactcaccctagcactttggtgcaccaggtccctgtcagtgttgggcccagcctcctcacttctgccagcgtggcccctgctcagtaccaacaccagtttgccacccaatcctacattgggtcttcccgaggctcaacaatttacactggatacccgctgagtcctaccaagatcagccagtattcctacttatagttggtgagcatgagggaggaggaatcatggctaccttctcctggccctgcgttcttaatattgggctatggagagatcctcctttaccctcttgaaatttcttagccagcaacttgttctgcaggggcccactgaagcagaaggtttttctctgggggaacctgtctcagtgttgactgcattgttgtagtcttcccaaagtttgccctatttttaaattcattatttttgtgacagtaattttggtacttggaagagttcagatgcccatcttctgcagttaccaaggaagagagattgttctgaagttaccctctgaaaaatattttgtctctctgacttgatttctataaatgcttttaaaaacaagtgaagcccctctttatttcattttgtgttattgtgattgctggtcaggaaaaatgctgatagaaggagttgaaatctgatgacaaaaaaagaaaaattactttttgtttgtttataaactcagacttgcctattttattttaaaagcggcttacacaatctcccttttgtttattggacatttaaacttacagagtttcagttttgttttaatgtcatattatacttaatgggcaattgttatttttgcaaaactggttacgtattactctgtgttactattgagattctctcaattgctcctgtgtttgttataaagtagtgtttaaaaggcagctcaccatttgctggtaacttaatgtgagagaatccatatctgcgtgaaaacaccaagtattctttttaaatgaagcaccatgaattcttttttaaattattttttaaaagtctttctctctctgattcagcttaaatttttttatcgaaaaagccattaaggtggttattattacatggtggtggtggttttattatatgcaaaatctctgtctattatgagatactggcattgatgagctttgcctaaagattagtatgaattttcagtaatacacctctgttttgctcatctctcccttctgttttatgtgatttgtttggggagaaagctaaaaaaacctgaaaccagataagaacatttcttgtgtatagcttttatacttcaaagtagcttcctttgtatgccagcagcaaattgaatgctctcttattaagacttatataataagtgcatgtaggaattgcaaaaaatattttaaaaatttattactgaatttaaaaatattttagaagttttgtaatggtggtgttttaatattttacataattaaatatgtacatattgattagaaaaatataacaagcaatttttcctgctaacccaaaatgttatttgtaatcaaatgtgtagtgattacacttgaattgtgtacttagtgtgtatgtgatcctccagtgttatcccggagatggattgatgtctccattgtatttaaaccaaaatgaactgatacttgttggaatgtatgtgaactaattgcaattatattagagcatattactgtagtgctgaatgagcaggggcattgcctgcaaggagaggagacccttggaattgttttgcacaggtgtgtctggtgaggagtttttcagtgtgtgtctcttccttccctttcttcctccttcccttattgtagtgccttatatgataatgtagtggttaatagagtttacagtgagcttgccttaggatggaccagcaagcccccgtggaccctaagttgttcaccgggatttatcagaacaggattagtagctgtattgtgtaatgcattgttctcagtttccctgccaacattgaaaaataaaaacagcagcttttctcctttaccaccacctctacccctttccattttggattctcggctgagttctcacagaagcattttccccatgtggctctctcactgtgcgttgctaccttgcttctgtgagaattcaggaagcaggtgagaggagtcaagccaatattaaatatgcattcttttaaagtatgtgcaatcacttttagaatgaatttttttttccttttcccatgtggcagtccttcctgcacatagttgacattcctagtaaaatatttgcttgttgaaaaaaacatgttaacagatgtgtttataccaaagagcctgttgtattgcttaccatgtccccatactatgaggagaagttttgtggtgccgctggtgacaaggaactcacagaaaggtttcttagctggtgaagaatatagagaaggaaccaaagcctgttgagtcattgaggcttttgaggtttcttttttaacagcttgtatagtcttggggcccttcaagctgtgaaattgtccttgtactctcagctcctgcatggatctgggtcaagtagaaggtactggggatggggacattcctgcccataaaggatttggggaaagaagattaatcctaaaatacaggtgtgttccatctgaattgaaaatgatatatttgagatataattttaggactggttctgtgtagatagagatggtgtcaaggaggtgcaggatggagatgggagatttcatggagcctggtcagccagctctgtaccaggttgaacaccgaggagctgtcaaagtatttggagtttcttcattgtaaggagtaagggcttccaagatggggcaggtagtccgtacagcctaccaggaacatgttgtgttttctttattttttaaaatcattatattgagttgtgttttcagcactatattggtcaagatagccaagcagtttgtataatttctgtcactagtgtcatacagttttctggtcaacatgtgtgatctttgtgtctcctttttgccaagcacattctgattttcttgttggaacacaggtctagtttctaaaggacaaattttttgttccttgtcttttttctgtaagggacaagatttgttgtttttgtaagaaatgagatgcaggaaagaaaaccaaatcccattcctgcaccccagtccaataagcagataccacttaagataggagtctaaactccacagaaaaggataataccaagagcttgtattgttaccttagtcacttgcctagcagtgtgtggctttaaaaactagagatttttcagtcttagtctgcaaactggcatttccgattttccagcataaaaatccacctgtgtctgctgaatgtgtatgtatgtgctcactgtggctttagattctgtccctggggttagccctgttggccctgacaggaagggaggaagcctggtgaatttagtgagcagctggcctgggtcacagtgacctgacctcaaaccagcttaaggctttaagtcctctctcagaacttggcatttccaacttcttcctttccgggtgagagaagaagcggagaagggttcagtgtagccactctgggctcatagggacacttggtcactccagagtttttaatagctcccaggaggtgatattattttcagtgctcagctgaaataccaaccccaggaataagaactccatttcaaacagttctggccattctgagcctgcttttgtgattgctcatccattgtcctccactagaggggctaagcttgactgcccttagccaggcaagcacagtaatgtgtgttttgttcagcattattatgcaaaaattcactagttgagatggtttgttttaggataggaaatgaaattgcctctcagtgacaggagtggcccgagcctgcttcctattttgattttttttttttttaactgatagatggtgcagcatgtctacatggttgtttgttgctaaactttatataatgtgtggtttcaattcagcttgaaaaataatctcactacatgtagcagtacattatatgtacattatatgtaatgttagtatttctgctttgaatccttgatattgcaatggaattcctactttattaaatgtatttgatatgctagttattgtgtgcgatttaaactttttttgctttctccctttttttggttgtgcgctttcttttacaacaagcctctagaaacagatagtttctgagaattactgagctatgtttgtaatgcagatgtacttagggagtatgtaaaataatcattttaacaaaagaaatagatatttaaaatttaatactaactatgggaaaagggtccattgtgtaaaacatagtttatctttggattcaatgtttgtctttggttttacaaagtagcttgtattttcagtattttctacataatatggtaaaatgtagagcaattgcaatgcatcaataaaatgggtaaattttctgacttatgtggctgtttttgacttctgttataggatataaaggggatcaataaatgacatctttgaaagtg

SEQ ID NO: 141334 - DNA, 2937 bp, Homo sapiens
  Payload ID: 7782
  Gene Symbol: HIPK2
  Gene Name: homeodomain interacting protein kinase 2
  ENST ID: ENST00000342645
  CDS Start-End: 1-2736
atggcctcacatgtgcaagttttctcccctcacacccttcaatcaagtgccttctgtagtgtgaagaaactgaaaatagagccgagttccaactgggacatgactgggtacggctcccacagcaaagtgtatagccagagcaagaacatccccctgtcgcagccagccaccacaaccgtcagcacctccttgccggtcccaaacccaagcctaccttacgagcagaccatcgtcttcccaggaagcaccgggcacatcgtggtcacctcagcaagcagcacttctgtcaccgggcaagtcctcggcggaccacacaacctaatgcgtcgaagcactgtgagcctccttgatacctaccaaaaatgtggactcaagcgtaagagcgaggagatcgagaacacaagcagcgtgcagatcatcgaggagcatccacccatgattcagaataatgcaagcggggccactgtcgccactgccaccacgtctactgccacctccaaaaacagcggctccaacagcgagggcgactatcagctggtgcagcatgaggtgctgtgctccatgaccaacacctacgaggtcttagagttcttgggccgagggacgtttgggcaagtggtcaagtgctggaaacggggcaccaatgagatcgtagccatcaagatcctgaagaaccacccatcctatgcccgacaaggtcagattgaagtgagcatcctggcccggttgagcacggagagtgccgatgactataacttcgtccgggcctacgaatgcttccagcacaagaaccacacgtgcttggtcttcgagatgttggagcagaacctctatgactttctgaagcaaaacaagtttagccccttgcccctcaaatacattcgcccagttctccagcaggtagccacagccctgatgaaactcaaaagcctaggtcttatccacgctgacctcaaaccagaaaacatcatgctggtggatccatctagacaaccatacagagtcaaggtcatcgactttggttcagccagccacgtctccaaggctgtgtgctccacctacttgcagtccagatattacagggcccctgagatcatccttggtttaccattttgtgaggcaattgacatgtggtccctgggctgtgttattgcagaattgttcctgggttggccgttatatccaggagcttcggagtatgatcagattcggtatatttcacaaacacagggtttgcctgctgaatatttattaagcgccgggacaaagacaactaggtttttcaaccgtgacacggactcaccatatcctttgtggagactgaagacaccagatgaccatgaagcagagacagggattaagtcaaaagaagcaagaaagtacattttcaactgtttagatgatatggcccaggtgaacatgacgacagatttggaagggagcgacatgttggtagaaaaggctgaccggcgggagttcattgacctgttgaagaagatgctgaccattgatgctgacaagagaatcactccaatcgaaaccctgaaccatccctttgtcaccatgacacacttactcgattttccccacagcacacacgtcaaatcatgtttccagaacatggagatctgcaagcgtcgggtgaatatgtatgacacggtgaaccagagcaaaacccctttcatcacgcacgtggcccccagcacgtccaccaacctgaccatgacctttaacaaccagctgaccactgtccacaaccaggctccctcctctaccagtgccactatttccttagccaatcccgaagtctccatactaaactacccatctacactctaccagccctcagcggcatccatggctgcagtggcccagcggagcatgcccctgcagacaggaacagcccagatttgtgcccggcctgacccgttccagcaagctctcatcgtgtgtccccccggcttccaaggcttgcaggcctctccctctaagcacgctggctactcggtgcgaatggaaaatgcagttcccatcgtcactcaagccccaggagctcagcctcttcagatccaaccaggtctgcttgcccagcaggcttggccaagtgggacccagcagatcctgcttcccccagcatggcagcaactgactggagtggccacccacacatcagtgcagcatgccaccgtgattcccgagaccatggcaggcacccagcagctggcggactggagaaatacgcatgctcacggaagccattataatcccatcatgcagcagcctgcactattgaccggtcatgtgacccttccagcagcacagcccttaaatgtgggtgtggcccacgtgatgcggcagcagccaaccagcaccacctcctcccggaagagtaagcacactgtctccaagcaaagaaaaaacgtcatcagctgtgtcacagtccacgactccccctactccgactcctccagcaacaccagcccctactccgtgcagcagcgtgctgggcacaacaatgccaatgcctttgacaccaaggggagcctggagaatcactgcacggggaacccccgaaccatcatcgtgccacccctgaaaacccaggccagcgaagtattggtggagtgtgatagcctggtgccaggtaatttggggccaggacagggcaggaacctctccctggagagtggttttcctgcttttctgctgctagaaatgttgctgtatgggagctagtacaatagaaagtgcccagtgactgcaggcgacccttaccgaggattttattcaagtatccaggggaggcttctgctgaacagcacattgtataagcagcgttttccttctttaatcctgtaatcaatacctctctgcctttacaatggctctgcttccaactaggttgattaatagaaaataaaagcctcctggttcttt

SEQ ID NO: 141335 - DNA, 15049 bp, Homo sapiens
  Payload ID: 7782
  Gene Symbol: HIPK2
  Gene Name: homeodomain interacting protein kinase 2
  Uniprot ID: Q9H2X6
  ENST ID: ENST00000406875
  CDS Start-End: 96-3692
ctcaagatggcagattccgactgaggctgggggggccgagctcgcgcgccgctttcccgtccccgttgccatgaaccgcggacaccccggccccgatggcccccgtgtacgaaggtatggcctcacatgtgcaagttttctcccctcacacccttcaatcaagtgccttctgtagtgtgaagaaactgaaaatagagccgagttccaactgggacatgactgggtacggctcccacagcaaagtgtatagccagagcaagaacatccccctgtcgcagccagccaccacaaccgtcagcacctccttgccggtcccaaacccaagcctaccttacgagcagaccatcgtcttcccaggaagcaccgggcacatcgtggtcacctcagcaagcagcacttctgtcaccgggcaagtcctcggcggaccacacaacctaatgcgtcgaagcactgtgagcctccttgatacctaccaaaaatgtggactcaagcgtaagagcgaggagatcgagaacacaagcagcgtgcagatcatcgaggagcatccacccatgattcagaataatgcaagcggggccactgtcgccactgccaccacgtctactgccacctccaaaaacagcggctccaacagcgagggcgactatcagctggtgcagcatgaggtgctgtgctccatgaccaacacctacgaggtcttagagttcttgggccgagggacgtttgggcaagtggtcaagtgctggaaacggggcaccaatgagatcgtagccatcaagatcctgaagaaccacccatcctatgcccgacaaggtcagattgaagtgagcatcctggcccggttgagcacggagagtgccgatgactataacttcgtccgggcctacgaatgcttccagcacaagaaccacacgtgcttggtcttcgagatgttggagcagaacctctatgactttctgaagcaaaacaagtttagccccttgcccctcaaatacattcgcccagttctccagcaggtagccacagccctgatgaaactcaaaagcctaggtcttatccacgctgacctcaaaccagaaaacatcatgctggtggatccatctagacaaccatacagagtcaaggtcatcgactttggttcagccagccacgtctccaaggctgtgtgctccacctacttgcagtccagatattacagggcccctgagatcatccttggtttaccattttgtgaggcaattgacatgtggtccctgggctgtgttattgcagaattgttcctgggttggccgttatatccaggagcttcggagtatgatcagattcggtatatttcacaaacacagggtttgcctgctgaatatttattaagcgccgggacaaagacaactaggtttttcaaccgtgacacggactcaccatatcctttgtggagactgaagacaccagatgaccatgaagcagagacagggattaagtcaaaagaagcaagaaagtacattttcaactgtttagatgatatggcccaggtgaacatgacgacagatttggaagggagcgacatgttggtagaaaaggctgaccggcgggagttcattgacctgttgaagaagatgctgaccattgatgctgacaagagaatcactccaatcgaaaccctgaaccatccctttgtcaccatgacacacttactcgattttccccacagcacacacgtcaaatcatgtttccagaacatggagatctgcaagcgtcgggtgaatatgtatgacacggtgaaccagagcaaaacccctttcatcacgcacgtggcccccagcacgtccaccaacctgaccatgacctttaacaaccagctgaccactgtccacaaccaggctccctcctctaccagtgccactatttccttagccaatcccgaagtctccatactaaactacccatctacactctaccagccctcagcggcatccatggctgcagtggcccagcggagcatgcccctgcagacaggaacagcccagatttgtgcccggcctgacccgttccagcaagctctcatcgtgtgtccccccggcttccaaggcttgcaggcctctccctctaagcacgctggctactcggtgcgaatggaaaatgcagttcccatcgtcactcaagccccaggagctcagcctcttcagatccaaccaggtctgcttgcccagcaggcttggccaagtgggacccagcagatcctgcttcccccagcatggcagcaactgactggagtggccacccacacatcagtgcagcatgccaccgtgattcccgagaccatggcaggcacccagcagctggcggactggagaaatacgcatgctcacggaagccattataatcccatcatgcagcagcctgcactattgaccggtcatgtgacccttccagcagcacagcccttaaatgtgggtgtggcccacgtgatgcggcagcagccaaccagcaccacctcctcccggaagagtaagcagcaccagtcatctgtgagaaatgtctccacctgtgaggtgtcctcctctcaggccatcagctccccacagcgatccaagcgtgtcaaggagaacacacctccccgctgtgccatggtgcacagtagcccggcctgcagcacctcggtcacctgtgggtggggcgacgtggcctccagcaccacccgggaacggcagcggcagacaattgtcattcccgacactcccagccccacggtcagcgtcatcaccatcagcagtgacacggacgaggaggaggaacagaaacacgcccccaccagcactgtctccaagcaaagaaaaaacgtcatcagctgtgtcacagtccacgactccccctactccgactcctccagcaacaccagcccctactccgtgcagcagcgtgctgggcacaacaatgccaatgcctttgacaccaaggggagcctggagaatcactgcacggggaacccccgaaccatcatcgtgccacccctgaaaacccaggccagcgaagtattggtggagtgtgatagcctggtgccagtcaacaccagtcaccactcgtcctcctacaagtccaagtcctccagcaacgtgacctccaccagcggtcactcttcagggagctcatctggagccatcacctaccggcagcagcggccgggcccccacttccagcagcagcagccactcaatctcagccaggctcagcagcacatcaccacggaccgcactgggagccaccgaaggcagcaggcctacatcactcccaccatggcccaggctccgtactccttcccgcacaacagccccagccacggcactgtgcacccgcatctggctgcagccgctgccgctgcccacctccccacccagccccacctctacacctacactgcgccggcggccctgggctccaccggcaccgtggcccacctggtggcctcgcaaggctctgcgcgccacaccgtgcagcacactgcctacccagccagcatcgtccaccaggtccccgtgagcatgggcccccgggtcctgccctcgcccaccatccacccgagtcagtatccagcccaatttgcccaccagacctacatcagcgcctcgccagcctccaccgtctacactggatacccactgagccccgccaaggtcaaccagtacccttacatataaacactggaggggagggagggagggagggagggagagaatggcccgagggaggagggagagaaggagggaggcgctcctgggaccgtgggcgctggccttttatactgaagatgccgcacacaaacaatgcaaacggggcaggggcgggggggggggggggggcagagggcagggggacgggtcgggacaccagtgaaacttgaaccgggaagtgggaggacgtagagcagagaagagaacatttttaaaaggaagggattaaagagggtgggaaatctatggtttttattttaaaaaagaaaaaggaaaaaaaaaaagtcaataacaaaaaacccagctcaagaacccattctacgccaaactggaaaggagaagagagcaacaggaagattccagaaacggggggccccagtttttgaagaactttatgaacttttcaaagattattttcatatggcagcaagtgatacggaagactgctgtcagggacacctgatatggaaatcaaatagatttttaattaattgaacataagatttagggatttttccagaactcgaaagggtcaacagccctccagaatgtcgggctgcagcctgaggaggctgatgtttggagctggtgtgggattggcgaagcccagtccgggctccctagtcaggaaagacgggggacggccaggctgctggaaggcccccgggggcgcggggcgagttttctttttctgagcactctggataaatccctaagcaacgttgtttctcaaatgtcattaataatgtgtgttgcaaactttaggtttttttcttttctgaaaatgtattttctctttgaatccacccctagtcgcgtagcgtagggctagcggtcgtcacagacaccctagtagaatgtagcactcagcacccttgtctcctaccttgtgttcaactccaatgataccaatagaatattcctcaatgtaattgcacaaaaaaaagcgatataacataggcatgtaaccaatgtggcggtgcaggtgtgcgggtgagcgagcacgtgtgggtgtgcacgcgccgccctccccgcgtggccctcggcgccgccaccctagctggcgcagtcttgacactgcatccttccctcctagtgccttaccgagcgacagacgcggcgtgagggtttacttccactggtactccaagaaactgaggctagtcagacacaatctcagctcttctgttgtgctgttgtaacagtttacgctggccttttttttttctttttctttttctttttaaaatgttaatgcccgttgtctttcctgggctgtttgctagcggaaggatgccagggaagccagcaggagctaggagagagtccgtggatctcgaaagaaatatgggagacagatgcccggcgggtgcgtctggagatggggacggcgggagttgagttgtggcagtagttgagttgtaatttgtgggcggaggcccagagagactccccacccttcacccctgccccactctgtccccagttccgccatttgtgaggccagaggtttccggactgttggcctcgccaggcagccgtctcccgccccaggcggcatcccccagtccctcccgcctccacgagagcctggagctctcagcctcgcccggggctccactctctcctccggctccctgggctgttttgctctaacgatcttgccagatccctccctctgtagacaaccaccaacctctgtttgctgttgaattctctcctcacattacccaggtctgctcaagacatgattttggttttggtttctgagggttctagtgggcagaaggttggagggacacttatgagggtggccgggggtctgacgctgcactttggaaaaactcacacagttgaatttccaaagaaatctgccctttgccctctttgcacctttgatacattctggaagttttctcaggctttggacacttctggggatggaggtgtggagaagtggggagttccctctcttcatagtaaataactctgaaatatgtgaatgtgaatggcaggagaatctggccaaggatggggccgaaaagggtggttctaattgtttgcttctgatgttgagtctttagctgaccccacaggcaggtttccaaggtgcaaagagatctttcccgagtcagcggccccatcctcatcctccctccctttacttcctcactgtgcagtctccctcaaggatctactgtgaaaggtgtgtttgtagtgatatccaacctaactcagtaacgaagtcgttacttagctcttagctgtgaaataactctggaaacttccccaccccaaccataaattcttacttataaagaaacaggtccccaaactggaaacagcttagtccaggcctcagcgagaaggaaggacaccatgactgctccatgctgggcacagccgggcagtcttgccaagtgcctgctggaggctgtgccggcaagaggcctgcagcaaggagattcccttccctcgggccattatcaatactgtctttatctggaggtggggaagcgcagccctctgagacagcaggacaatggtcagttcagagagggtgagggcagcaaacgcttcagaggacacagaagccagaggacccccccccgccccacagctgggtcagcctggaaaatccatctattagggactttttggcagccagatggcagcaatagcccattaggtctcatcccgagttccaagtcttggctgcaaatgagcctcagttcgccttactggagagcacccccagattcctgggcacagttcatttccagccctttctagatctgatcttttagggggaaagacagcttaaaatgttcttttcattttaaagaaaattattctgtctgcttaagttggaggctacttactctttcacctgacattttctttccttttattcttccagatcaggaatgaaatttccatgctgctcataaagataatattattgtactaattatttttattaccattgtaattatgatcattatgttgatattttagtcagggttttaaatgcacatttattccaagtatctttgtgttttctctttaatatttaaacttattctctctgtgagtatataagtagactggagggacatccagatgtccagttttgtcaggcaaaaaaaaaaaggaaagacttaggaagtaggaaaattgtttctgtcatctctatcccaacaagagacgtcaagaaagatccaccacagaacaaaagtttaaagaagaatcaaagccttgattgggcttctgacaacatggtcaccatcaaggttgtcattttctagatcccagaggcctgggatgcgacgtcaggtggcatctcatgggctcggggaatgtcgagtcactgactgtccagcccttagccagcttctctcccacatcctcagagctctcctgtgcttctgaaatctgttaactaaatctttggcttgcctctggtatttaagcaagaaaattccctcccagaggtgaccccatccgcttccccacaatccatccttttgccatcggcgcacctggggcgtggcttaggttcttcaatgcagggacatttgccccctcccagaagctgctgggcacagtgaggtggcgtaagagtgactggcaggtggtaccttccccaggaaatttcaccacaccacccagttcctcagcctgccccctccccctgtgatgcatgcccccagcacccaattctagccagctggaagtgggtggagggacagcaggaggccagagaaaccctgaacaaagctgggcggctgctcaggcatcacaggctgcaccccctctgaaagcatccccactgggctccggccacatcttcagtgcactgtgctgtgtgcgctgggtgctcacacgctgtccccagacccacaaagtgctaggccccagttgaagaaaggggtgaaatagccagcttcaccgaagggaagggaagggaagtattgggcgatgccagccccacagacgctcagcaaacattagtgcacattctcctagtcctcacccaatggcctcctctacccccatgcatggagctgccacatcagaagccccaagagaagctccctgcaggagaggccagctccctggatgcccaattgcatacctggccgaatctgccattgagtcaccttagcaaataggctgctgtcactaggaccaagctctcaagcagagggatgccaacctagtccttacttagcccacgaatcatctagagcatcctctagtcttttgtgggctccctccttcccatttgaagagacattgttcagaggaagaggggaagatttgaaatgtcaggtcacggaggagtgtttaactggagcctggtgaaccgcagggcaatttgcttctgctcactgggttctgactggcccgtctggacgtgggcccccatgtctctgtgcttagggcctcttcatgatgttttggatgtttccaagggaagtgggtgagcagatcaaggggtgggagagtcgaggcttgatgccagttaatactgtgaagtggagcgtgcggtcagtggaattcagaggaaaaagaagggttggagcaaagcggcattcatctcctggactgttagcctttctagtcttcctggtggctgaggtgttcacgggctgggggagccagctgacctttgtcctcttcaacctagaagactcagcccgcccagacaccaacgtgtgagacggatggacatcaggaagggaaggggagattagcccaactgctgacagaacgatttcccttggttggaccttgggaatggcaaacactcatattggaacaagcttggggtggaagatttaggccgtgtgagcatgtgtgagtgagtggaacaaactttcttggaaactggagggaggagatgaggaggcttcgggaagtattactgatggctcatggttgagagagcgacgtggggacccagctcgccccagcttttgtcccaggttctctttgtctgatgctgagggcagggtggggtgtgggaccaccactcttgttggcctgtcaagtagaccctaggacagaaaatggaaagaaggaaatggctcggtgctctcaactagcagagagaattgaggagaggtaagggttccttctgcaggccagcctgggactccacagcgccagcaggagtgacttggccacaagacattccagccccagggactttgcaggcttcattccctgtctgtgtcttttccttctggtgtgttttacagacttctgatggggaagcttcaaacttgagcaggccagagatgtccttaccaaattggaaaggaaggtgaaactgttcctttctttagccaaagaacccttctcaaagacgcctccagaaatggacaaaatggccttcccttcgttcctttccaggcaataatgacatcattagtgatgcaattctatttgtctttctctttcctctctgtccttttttttaaaaaaaaaaaatgcatttatttcaaaactgtgctattcttttaagaggagtggaggtgaccccttcgatgctgctgctatcgggagacaaggtgccataccaatacgtgggcttgactaatcccaggccaccatgggagagagcaaagcagggctgccaggagttcagttgcatcaagggcgtagagcacgcgggggctgggctcggaatagcagtacttttccactttgatgccttagaactctcacttctcatctccacagaccagactcagtaaaatctcaggccactagagaatggaaggcggtgaaacaggatttaaatgcaaaaaaaacctattggaggcttttggcaccgtggctcactagagggacccagcatagtagaggtttctcttgttgcagcttctgaaaagttcaaaaaagaactccaggccgttcttccctcaaacccagtgagagtttgcagagaagtgccccctgcagggctcccgtcccagaacaccagcaccagagagggtcttcccgatgccccccgctggacttgcccaagcctctgggagcccctcatctcagatccctgtgttgaacatgacactgactgtcccttatttgttaaaatttgcaatatctctcaagtaaataatagccaacatttgttgaatgctttcatgactcccgggctaaggcctttatgagcgttgtctcaaggggccccaacagccatcccacagggagggggataacagcccccatttatagataagggagctgaccggatgctctgagaagtggcaggtgttgaaggaaggataaagcagtgatgggccagaatccccaaggttcccttttttgttcatcaggcccttcctgagatgtgatttttaatcttttaactttttttaattaatagcaatgcgtggcctcatatttctatgaaccatttagtgatactcccgcttcctgcatgccacacactgtgctgggaattgctcatgggttgtcctgtttcatcttctccgtagccctgtgagatcggcaatattagtccccctacagccaaggaaactgcccagagccacacaactcttgaggggcgaggagggcttgaacctgagtctgcccagctccagaactgagcttgcagccattagccacagctgtctcctgcatgtctgagcaaagaaaggcctttacacagcatcaccctgtgccatcccatgcaccgtgggactcagctaaaggactgtgcaaagagggggctcctgagttggatttaggcaaaaggggcagaattcgtttgatttttagagaaaatctctggagagtttcttttgattcatagaattccttttagatttctttccagcataccaactagctttagtagtgctgctacaaccagctcttataagtaagagtgaaaaagtattcttttcttctttaaaaaataagtttttcttgcttatagttaattctagaaaggcaatactaaaggtatatatttttttcaaaatgctattttttactgcacttgataattatcctgacagctctgatctctgtaatagattcactcttcagctctgggcagaaccagaggcagggttcacaccaaatttgtaaataccatatgtgggtctggtgtccaggaacttttttctttctgttaaaaaaaagaaaaaaaaaagaaaaaaaaaaagaagtagaggtggaagaaagacaagacttagaggaacaaaagaatgttttcttttgagatactcttctcaaagaaatagcaacaattgtataaacaggaaaaccagccagctttcatgataaaaggaaggcgtgtctcttgccctggtatgagattaacagaaatacagatgcatttttattttgattgaaagatggtgagaatgtagaaatgcttaggactagatttttaattttttaaaataactattatcatttattatgaaatatttgttcagttgttttgagtgggtttcttgttccttttttcatttaaaaccttctttgttgactggctccaggcttgtttgcctaaattcttaggtagtttacacaagttctagaatcttttagaactttaactccattggaagcaaacctaactaatcggagtttgagatcctggttggtttcaataggtattctggaattctggcagaacacctaaagattttttttttttttagaaggttttagatacattatcttacacaaactgtgacctaatggcaataattacctcaaatgtgggcattcatcctggttttagccttttttgaaatcatgtagccagcttgatcttggaatttaaagactatgaattctctgtgggctgaaaataatgattacttcatacccccggtcatcgttgcttaagtgaattctgaaaatagctcatctttacaacaaaaattaaaccaaggaagagattattctttgtgtgttgtactcaaatgcgatgttcaaatgcacatgttaagtatatatgtttttagctactgtaaaatgctgttagccttctaagctatcaaaacagtcacattttaaatgagtaaactaaacaattgactgtggatacttaagcatatttctggctacgttttatagttaaagtgttttatagtttacatttagactggtactttttaaagaaaagttctgtttataactgacatccgcaaaccccagtgaatgcctcttagttggaggttgtgtctcccccaaggcaagtgtgttgtcccagactcttctgtagtccagcatgcgcacttccctctggattattactttccacgtgaactcaagagaacatgaaaggcaatccagatggagggaaaaggtgtgagtccgcagcccgggccagatgcgaaggtctcatgcgtgtcgtctaaacacttgtcttcaaggccttctctctgacatcttggaagagtcattgagaacagataacctggttcattgatttttgtcttgatttgaatatttaacttattaatagatccactgatttccaggcaccaggcagtagaagagactgggattcaggtgaccatgaaggcacagctgctacttctgggccgggggtgatattttgatcagcgttttgtaggggaggaccatatacccctattcccatggtcgctggctgggttttccatatatctgctgtcatttattcgttttccccttaaaagcaaaatcaatgtaaaaggctatgtttacgttttactcattgtccagcttagactcaaagtctagttcggtgggagggggaccttagcatcctctcagagatggtcagggctgagcaggaggaggcagagacagaggggcagctcagcctggtccattgagacccactctaaacagacatcatatttggaacaagaagatgcttcgagacaggaatgggccccactgtcatgcagaaacagactgggggaatggcagtttccctgagtcttggtttcttttatgttttctcttgtgccaccaccaaactgcagaggacctgctgtgacctaaagggcattcctttagcagataagaccttgaaaactgcaaaacacctgggaccagggagcttttaaaaaatacaaaaaaataccacatttgctttttccctgtgaactgtattgacagcgtgttcttaggacagtcttttggtggaaatgttactgtaaaatagttttcatctcacccctcctaatcatactcccactttcctgtttgtgtggtggtgttgctgttttttcctttacatgaattaaccaaatgaattttgtgtcattgtttttggggcttatatttttaaaacatagaaattgccttttgttcatttgaaaagtaagtatgttgtatctgaaaaagggctctgcctctgctctccctcgcttccttgtaaccaatctccaaacgaatctctcctggcaccgcccccttccttatatagggtcactgtccccggggccacctctgcctccaccctgctgtcaccactgccctgggccaaggcacccaggactcccagaaagcgcgagagccagcaagaaggccccactcagccttgagactggtggtcacacctccctgtcagagtcgcctgctgggctgaaggggcaatggattgtcattgttgaaattgtttggctcaggttataaggaggaacttgggaagtagaaagtgacttgaccatgtgcatccttggtagcttcctgtaactaacaaatggaacagagagcacacccccgccccgccccaccccaagcagatgttcccgtcagcgctgccctgagtcagtcggtcccccgtttctgctctcctcccttttgtgttcctgctcacttcaagcttcttccatggactttccagggcacagtcatctctagcccccaaatcatctcttcatcctctgtgtgtgcatttttttaaccaaatgaaatagacaagaaagtcatactttggggcagcagaatttctaatttagtagaatcactgtatagagatagatgttgatatatatgtttgtgtatatatatcaaaccaaattggataggagaagtatagctttacagatgaggagaaggagctctttagaggtcggagtcaagactggtgtcttggacgtgcatgggctgtgtcccaggccactccgcacacatggggctgaggcgtggcgccgggcccttgtcatccacctcaccacggcagagccagcaggccctgtagggtgctgctgctgtctcactgggtcccagcttcaagcgcatcagtgggtgacgggggcaacaaatcagagtgactggaagtttccatcccgttttgctttgaccacgtgtactgagctgcagcctctgatactctgtcacgtttccaaaaatggtatccattaggatagaaagagaatggatctgcagaaatgtttacctttcaactgctcatgaattcaggacactggatagaaagactcactccccaaaatgagaacagggaagaggagacccggcgacactaagtcaccaggtccaaggaacgtggctccctccccagggtcatctcacctagatctttctctcccaggtcatctcagctcaatctcaataaccctatgaaagccctggtctgttgtgttccttcaccgtacggtttctgtaataaaaagtgttaatccatgttaatctgtgtgaaaattattgcgtgcaacagtattttctcgtgtacctctttttcctatgtgaattgtccctcttttttatttataaatgtctacttttgtttttttaaagacaaaccaatgtgttgtagacctatatgtaacctattccttagtctcatattataggtatgttataagaatggatattttacttggctttagaatgttttacaagaaaactaattcttaactgatcaagtccttgctactaaaatgcttgtgtttttcatcatgacgtcgtgtgcttctaaattaatcattttcgttgtagaaaaatggagtgaatttatattagtcttggaaactaataatagcattgtaaatttatgagatgattttaacagaaaaaatatagaagaatatagttattttaattgtaatattactaactgtagggtgagaaaaaggggggggggtcccattgtggtgaactatgttatagcttgttactcatagtttctttttgatcattttttcggtctccgaggtgaaatgacttattaattaaaatttgtaaactcacatatgcatattgtatatgtgtagaaatgtaatcacactttgtcttggaattacattaaactgtttgaaatcactgta

SEQ ID NO: 141336 - DNA, 3969 bp, Homo sapiens
  Payload ID: 7782
  Gene Symbol: HIPK2
  Gene Name: homeodomain interacting protein kinase 2
  Uniprot ID: Q9H2X6
  ENST ID: ENST00000428878
  CDS Start-End: 156-3671
cacgggaggcggtgatgcgggcgcgggcggcctcggctgcgccgagagcggagacacaggctcaagatggcagattccgactgaggctgggggggccgagctcgcgcgccgctttcccgtccccgttgccatgaaccgcggacaccccggccccgatggcccccgtgtacgaaggtatggcctcacatgtgcaagttttctcccctcacacccttcaatcaagtgccttctgtagtgtgaagaaactgaaaatagagccgagttccaactgggacatgactgggtacggctcccacagcaaagtgtatagccagagcaagaacatccccctgtcgcagccagccaccacaaccgtcagcacctccttgccggtcccaaacccaagcctaccttacgagcagaccatcgtcttcccaggaagcaccgggcacatcgtggtcacctcagcaagcagcacttctgtcaccgggcaagtcctcggcggaccacacaacctaatgcgtcgaagcactgtgagcctccttgatacctaccaaaaatgtggactcaagcgtaagagcgaggagatcgagaacacaagcagcgtgcagatcatcgaggagcatccacccatgattcagaataatgcaagcggggccactgtcgccactgccaccacgtctactgccacctccaaaaacagcggctccaacagcgagggcgactatcagctggtgcagcatgaggtgctgtgctccatgaccaacacctacgaggtcttagagttcttgggccgagggacgtttgggcaagtggtcaagtgctggaaacggggcaccaatgagatcgtagccatcaagatcctgaagaaccacccatcctatgcccgacaaggtcagattgaagtgagcatcctggcccggttgagcacggagagtgccgatgactataacttcgtccgggcctacgaatgcttccagcacaagaaccacacgtgcttggtcttcgagatgttggagcagaacctctatgactttctgaagcaaaacaagtttagccccttgcccctcaaatacattcgcccagttctccagcaggtagccacagccctgatgaaactcaaaagcctaggtcttatccacgctgacctcaaaccagaaaacatcatgctggtggatccatctagacaaccatacagagtcaaggtcatcgactttggttcagccagccacgtctccaaggctgtgtgctccacctacttgcagtccagatattacagggcccctgagatcatccttggtttaccattttgtgaggcaattgacatgtggtccctgggctgtgttattgcagaattgttcctgggttggccgttatatccaggagcttcggagtatgatcagattcggtatatttcacaaacacagggtttgcctgctgaatatttattaagcgccgggacaaagacaactaggtttttcaaccgtgacacggactcaccatatcctttgtggagactgaagacaccagatgaccatgaagcagagacagggattaagtcaaaagaagcaagaaagtacattttcaactgtttagatgatatggcccaggtgaacatgacgacagatttggaagggagcgacatgttggtagaaaaggctgaccggcgggagttcattgacctgttgaagaagatgctgaccattgatgctgacaagagaatcactccaatcgaaaccctgaaccatccctttgtcaccatgacacacttactcgattttccccacagcacacacgtcaaatcatgtttccagaacatggagatctgcaagcgtcgggtgaatatgtatgacacggtgaaccagagcaaaacccctttcatcacgcacgtggcccccagcacgtccaccaacctgaccatgacctttaacaaccagctgaccactgtccacaaccagccctcagcggcatccatggctgcagtggcccagcggagcatgcccctgcagacaggaacagcccagatttgtgcccggcctgacccgttccagcaagctctcatcgtgtgtccccccggcttccaaggcttgcaggcctctccctctaagcacgctggctactcggtgcgaatggaaaatgcagttcccatcgtcactcaagccccaggagctcagcctcttcagatccaaccaggtctgcttgcccagcaggcttggccaagtgggacccagcagatcctgcttcccccagcatggcagcaactgactggagtggccacccacacatcagtgcagcatgccaccgtgattcccgagaccatggcaggcacccagcagctggcggactggagaaatacgcatgctcacggaagccattataatcccatcatgcagcagcctgcactattgaccggtcatgtgacccttccagcagcacagcccttaaatgtgggtgtggcccacgtgatgcggcagcagccaaccagcaccacctcctcccggaagagtaagcagcaccagtcatctgtgagaaatgtctccacctgtgaggtgtcctcctctcaggccatcagctccccacagcgatccaagcgtgtcaaggagaacacacctccccgctgtgccatggtgcacagtagcccggcctgcagcacctcggtcacctgtgggtggggcgacgtggcctccagcaccacccgggaacggcagcggcagacaattgtcattcccgacactcccagccccacggtcagcgtcatcaccatcagcagtgacacggacgaggaggaggaacagaaacacgcccccaccagcactgtctccaagcaaagaaaaaacgtcatcagctgtgtcacagtccacgactccccctactccgactcctccagcaacaccagcccctactccgtgcagcagcgtgctgggcacaacaatgccaatgcctttgacaccaaggggagcctggagaatcactgcacggggaacccccgaaccatcatcgtgccacccctgaaaacccaggccagcgaagtattggtggagtgtgatagcctggtgccagtcaacaccagtcaccactcgtcctcctacaagtccaagtcctccagcaacgtgacctccaccagcggtcactcttcagggagctcatctggagccatcacctaccggcagcagcggccgggcccccacttccagcagcagcagccactcaatctcagccaggctcagcagcacatcaccacggaccgcactgggagccaccgaaggcagcaggcctacatcactcccaccatggcccaggctccgtactccttcccgcacaacagccccagccacggcactgtgcacccgcatctggctgcagccgctgccgctgcccacctccccacccagccccacctctacacctacactgcgccggcggccctgggctccaccggcaccgtggcccacctggtggcctcgcaaggctctgcgcgccacaccgtgcagcacactgcctacccagccagcatcgtccaccaggtccccgtgagcatgggcccccgggtcctgccctcgcccaccatccacccgagtcagtatccagcccaatttgcccaccagacctacatcagcgcctcgccagcctccaccgtctacactggatacccactgagccccgccaaggtcaaccagtacccttacatataaacactggaggggagggagggagggagggagggagagaatggcccgagggaggagggagagaaggagggaggcgctcctgggaccgtgggcgctggccttttatactgaagatgccgcacacaaacaatgcaaacggggcaggggcgggggggggggggggggcagagggcagggggacgggtcgggacaccagtgaaacttgaaccgggaagtgggaggacgtagagcagagaagagaacatttttaaaaggaagggattaaagagggtgggaaatctatggtttttattttaaaaaa

SEQ ID NO: 141337 - DNA, 7408 bp, Homo sapiens
  Payload ID: 7783
  Gene Symbol: HIPK3
  Gene Name: homeodomain interacting protein kinase 3
  Uniprot ID: Q9H422
  ENST ID: ENST00000303296
  CDS Start-End: 306-3953
cctcgccctagccaagccgtccccaccccaaatccccgggaaggaagatgagggagacgggcccggcgcttagcagccagagcagcagcagcagcagcagcggtcgggggagggtgtttcgccgtttcctctcagccgccaggacaagatggcagcggccgcggagaggggctgagcccgggctgggtggtgccgcctgctgaagcgcctggctcccggtccccggcacggccctgcgccccaccccggacatgctcagggctgcggccgcccgaagaggagagagcgcgggcctctaggaaggtatggcctcacaagtcttggtctacccaccatatgtttatcaaactcagtcaagtgccttttgtagtgtgaagaaactcaaagtagagccaagcagttgtgtattccaggaaagaaactatccacggacctatgtgaatggtagaaactttggaaattctcatcctcccactaagggtagtgcttttcagacaaagataccatttaatagacctcgaggacacaacttttcattgcagacaagtgctgttgttttgaaaaacactgcaggtgctacaaaggtcatagcagctcaggcacagcaagctcacgtgcaggcacctcagattggggcgtggcgaaacagattgcatttcctagaaggcccccagcgatgtggattgaagcgcaagagtgaggagttggataatcatagcagcgcaatgcagattgtcgatgaattgtccatacttcctgcaatgttgcaaaccaacatgggaaatccagtgacagttgtgacagctaccacaggatcaaaacagaattgtaccactggagaaggtgactatcagttagtacagcatgaagtcttatgctccatgaaaaatacttacgaagtccttgattttcttggtcgaggcacgtttggccaggtagttaaatgctggaaaagagggacaaatgaaattgtagcaatcaaaattttgaagaatcatccttcttatgcccgtcaaggtcaaatagaagtgagcatattagcaaggctcagtactgaaaatgctgatgaatataactttgtacgagcttatgaatgctttcagcaccgtaaccatacttgtttagtctttgagatgctggaacaaaacttgtatgactttctgaaacaaaataaatttagtcccctgccactaaaagtgattcggcccattcttcaacaagtggccactgcactgaaaaaattgaaaagtcttggtttaattcatgctgatctcaagccagagaatattatgttggtggatcctgttcggcagccttacagggttaaagtaatagactttgggtcggccagtcatgtatcaaagactgtttgttcaacatatctacaatctcggtactacagagctccagagattatattggggttgccattttgtgaagccatagacatgtggtcattgggatgtgtgattgcagaattatttcttggatggccgctctacccaggagccttggagtatgatcagattcgatacatttctcagactcaaggtttgccaggagaacagttgttaaatgtgggtactaaatccacaagatttttttgcaaagaaacagatatgtctcattctggttggagattaaagacattggaagagcatgaggcagagacaggaatgaagtctaaagaagccagaaaatacattttcaacagtctggatgatgtagcgcatgtgaacacagtgatggatttggaaggaagtgatcttttggctgagaaagctgatagaagagaatttgttagtctgttgaagaaaatgttgctgattgatgcagatttaagaattactccagctgagaccctgaaccatccttttgttaatatgaaacatcttctagatttccctcatagcaaccatgtaaagtcctgttttcatattatggatatttgtaagtcccacctaaattcatgtgacacaaataatcacaacaaaacttcacttttaagaccagttgcttcaagcagtactgctacactgactgcaaattttactaaaatcggaacattaagaagtcaggcattgaccacatctgctcattcagttgtgcaccatggaatacctctgcaggcaggaactgctcagtttggttgtggtgatgcttttcagcagacattgattatctgtcccccagctattcaaggtattcctgcaacacatggtaaacccaccagttattcaataagggtagataatacagttccacttgtaactcaggccccagctgtgcagccactacagatccgaccaggagttctttctcagacgtggtctggtagaacacagcagatgctggtgcctgcctggcaacaggtgacacccctggctcctgctactactacactaacttctgagagtgtggctggttcacacaggcttggagactgggggaagatgatttcatgcagcaatcattataactcagtgatgccgcagcctcttctgaccaatcagataactttatctgcccctcagccagttagtgtggggattgcacatgttgtctggcctcagcctgccactaccaagaaaaataaacagtgccagaacagaggtattttggtaaaactaatggaatgggagccaggaagagaggaaataaatgctttcagttggagtaattcattacagaataccaatatcccacattcagcatttatttctccaaagataattaatgggaaagatgtcgaggaagtaagttgtatagaaacacaggacaatcagaactcagaaggagaggcaagaaattgctgtgaaacatctatcagacaggactctgattcatcagtttcagacaaacagcggcaaaccatcattattgccgactccccgagtcctgcagtgagtgtcatcactatcagcagtgacactgatgaggaagagacttcccagagacattcactcagagaatgtaaaggtagtctagattgtgaagcttgccagagcactttgaatattgatcggatgtgttcattaagtagtcctgatagtactctgagtaccagctcctcagggcagtccagcccatccccctgcaagagaccgaatagtatgtcagatgaagagcaagaaagtagttgtgatacggtggatggctctccgacatctgactcttccgggcatgacagtccatttgcagagagcacttttgtggaggacactcatgaaaacacagaattggtatcctctgctgacacagaaaccaagccagctgtctgttctgttgtggtgccaccagtggaactagaaaatggcttaaatgccgatgagcatatggcaaacacagattctatatgccagccattaataaaaggacgatctgcccctggaagattaaaccagccttctgcagtgggtactcgtcagcaaaaattgacatcagcattccagcagcagcatttgaacttcagtcaggttcagcactttggatctgggcatcaagagtggaatggaaactttgggcacagaagacagcaagcttatattcctactagtgttaccagtaatccattcactctttctcatggaagtcccaatcacacagcagtgcatgcccacctggctggaaatacacacctcggaggacagcctactctacttccatacccatcatcagccaccctcagtagtgctgcaccagtggcccacctgttagcctctccgtgtacctcaagacctatgttacagcatccaacttataatatctcccatcccagtggcatagttcaccaagtcccagtgggcttaaatccccgtctgttaccatccccaaccattcatcagactcagtacaaaccaatcttcccaccacattcttacattgcagcatcacctgcatatactggatttccactgagtccaacaaaactcagccagtatccatatatgtgaaaaacagtatattggggaagctcaatgatacaaacatttgattaaaaataaaaacatggtatttaatattagccatggcacaagaaaattatttttgaatcatgtagacttgggtgcaatttaaacaactttgagctttaaaaactcacttttgatgtgttttgcacatttggtataacttgtctttggtcatgttatcttcttatgtagtaactctagacaggtgacttatgggagcagaagtccagttttgctcctgctattttttataaattgccttctaactagtgcaagacacgtctacatttgggaagccattctgtgtacagacttagagcaacagatgcacatatgtcagaattacagcatacaagtgaattgtattatccgtgtcttagtgtataaatgttgggtcacttacctaagaaattgagctattgttctttacatttgcatgtgtcttttgcatgggcaaaatgttgcctagactttgctcttaaatgttgttctaataatctcagctgcattgtaaaccgttcctacacatagtgccttaaatatttgaggttgttaatgttattacctatatataaatgttgaggactgcagcacttaaaattcagacctactatttagtttccttttgatagcgtaatgttcatttttgtttttgtgtggtatgatttcaggtagtagctgtttttttccttattaagagggcagcatgtttgctatagctgaattctgctgtctgatttttcagaatgatctagcttcaagaaaagcaagcagttagtagtgcttaagaaaaattgattcagtatctaatggatagttgataactgtcacagcacagcattttatatactgttaagtgaaactgcaatacaatctaagtttattttgagagtgtttgctgtataattggacttaataaaatgtttagaggtacagtaggcatgactttgggtagataataaaatgcaaaatgctcattgattcatgatgtggttttatcttagcttgggcaaaccatgcagtatttaataaatagtagcagaacttttactattgaagcttgaaaagatgtgagttctttgtgtgcaatttttgatttatgcatgtgagagggttttttttttttttaagtatttttacattgcagtacttgttttgcttgttggtgatgtttgcttatttaatacattccgtcagggacagaaattacatgcttttttttctttctaggaagtgtgttgagttccccccttccccgacatttttttcttttttgggtggtggtgatggtagtggttatgtctgtttaaatgaagttgcttttacagcaccaaagacttaatcatccatttcctatataaaggtagctactttttgcatagacctcaagtatattgtagtgtaaaggtggaatttaaggaaaggtattaaattgaggctgtgttttagcttacaggcaagtaataaattgtatcatttatcttgaatgtatcatagataagctgctatataacgattgccacttcagatagctgtgaaattaggtgattaactagttgttatttagccttctaatttctgtataagtctaattacatgaatagaaattggggttttgattttttactttgcttttctgtttggagtgtcattgtaactactgtattgtaaatggtggaaaataattgcatttgttactttggggtgtgttatttgcatcagtattttatctctattaatgtttgtgctcatcactgcatattaaaaaaacttggatgtatcagtgtaacttaattttttattttcatactggcattgtagacacttgagaaagctgtatcttgcaggcttgacttaacttttttccttaaaaatctggaatataatcttacagcatttactggaataaacagtacaaagcattggagtgtaaaactctagatgttttggatttacagcgtttctttgataaatgaattgtataccactagtacagctctagtacagcgttcacaataagctaataatggataagttttcttcactccattaacacaagcagtgttttatttaataatcatcaatgaaataaatgtgcctgaaattgattttaaaaattacagtattagatcataaagtaaaaaccagcagtacatttttagtcacactgaaaatgaaggacttaattttccccacaagtttcagtgtttttagtaattaattctatgcattttatacaaatagaaatatatatatataaaaaattaaatgtttaaaaaggagtagcctaagattaatttaaaagattatttacagatgacacatttatggggtcactatttaagtaaatttgctgccctccacagccttctaattttatttatatgttccagcagattattaggatctgcttacttcttaggaaagaatcaatgctggcaacacattgtttcagaaacaccaagtgcaaaggattgattgtatcacaacaggtacaaaactgacagagttttctttttgtttagggccatgtttactaccctgaaatgttgtattttttgtctttaatttccaagacttaaagcagtcttgttaaattgacataaatggtaaacttcaacattttcataatacagtattaatgtttgataaaggtatatcccagttaactacactgctctttaattgcaatcatgggcattttaatgtattttaaaataaatttcaaaattctgctaaattcttaatttagcatattgacaaagtaatctggatttataccttttaaaaaccattttgaccagttttcttcggttttaatgctttcttaaataaaacactgcatgatttccaagttgcatatttgcatactattttaatttgcaaaatgttttttaaatcaaatatcctgatatttagttgttttttttttcctccagcgtgtttaattaaatatgttactgtattagcaaaacattttcatttttaaaatctgctaattttaaacttggactgtgttaagtaaaagttaaatcatacactgcaaggtgtaggaagatttgttttaatgaatccaatgatacagatttgattactaagtttgaactgttaattgtttaacaattttagacttgtggctttctttctttggtttatttgtttttgcttttactcctatgctacactagtttgccatgtagcaattgcactgtgcaatattacaataaggactgggaaaattttatggatgtaatgtctattacggtttgcgatagtatttctctctagttctcagtgatttaaatgtgaccaagccttctgtactttgtcacaaaaagcgggttttccaggtgactattttggtgagtgtcaaaataagaatttatggtgtattactgtcgattcactttgaattaaaatatatatattgcagcaaa

SEQ ID NO: 141338 - DNA, 7345 bp, Homo sapiens
  Payload ID: 7783
  Gene Symbol: HIPK3
  Gene Name: homeodomain interacting protein kinase 3
  Uniprot ID: Q9H422
  ENST ID: ENST00000379016
  CDS Start-End: 306-3890
cctcgccctagccaagccgtccccaccccaaatccccgggaaggaagatgagggagacgggcccggcgcttagcagccagagcagcagcagcagcagcagcggtcgggggagggtgtttcgccgtttcctctcagccgccaggacaagatggcagcggccgcggagaggggctgagcccgggctgggtggtgccgcctgctgaagcgcctggctcccggtccccggcacggccctgcgccccaccccggacatgctcagggctgcggccgcccgaagaggagagagcgcgggcctctaggaaggtatggcctcacaagtcttggtctacccaccatatgtttatcaaactcagtcaagtgccttttgtagtgtgaagaaactcaaagtagagccaagcagttgtgtattccaggaaagaaactatccacggacctatgtgaatggtagaaactttggaaattctcatcctcccactaagggtagtgcttttcagacaaagataccatttaatagacctcgaggacacaacttttcattgcagacaagtgctgttgttttgaaaaacactgcaggtgctacaaaggtcatagcagctcaggcacagcaagctcacgtgcaggcacctcagattggggcgtggcgaaacagattgcatttcctagaaggcccccagcgatgtggattgaagcgcaagagtgaggagttggataatcatagcagcgcaatgcagattgtcgatgaattgtccatacttcctgcaatgttgcaaaccaacatgggaaatccagtgacagttgtgacagctaccacaggatcaaaacagaattgtaccactggagaaggtgactatcagttagtacagcatgaagtcttatgctccatgaaaaatacttacgaagtccttgattttcttggtcgaggcacgtttggccaggtagttaaatgctggaaaagagggacaaatgaaattgtagcaatcaaaattttgaagaatcatccttcttatgcccgtcaaggtcaaatagaagtgagcatattagcaaggctcagtactgaaaatgctgatgaatataactttgtacgagcttatgaatgctttcagcaccgtaaccatacttgtttagtctttgagatgctggaacaaaacttgtatgactttctgaaacaaaataaatttagtcccctgccactaaaagtgattcggcccattcttcaacaagtggccactgcactgaaaaaattgaaaagtcttggtttaattcatgctgatctcaagccagagaatattatgttggtggatcctgttcggcagccttacagggttaaagtaatagactttgggtcggccagtcatgtatcaaagactgtttgttcaacatatctacaatctcggtactacagagctccagagattatattggggttgccattttgtgaagccatagacatgtggtcattgggatgtgtgattgcagaattatttcttggatggccgctctacccaggagccttggagtatgatcagattcgatacatttctcagactcaaggtttgccaggagaacagttgttaaatgtgggtactaaatccacaagatttttttgcaaagaaacagatatgtctcattctggttggagattaaagacattggaagagcatgaggcagagacaggaatgaagtctaaagaagccagaaaatacattttcaacagtctggatgatgtagcgcatgtgaacacagtgatggatttggaaggaagtgatcttttggctgagaaagctgatagaagagaatttgttagtctgttgaagaaaatgttgctgattgatgcagatttaagaattactccagctgagaccctgaaccatccttttgttaatatgaaacatcttctagatttccctcatagcaaccatgtaaagtcctgttttcatattatggatatttgtaagtcccacctaaattcatgtgacacaaataatcacaacaaaacttcacttttaagaccagttgcttcaagcagtactgctacactgactgcaaattttactaaaatcggaacattaagaagtcaggcattgaccacatctgctcattcagttgtgcaccatggaatacctctgcaggcaggaactgctcagtttggttgtggtgatgcttttcagcagacattgattatctgtcccccagctattcaaggtattcctgcaacacatggtaaacccaccagttattcaataagggtagataatacagttccacttgtaactcaggccccagctgtgcagccactacagatccgaccaggagttctttctcagacgtggtctggtagaacacagcagatgctggtgcctgcctggcaacaggtgacacccctggctcctgctactactacactaacttctgagagtgtggctggttcacacaggcttggagactgggggaagatgatttcatgcagcaatcattataactcagtgatgccgcagcctcttctgaccaatcagataactttatctgcccctcagccagttagtgtggggattgcacatgttgtctggcctcagcctgccactaccaagaaaaataaacagtgccagaacaggagtaattcattacagaataccaatatcccacattcagcatttatttctccaaagataattaatgggaaagatgtcgaggaagtaagttgtatagaaacacaggacaatcagaactcagaaggagaggcaagaaattgctgtgaaacatctatcagacaggactctgattcatcagtttcagacaaacagcggcaaaccatcattattgccgactccccgagtcctgcagtgagtgtcatcactatcagcagtgacactgatgaggaagagacttcccagagacattcactcagagaatgtaaaggtagtctagattgtgaagcttgccagagcactttgaatattgatcggatgtgttcattaagtagtcctgatagtactctgagtaccagctcctcagggcagtccagcccatccccctgcaagagaccgaatagtatgtcagatgaagagcaagaaagtagttgtgatacggtggatggctctccgacatctgactcttccgggcatgacagtccatttgcagagagcacttttgtggaggacactcatgaaaacacagaattggtatcctctgctgacacagaaaccaagccagctgtctgttctgttgtggtgccaccagtggaactagaaaatggcttaaatgccgatgagcatatggcaaacacagattctatatgccagccattaataaaaggacgatctgcccctggaagattaaaccagccttctgcagtgggtactcgtcagcaaaaattgacatcagcattccagcagcagcatttgaacttcagtcaggttcagcactttggatctgggcatcaagagtggaatggaaactttgggcacagaagacagcaagcttatattcctactagtgttaccagtaatccattcactctttctcatggaagtcccaatcacacagcagtgcatgcccacctggctggaaatacacacctcggaggacagcctactctacttccatacccatcatcagccaccctcagtagtgctgcaccagtggcccacctgttagcctctccgtgtacctcaagacctatgttacagcatccaacttataatatctcccatcccagtggcatagttcaccaagtcccagtgggcttaaatccccgtctgttaccatccccaaccattcatcagactcagtacaaaccaatcttcccaccacattcttacattgcagcatcacctgcatatactggatttccactgagtccaacaaaactcagccagtatccatatatgtgaaaaacagtatattggggaagctcaatgatacaaacatttgattaaaaataaaaacatggtatttaatattagccatggcacaagaaaattatttttgaatcatgtagacttgggtgcaatttaaacaactttgagctttaaaaactcacttttgatgtgttttgcacatttggtataacttgtctttggtcatgttatcttcttatgtagtaactctagacaggtgacttatgggagcagaagtccagttttgctcctgctattttttataaattgccttctaactagtgcaagacacgtctacatttgggaagccattctgtgtacagacttagagcaacagatgcacatatgtcagaattacagcatacaagtgaattgtattatccgtgtcttagtgtataaatgttgggtcacttacctaagaaattgagctattgttctttacatttgcatgtgtcttttgcatgggcaaaatgttgcctagactttgctcttaaatgttgttctaataatctcagctgcattgtaaaccgttcctacacatagtgccttaaatatttgaggttgttaatgttattacctatatataaatgttgaggactgcagcacttaaaattcagacctactatttagtttccttttgatagcgtaatgttcatttttgtttttgtgtggtatgatttcaggtagtagctgtttttttccttattaagagggcagcatgtttgctatagctgaattctgctgtctgatttttcagaatgatctagcttcaagaaaagcaagcagttagtagtgcttaagaaaaattgattcagtatctaatggatagttgataactgtcacagcacagcattttatatactgttaagtgaaactgcaatacaatctaagtttattttgagagtgtttgctgtataattggacttaataaaatgtttagaggtacagtaggcatgactttgggtagataataaaatgcaaaatgctcattgattcatgatgtggttttatcttagcttgggcaaaccatgcagtatttaataaatagtagcagaacttttactattgaagcttgaaaagatgtgagttctttgtgtgcaatttttgatttatgcatgtgagagggttttttttttttttaagtatttttacattgcagtacttgttttgcttgttggtgatgtttgcttatttaatacattccgtcagggacagaaattacatgcttttttttctttctaggaagtgtgttgagttccccccttccccgacatttttttcttttttgggtggtggtgatggtagtggttatgtctgtttaaatgaagttgcttttacagcaccaaagacttaatcatccatttcctatataaaggtagctactttttgcatagacctcaagtatattgtagtgtaaaggtggaatttaaggaaaggtattaaattgaggctgtgttttagcttacaggcaagtaataaattgtatcatttatcttgaatgtatcatagataagctgctatataacgattgccacttcagatagctgtgaaattaggtgattaactagttgttatttagccttctaatttctgtataagtctaattacatgaatagaaattggggttttgattttttactttgcttttctgtttggagtgtcattgtaactactgtattgtaaatggtggaaaataattgcatttgttactttggggtgtgttatttgcatcagtattttatctctattaatgtttgtgctcatcactgcatattaaaaaaacttggatgtatcagtgtaacttaattttttattttcatactggcattgtagacacttgagaaagctgtatcttgcaggcttgacttaacttttttccttaaaaatctggaatataatcttacagcatttactggaataaacagtacaaagcattggagtgtaaaactctagatgttttggatttacagcgtttctttgataaatgaattgtataccactagtacagctctagtacagcgttcacaataagctaataatggataagttttcttcactccattaacacaagcagtgttttatttaataatcatcaatgaaataaatgtgcctgaaattgattttaaaaattacagtattagatcataaagtaaaaaccagcagtacatttttagtcacactgaaaatgaaggacttaattttccccacaagtttcagtgtttttagtaattaattctatgcattttatacaaatagaaatatatatatataaaaaattaaatgtttaaaaaggagtagcctaagattaatttaaaagattatttacagatgacacatttatggggtcactatttaagtaaatttgctgccctccacagccttctaattttatttatatgttccagcagattattaggatctgcttacttcttaggaaagaatcaatgctggcaacacattgtttcagaaacaccaagtgcaaaggattgattgtatcacaacaggtacaaaactgacagagttttctttttgtttagggccatgtttactaccctgaaatgttgtattttttgtctttaatttccaagacttaaagcagtcttgttaaattgacataaatggtaaacttcaacattttcataatacagtattaatgtttgataaaggtatatcccagttaactacactgctctttaattgcaatcatgggcattttaatgtattttaaaataaatttcaaaattctgctaaattcttaatttagcatattgacaaagtaatctggatttataccttttaaaaaccattttgaccagttttcttcggttttaatgctttcttaaataaaacactgcatgatttccaagttgcatatttgcatactattttaatttgcaaaatgttttttaaatcaaatatcctgatatttagttgttttttttttcctccagcgtgtttaattaaatatgttactgtattagcaaaacattttcatttttaaaatctgctaattttaaacttggactgtgttaagtaaaagttaaatcatacactgcaaggtgtaggaagatttgttttaatgaatccaatgatacagatttgattactaagtttgaactgttaattgtttaacaattttagacttgtggctttctttctttggtttatttgtttttgcttttactcctatgctacactagtttgccatgtagcaattgcactgtgcaatattacaataaggactgggaaaattttatggatgtaatgtctattacggtttgcgatagtatttctctctagttctcagtgatttaaatgtgaccaagccttctgtactttgtcacaaaaagcgggttttccaggtgactattttggtgagtgtcaaaataagaatttatggtgtattactgtcgattcactttgaattaaaatatatatattgcagcaaa

SEQ ID NO: 141339 - DNA, 7399 bp, Homo sapiens
  Payload ID: 7783
  Gene Symbol: HIPK3
  Gene Name: homeodomain interacting protein kinase 3
  Uniprot ID: Q9H422
  ENST ID: ENST00000456517
  CDS Start-End: 363-3947
ttcattaaggggaacaaacaaacgcgcaggcacgcagcttgagcaccccagccgatggccgcgtcccgggctttgtggccccgtccccagcgtcgcggagcagcgggtttgcagggtgtcaactctggggacgtgcgtgcgtgtgtgtgattgttggggaggagaaatgtgatccgcggctccgcgtccccagcggcggcgggaggaaggcgtggcggccgcgcggcggggctgttgccggcttctctcgttacggtggctgccgcccgcttcccttcgccgcactgggagaactggcggaaagactttggatgaaaatgtctgtttctctgtcgggagggagacggctgttgtaaaatggtatggcctcacaagtcttggtctacccaccatatgtttatcaaactcagtcaagtgccttttgtagtgtgaagaaactcaaagtagagccaagcagttgtgtattccaggaaagaaactatccacggacctatgtgaatggtagaaactttggaaattctcatcctcccactaagggtagtgcttttcagacaaagataccatttaatagacctcgaggacacaacttttcattgcagacaagtgctgttgttttgaaaaacactgcaggtgctacaaaggtcatagcagctcaggcacagcaagctcacgtgcaggcacctcagattggggcgtggcgaaacagattgcatttcctagaaggcccccagcgatgtggattgaagcgcaagagtgaggagttggataatcatagcagcgcaatgcagattgtcgatgaattgtccatacttcctgcaatgttgcaaaccaacatgggaaatccagtgacagttgtgacagctaccacaggatcaaaacagaattgtaccactggagaaggtgactatcagttagtacagcatgaagtcttatgctccatgaaaaatacttacgaagtccttgattttcttggtcgaggcacgtttggccaggtagttaaatgctggaaaagagggacaaatgaaattgtagcaatcaaaattttgaagaatcatccttcttatgcccgtcaaggtcaaatagaagtgagcatattagcaaggctcagtactgaaaatgctgatgaatataactttgtacgagcttatgaatgctttcagcaccgtaaccatacttgtttagtctttgagatgctggaacaaaacttgtatgactttctgaaacaaaataaatttagtcccctgccactaaaagtgattcggcccattcttcaacaagtggccactgcactgaaaaaattgaaaagtcttggtttaattcatgctgatctcaagccagagaatattatgttggtggatcctgttcggcagccttacagggttaaagtaatagactttgggtcggccagtcatgtatcaaagactgtttgttcaacatatctacaatctcggtactacagagctccagagattatattggggttgccattttgtgaagccatagacatgtggtcattgggatgtgtgattgcagaattatttcttggatggccgctctacccaggagccttggagtatgatcagattcgatacatttctcagactcaaggtttgccaggagaacagttgttaaatgtgggtactaaatccacaagatttttttgcaaagaaacagatatgtctcattctggttggagattaaagacattggaagagcatgaggcagagacaggaatgaagtctaaagaagccagaaaatacattttcaacagtctggatgatgtagcgcatgtgaacacagtgatggatttggaaggaagtgatcttttggctgagaaagctgatagaagagaatttgttagtctgttgaagaaaatgttgctgattgatgcagatttaagaattactccagctgagaccctgaaccatccttttgttaatatgaaacatcttctagatttccctcatagcaaccatgtaaagtcctgttttcatattatggatatttgtaagtcccacctaaattcatgtgacacaaataatcacaacaaaacttcacttttaagaccagttgcttcaagcagtactgctacactgactgcaaattttactaaaatcggaacattaagaagtcaggcattgaccacatctgctcattcagttgtgcaccatggaatacctctgcaggcaggaactgctcagtttggttgtggtgatgcttttcagcagacattgattatctgtcccccagctattcaaggtattcctgcaacacatggtaaacccaccagttattcaataagggtagataatacagttccacttgtaactcaggccccagctgtgcagccactacagatccgaccaggagttctttctcagacgtggtctggtagaacacagcagatgctggtgcctgcctggcaacaggtgacacccctggctcctgctactactacactaacttctgagagtgtggctggttcacacaggcttggagactgggggaagatgatttcatgcagcaatcattataactcagtgatgccgcagcctcttctgaccaatcagataactttatctgcccctcagccagttagtgtggggattgcacatgttgtctggcctcagcctgccactaccaagaaaaataaacagtgccagaacaggagtaattcattacagaataccaatatcccacattcagcatttatttctccaaagataattaatgggaaagatgtcgaggaagtaagttgtatagaaacacaggacaatcagaactcagaaggagaggcaagaaattgctgtgaaacatctatcagacaggactctgattcatcagtttcagacaaacagcggcaaaccatcattattgccgactccccgagtcctgcagtgagtgtcatcactatcagcagtgacactgatgaggaagagacttcccagagacattcactcagagaatgtaaaggtagtctagattgtgaagcttgccagagcactttgaatattgatcggatgtgttcattaagtagtcctgatagtactctgagtaccagctcctcagggcagtccagcccatccccctgcaagagaccgaatagtatgtcagatgaagagcaagaaagtagttgtgatacggtggatggctctccgacatctgactcttccgggcatgacagtccatttgcagagagcacttttgtggaggacactcatgaaaacacagaattggtatcctctgctgacacagaaaccaagccagctgtctgttctgttgtggtgccaccagtggaactagaaaatggcttaaatgccgatgagcatatggcaaacacagattctatatgccagccattaataaaaggacgatctgcccctggaagattaaaccagccttctgcagtgggtactcgtcagcaaaaattgacatcagcattccagcagcagcatttgaacttcagtcaggttcagcactttggatctgggcatcaagagtggaatggaaactttgggcacagaagacagcaagcttatattcctactagtgttaccagtaatccattcactctttctcatggaagtcccaatcacacagcagtgcatgcccacctggctggaaatacacacctcggaggacagcctactctacttccatacccatcatcagccaccctcagtagtgctgcaccagtggcccacctgttagcctctccgtgtacctcaagacctatgttacagcatccaacttataatatctcccatcccagtggcatagttcaccaagtcccagtgggcttaaatccccgtctgttaccatccccaaccattcatcagactcagtacaaaccaatcttcccaccacattcttacattgcagcatcacctgcatatactggatttccactgagtccaacaaaactcagccagtatccatatatgtgaaaaacagtatattggggaagctcaatgatacaaacatttgattaaaaataaaaacatggtatttaatattagccatggcacaagaaaattatttttgaatcatgtagacttgggtgcaatttaaacaactttgagctttaaaaactcacttttgatgtgttttgcacatttggtataacttgtctttggtcatgttatcttcttatgtagtaactctagacaggtgacttatgggagcagaagtccagttttgctcctgctattttttataaattgccttctaactagtgcaagacacgtctacatttgggaagccattctgtgtacagacttagagcaacagatgcacatatgtcagaattacagcatacaagtgaattgtattatccgtgtcttagtgtataaatgttgggtcacttacctaagaaattgagctattgttctttacatttgcatgtgtcttttgcatgggcaaaatgttgcctagactttgctcttaaatgttgttctaataatctcagctgcattgtaaaccgttcctacacatagtgccttaaatatttgaggttgttaatgttattacctatatataaatgttgaggactgcagcacttaaaattcagacctactatttagtttccttttgatagcgtaatgttcatttttgtttttgtgtggtatgatttcaggtagtagctgtttttttccttattaagagggcagcatgtttgctatagctgaattctgctgtctgatttttcagaatgatctagcttcaagaaaagcaagcagttagtagtgcttaagaaaaattgattcagtatctaatggatagttgataactgtcacagcacagcattttatatactgttaagtgaaactgcaatacaatctaagtttattttgagagtgtttgctgtataattggacttaataaaatgtttagaggtacagtaggcatgactttgggtagataataaaatgcaaaatgctcattgattcatgatgtggttttatcttagcttgggcaaaccatgcagtatttaataaatagtagcagaacttttactattgaagcttgaaaagatgtgagttctttgtgtgcaatttttgatttatgcatgtgagagggttttttttttttttaagtatttttacattgcagtacttgttttgcttgttggtgatgtttgcttatttaatacattccgtcagggacagaaattacatgcttttttttctttctaggaagtgtgttgagttccccccttccccgacatttttttcttttttgggtggtggtgatggtagtggttatgtctgtttaaatgaagttgcttttacagcaccaaagacttaatcatccatttcctatataaaggtagctactttttgcatagacctcaagtatattgtagtgtaaaggtggaatttaaggaaaggtattaaattgaggctgtgttttagcttacaggcaagtaataaattgtatcatttatcttgaatgtatcatagataagctgctatataacgattgccacttcagatagctgtgaaattaggtgattaactagttgttatttagccttctaatttctgtataagtctaattacatgaatagaaattggggttttgattttttactttgcttttctgtttggagtgtcattgtaactactgtattgtaaatggtggaaaataattgcatttgttactttggggtgtgttatttgcatcagtattttatctctattaatgtttgtgctcatcactgcatattaaaaaaacttggatgtatcagtgtaacttaattttttattttcatactggcattgtagacacttgagaaagctgtatcttgcaggcttgacttaacttttttccttaaaaatctggaatataatcttacagcatttactggaataaacagtacaaagcattggagtgtaaaactctagatgttttggatttacagcgtttctttgataaatgaattgtataccactagtacagctctagtacagcgttcacaataagctaataatggataagttttcttcactccattaacacaagcagtgttttatttaataatcatcaatgaaataaatgtgcctgaaattgattttaaaaattacagtattagatcataaagtaaaaaccagcagtacatttttagtcacactgaaaatgaaggacttaattttccccacaagtttcagtgtttttagtaattaattctatgcattttatacaaatagaaatatatatatataaaaaattaaatgtttaaaaaggagtagcctaagattaatttaaaagattatttacagatgacacatttatggggtcactatttaagtaaatttgctgccctccacagccttctaattttatttatatgttccagcagattattaggatctgcttacttcttaggaaagaatcaatgctggcaacacattgtttcagaaacaccaagtgcaaaggattgattgtatcacaacaggtacaaaactgacagagttttctttttgtttagggccatgtttactaccctgaaatgttgtattttttgtctttaatttccaagacttaaagcagtcttgttaaattgacataaatggtaaacttcaacattttcataatacagtattaatgtttgataaaggtatatcccagttaactacactgctctttaattgcaatcatgggcattttaatgtattttaaaataaatttcaaaattctgctaaattcttaatttagcatattgacaaagtaatctggatttataccttttaaaaaccattttgaccagttttcttcggttttaatgctttcttaaataaaacactgcatgatttccaagttgcatatttgcatactattttaatttgcaaaatgttttttaaatcaaatatcctgatatttagttgttttttttttcctccagcgtgtttaattaaatatgttactgtattagcaaaacattttcatttttaaaatctgctaattttaaacttggactgtgttaagtaaaagttaaatcatacactgcaaggtgtaggaagatttgttttaatgaatccaatgatacagatttgattactaagtttgaactgttaattgtttaacaattttagacttgtggctttctttctttggtttatttgtttttgcttttactcctatgctacactagtttgccatgtagcaattgcactgtgcaatattacaataaggactgggaaaattttatggatgtaatgtctattacggtttgcgatagtatttctctctagttctcagtgatttaaatgtgaccaagccttctgtactttgtcacaaaaagcgggttttccaggtgactattttggtgagtgtcaaaataagaatttatggtgtattactgtcgattcactttgaattaaaatatatatattgcagc

SEQ ID NO: 141340 - DNA, 3668 bp, Homo sapiens
  Payload ID: 7783
  Gene Symbol: HIPK3
  Gene Name: homeodomain interacting protein kinase 3
  Uniprot ID: Q9H422
  ENST ID: ENST00000525975
  CDS Start-End: 84-3668
gatttcctaatctccaggaggaaagaaactagtctttgggagttaaaccgactaatttaacggagaattaccaatgtggaggtatggcctcacaagtcttggtctacccaccatatgtttatcaaactcagtcaagtgccttttgtagtgtgaagaaactcaaagtagagccaagcagttgtgtattccaggaaagaaactatccacggacctatgtgaatggtagaaactttggaaattctcatcctcccactaagggtagtgcttttcagacaaagataccatttaatagacctcgaggacacaacttttcattgcagacaagtgctgttgttttgaaaaacactgcaggtgctacaaaggtcatagcagctcaggcacagcaagctcacgtgcaggcacctcagattggggcgtggcgaaacagattgcatttcctagaaggcccccagcgatgtggattgaagcgcaagagtgaggagttggataatcatagcagcgcaatgcagattgtcgatgaattgtccatacttcctgcaatgttgcaaaccaacatgggaaatccagtgacagttgtgacagctaccacaggatcaaaacagaattgtaccactggagaaggtgactatcagttagtacagcatgaagtcttatgctccatgaaaaatacttacgaagtccttgattttcttggtcgaggcacgtttggccaggtagttaaatgctggaaaagagggacaaatgaaattgtagcaatcaaaattttgaagaatcatccttcttatgcccgtcaaggtcaaatagaagtgagcatattagcaaggctcagtactgaaaatgctgatgaatataactttgtacgagcttatgaatgctttcagcaccgtaaccatacttgtttagtctttgagatgctggaacaaaacttgtatgactttctgaaacaaaataaatttagtcccctgccactaaaagtgattcggcccattcttcaacaagtggccactgcactgaaaaaattgaaaagtcttggtttaattcatgctgatctcaagccagagaatattatgttggtggatcctgttcggcagccttacagggttaaagtaatagactttgggtcggccagtcatgtatcaaagactgtttgttcaacatatctacaatctcggtactacagagctccagagattatattggggttgccattttgtgaagccatagacatgtggtcattgggatgtgtgattgcagaattatttcttggatggccgctctacccaggagccttggagtatgatcagattcgatacatttctcagactcaaggtttgccaggagaacagttgttaaatgtgggtactaaatccacaagatttttttgcaaagaaacagatatgtctcattctggttggagattaaagacattggaagagcatgaggcagagacaggaatgaagtctaaagaagccagaaaatacattttcaacagtctggatgatgtagcgcatgtgaacacagtgatggatttggaaggaagtgatcttttggctgagaaagctgatagaagagaatttgttagtctgttgaagaaaatgttgctgattgatgcagatttaagaattactccagctgagaccctgaaccatccttttgttaatatgaaacatcttctagatttccctcatagcaaccatgtaaagtcctgttttcatattatggatatttgtaagtcccacctaaattcatgtgacacaaataatcacaacaaaacttcacttttaagaccagttgcttcaagcagtactgctacactgactgcaaattttactaaaatcggaacattaagaagtcaggcattgaccacatctgctcattcagttgtgcaccatggaatacctctgcaggcaggaactgctcagtttggttgtggtgatgcttttcagcagacattgattatctgtcccccagctattcaaggtattcctgcaacacatggtaaacccaccagttattcaataagggtagataatacagttccacttgtaactcaggccccagctgtgcagccactacagatccgaccaggagttctttctcagacgtggtctggtagaacacagcagatgctggtgcctgcctggcaacaggtgacacccctggctcctgctactactacactaacttctgagagtgtggctggttcacacaggcttggagactgggggaagatgatttcatgcagcaatcattataactcagtgatgccgcagcctcttctgaccaatcagataactttatctgcccctcagccagttagtgtggggattgcacatgttgtctggcctcagcctgccactaccaagaaaaataaacagtgccagaacaggagtaattcattacagaataccaatatcccacattcagcatttatttctccaaagataattaatgggaaagatgtcgaggaagtaagttgtatagaaacacaggacaatcagaactcagaaggagaggcaagaaattgctgtgaaacatctatcagacaggactctgattcatcagtttcagacaaacagcggcaaaccatcattattgccgactccccgagtcctgcagtgagtgtcatcactatcagcagtgacactgatgaggaagagacttcccagagacattcactcagagaatgtaaaggtagtctagattgtgaagcttgccagagcactttgaatattgatcggatgtgttcattaagtagtcctgatagtactctgagtaccagctcctcagggcagtccagcccatccccctgcaagagaccgaatagtatgtcagatgaagagcaagaaagtagttgtgatacggtggatggctctccgacatctgactcttccgggcatgacagtccatttgcagagagcacttttgtggaggacactcatgaaaacacagaattggtatcctctgctgacacagaaaccaagccagctgtctgttctgttgtggtgccaccagtggaactagaaaatggcttaaatgccgatgagcatatggcaaacacagattctatatgccagccattaataaaaggacgatctgcccctggaagattaaaccagccttctgcagtgggtactcgtcagcaaaaattgacatcagcattccagcagcagcatttgaacttcagtcaggttcagcactttggatctgggcatcaagagtggaatggaaactttgggcacagaagacagcaagcttatattcctactagtgttaccagtaatccattcactctttctcatggaagtcccaatcacacagcagtgcatgcccacctggctggaaatacacacctcggaggacagcctactctacttccatacccatcatcagccaccctcagtagtgctgcaccagtggcccacctgttagcctctccgtgtacctcaagacctatgttacagcatccaacttataatatctcccatcccagtggcatagttcaccaagtcccagtgggcttaaatccccgtctgttaccatccccaaccattcatcagactcagtacaaaccaatcttcccaccacattcttacattgcagcatcacctgcatatactggatttccactgagtccaacaaaactcagccagtatccatatatgtga

SEQ ID NO: 141341 - DNA, 591 bp, Homo sapiens
  Payload ID: 7783
  Gene Symbol: HIPK3
  Gene Name: homeodomain interacting protein kinase 3
  ENST ID: ENST00000531504
  CDS Start-End: 363-591
ttcattaaggggaacaaacaaacgcgcaggcacgcagcttgagcaccccagccgatggccgcgtcccgggctttgtggccccgtccccagcgtcgcggagcagcgggtttgcagggtgtcaactctggggacgtgcgtgcgtgtgtgtgattgttggggaggagaaatgtgatccgcggctccgcgtccccagcggcggcgggaggaaggcgtggcggccgcgcggcggggctgttgccggcttctctcgttacggtggctgccgcccgcttcccttcgccgcactgggagaactggcggaaagactttggatgaaaatgtctgtttctctgtcgggagggagacggctgttgtaaaatggtatggcctcacaagtcttggtctacccaccatatgtttatcaaactcagtcaagtgccttttgtagtgtgaagaaactcaaagtagagccaagcagttgtgtattccaggaaagaaactatccacggacctatgtgaatggtagaaactttggaaattctcatcctcccactaagggtagtgcttttcagacaaagataccatttaatagacctcgaggacacaactttt

SEQ ID NO: 141342 - DNA, 2452 bp, Homo sapiens
  Payload ID: 7784
  Gene Symbol: HIPK4
  Gene Name: homeodomain interacting protein kinase 4
  Uniprot ID: Q8NE63
  ENST ID: ENST00000291823
  CDS Start-End: 286-2136
agagccactcaacagcgctggaacccattcggtggggcctggggcccctcatcccaagccaggagggtttctggggaggggtgcagcccctggcagactgacagtgtggcctgggggtttgggggtgccagggaagcaggggccaacctcataggaggagacacgagtgcggttctctttcccccactggggggcctgctgtgtcagcagccaggcgggaggcctgggcggcagagccagtggtacaggggcctgggcagggcggtgtctggcagcagcggcaccatgtccaccatccagtcggagactgactgctacgacatcatcgaggtcttgggcaaggggaccttcggggaggtagccaagggctggcggcggagcacgggcgagatggtggccatcaagatcctcaagaatgacgcctaccgcaaccgcatcatcaagaacgagctgaagctgctgcactgcatgcgaggcctagaccctgaagaggcccacgtcatccgcttccttgagttcttccatgacgccctcaagttctacctggtctttgagctgctggagcaaaaccttttcgagttccagaaggagaacaacttcgcgcccctccccgcccgccacatccgtacagtcaccctgcaggtgctcacagccctggcccggctcaaggagctggctatcatccacgctgatctcaagcctgagaacatcatgctggtggaccagacccgctgccccttcagggtcaaggtgattgacttcggatccgccagcattttcagcgaggtgcgctacgtgaaggagccatacatccagtcgcgcttctaccgggcccctgagatcctgctggggctgcccttctgcgagaaggtggacgtgtggtccctgggctgcgtcatggctgagctgcacctgggctggcctctctaccccggcaacaacgagtacgaccaggtgcgctacatctgcgaaacccagggcctgcccaagccacacctgttgcacgccgcctgcaaggcccaccacttcttcaagcgcaacccccaccctgacgctgccaacccctggcagctcaagtcctcggctgactacctggccgagacgaaggtgcgcccattggagcgccgcaagtatatgctcaagtcgttggaccagattgagacagtgaatggtggcagtgtggccagtcggctaaccttccctgaccgggaggcgctggcggagcacgccgacctcaagagcatggtggagctgatcaagcgcatgctgacctgggagtcacacgaacgcatcagccccagtgctgccctgcgccaccccttcgtgtccatgcagcagctgcgcagtgcccacgagaccacccactactaccagctctcgctgcgcagctaccgcctctcgctgcaagtggaggggaagccccccacgcccgtcgtggccgcagaagatgggaccccctactactgtctggctgaggagaaggaggctgcgggtatgggcagtgtggccggcagcagccccttcttccgagaggagaaggcaccaggtatgcaaagagccatcgaccagctggatgacctgagtctgcaggaggctgggcatgggctgtggggtgagacctgcaccaatgcggtctccgacatgatggtccccctcaaggcagccatcactggccaccatgtgcccgactcgggccctgagcccatcctggccttctacagcagccgcctggcaggccgccacaaggcccgcaagccacctgcgggttccaagtccgactccaacttcagcaacctcattcggctgagccaggtctcgcctgaggatgacaggccctgccggggcagcagctgggaggaaggagagcatctcggggcctctgctgagccactggccatcctgcagcgagatgaggatgggcccaacattgacaacatgaccatggaagctgagaggccagaccctgagctcttcgaccccagcagctgtcctggagaatggctgagtgagccagactgcaccctggagagcgtcaggggcccacgggctcaggggctcccaccccgccgctcccaccagcatggtccaccccggggggccaccagcttcctccagcatgtcaccgggcaccactgatggtgattccacccctgcccatcactgggggctgcgctagctgggctggcattccctcccaacctgaactgctcctcagagccatctcctgaacccacaaattattcttacagaaagatagttatccagaaattctcattccccgtctgcggtgcggtgcgtgcctgcacacctctcctaaacacagcagggctttggagtctggcccatgctccttggccagaaggacagcaggaaagggggctgcaccccgctggccctgcgctcgcccttggccctgctgcctctgtctatttcaatatagaactgttcagca

SEQ ID NO: 141343 - DNA, 774 bp, Homo sapiens
  Payload ID: 7785
  Gene Symbol: HOMER1
  Gene Name: homer scaffolding protein 1
  Uniprot ID: Q86YM7
  ENST ID: ENST00000282260
  CDS Start-End: 21-695
gcaagttttcattgggcaaaatgggggaacaacctatcttcagcactcgagctcatgtcttccaaattgacccaaacacaaagaagaactgggtacccaccagcaagcatgcagttactgtgtcttatttctatgacagcacaagaaatgtgtataggataatcagtttagatggctcaaaggcaataataaatagtaccatcaccccaaacatgacatttactaaaacatctcagaagtttggccagtgggctgatagccgggcaaacaccgtttatggattgggattctcctctgagcatcatctttcgaaagtgactgaacttgaatgtgttagtagccaagcaaatgcagtacatactcataagacagaattaaatcagacaatacaagaactggaagagacactgaaactgaaggaagaggaaatagaaaggttaaaacaagaaattgataatgccagagaactacaagaacagagggattctttgactcagaaactacaggaagtagaaattcggaacaaagacctggagggacaactgtctgacttagagcaacgtctggagaaaagtcagaatgaacaagaagcttttcgcaataacctgaagacactcttagaaattctggatggaaagatatttgaactaacagaattacgagataacttggccaagctactagaatgcagctaaggaaagtgaaatttcagtgccaattaattaaaagatacactgtctctcttcataggactgtttaggctctgcatcaaga

SEQ ID NO: 141344 - DNA, 5881 bp, Homo sapiens
  Payload ID: 7785
  Gene Symbol: HOMER1
  Gene Name: homer scaffolding protein 1
  Uniprot ID: Q86YM7
  ENST ID: ENST00000334082
  CDS Start-End: 1444-2508
gcctcccgtcccttcccgcgagcagagggagggaccgccctcgctccccgttctctccgcccccttcccgccccccgcagcccactctgccgccgcgctagcttcacgccggcggcgctgaccgggaaagcagcaccctcttctctgccagccggccggccggcggaggcggaggcagcggcaggcttcaggccgccggggctggcgctgctctgcccggcggtagccggaggcgggcgctgatggaagtgtgaagaggcggcggcggggcccggggaatgtgaggcggcgcgtggcggcggcgcggagcgtgagagacgaggagtaggggtgggggcgctggagcggcggctgcgcttcggcttcgagcccagctctcctggccccaacgcgggcttagcctcccgccttggctcgggcaggcgcccgtcgacccttcggcccctttcgcccgccctggagctgggggcagggtgccagtggaagcgtggggcttggctctgtgattcattcattctccgccgacgggagcctcagacccgctgtgctctgaagagaggagggaagagggggcagccgcgaatgaagggccgggcaccagccgggctccattgtgctcggcggcggggggcgggaaggggctgagggaggtgggatcgggtcccctcctccagctctccggcgtgcgctgcgcccccagcctgctgccagcctggaaatggctccgtttattctcttcgggagaatgaatcgatcctgcctagccttctcttcgtcctccccacctcttctctgctccgagtcttaggaggagaaacatttaaaaagacagattccaatgtggagtgccgtgcaggttgcgagctgccgggtttgcacttcgaggagattttcctgtgtagtttttttcctaatgtgagcgcagggaagccgtggcattactgcttttgggatttttattcacgtgcacgtcgcgtttggttgctcgctccacccccggagacctggtgtggtggagaaatttgaacccgcagccttagctccgaaaaggccgagttacctggctctccctgagtgtcgaggaggacatgagtgaaatgaccagcgaactcattttttataggactcggtgaagccggattctgcatttccctacttgtagactcattttgtggaatagagttgatcgctgtctcctccgcaaagcattttaactcgaataagcaaatgccgcctctgtttgaacgttttggtatttacaagagagaaatcattttacctaagagaactaattgaattggcagcatccttgaaatacctccggacaaggatctgggggtgggggtggaaaagcaactgcgaaatagcagacggagaaattcctttggaagttattccgtagcataagagctgaaacttcagagcaagttttcattgggcaaaatgggggaacaacctatcttcagcactcgagctcatgtcttccaaattgacccaaacacaaagaagaactgggtacccaccagcaagcatgcagttactgtgtcttatttctatgacagcacaagaaatgtgtataggataatcagtttagatggctcaaaggcaataataaatagtaccatcaccccaaacatgacatttactaaaacatctcagaagtttggccagtgggctgatagccgggcaaacaccgtttatggattgggattctcctctgagcatcatctttcgaaatttgcagaaaagtttcaggaatttaaagaagctgctcgactagcaaaggaaaaatcacaagagaagatggaacttaccagtacaccttcacaggaatccgcaggcggggatcttcagtctcctttaacaccggaaagtatcaacgggacagatgatgaaagaacacctgatgtgacacagaactcagagccaagggctgaaccaactcagaatgcattgccattttcacatagttcagcaatcagcaaacattgggaggctgaactggctaccctcaaaggaaataatgccaaactcactgcagccctgctggagtccactgccaatgtgaaacaatggaaacagcaacttgctgcctatcaagaggaagcagaacgtctgcacaagcgggtgactgaacttgaatgtgttagtagccaagcaaatgcagtacatactcataagacagaattaaatcagacaatacaagaactggaagagacactgaaactgaaggaagaggaaatagaaaggttaaaacaagaaattgataatgccagagaactacaagaacagagggattctttgactcagaaactacaggaagtagaaattcggaacaaagacctggagggacaactgtctgacttagagcaacgtctggagaaaagtcagaatgaacaagaagcttttcgcaataacctgaagacactcttagaaattctggatggaaagatatttgaactaacagaattacgagataacttggccaagctactagaatgcagctaaggaaagtgaaatttcagtgccaattaattaaaagatacactgtctctcttcataggactgtttaggctctgcatcaagattgcacaaaaaaaaaaaaaaaaaaattgaatatcactcctccaggaggaggatcttttgaaattggaattgtatatttcactgtaaattttagaatccagcttgtagctagttggggaaaaaagatgaaaaacttgaactacaaattacctccatgtatattattggccatagttaactagaaagttataaatagacacttaatgcaatcttttttcctgatattagccaatgggagaattaacaatgtctaggtcacatcccctttttgtgttcaacacagtgaagattatctgctttttaaattaatttatttacgatatctagagctgtgttttgtgcaaaaacttagtgatgaaagcctgtcttttgttgtaatctgaataatttctcaggatatttttgcactgctgagaagcagtgccattaccaattaattcttgccaggagtgagagagagctgtatctttaattgaaatatactataactgggtgtatagagttcttcccttttttgtgctggaagatatttcactctggtgactactctggtacactctggtgttctctaatcttgtctgttgtatagtttacttttccatattgattccatgtatttatgagaagatattgtctcccattttattacacattttaaagccaactaacgaaggcagctgagtccctcagaaatttttctttttaagtttctaataaatttgacacacagtactgaaatacagcagcccgtcattgacaggctggtctagcaatgttaagtatatttacagaatatgcagttacatttatttatatattttgcaagaaatcttttctgaatgatcaatgcatttcaatttacgaataataatggttattggggaactgtttattatagataattttaaggtgtatagctattttaaagggggtccatttacatcaaacagctgatcagaggactctatctaaattgtgatcgtggcagatagagatggagtcatgtactctatctggctctacacatcaatcacatcttgattcaaacctcacaaggcaatattctgaattgttaactaggtatttcaaaacaggaattaaattcaataggctcttctcagtgaacaggttttaatgttgttttgatgtaattttaaaagacttttagcaaacatgcatttctttatatgatatatttcttttacgaagctattttaaaagtaagccaagtgctgtctagtctgcttataaagtaggaattgcatcagagtacatatattcttgctgtacaatgcctgtgatgttgaggagggttcttttttaaagtgtatgcttgagtaactgactctatggagtctataaatgcactgacttcttgtttgtaccccaaaatgatcgaattgttaagtacaaaattaagctaattaaccaatttgtaaccattttttcactcataaacagctactcaatactagacaattttgttttttatgtatgtgtatgtacgtaaatacatacatattaatttacattagagtgaaaaataaatggtttgtttctgaagttagtttcttaagtgagttttcaggtgtctctgaaaaatttataacaatcatgtattatatgtgctgtaacatcatgtacgttacctccatctattttaggatattttcctcacctatatattatagggagaataatttagatacacatgctcagagctgagatatttctctgataaatcaggtaacaaaatgtatttgattgatggaattttgaagtaaatgtgtttttatccatcagtttctgagtaacaaagagcaccaagttttaatttaaataggagatttaacactagggatcagggagtttagtatgaagagttaaaaaaatttaaaaaacagtgtaagctgttgaaatggcaagtgaattattttaatgatgtaataaaatatttttaaattttgacatagtgatcatttaatgaaaaaactcaccaaaatgtctccatttgaattgtattgataatgtgggacatatgtgtgattcaatatatacatatacccatatgtatatacagaaaattatttttaatactttcctactgataatgaaatttaaaattggaaattttgtgagtgtttttcttgtccaatagagcctaattgtttccttttttagtgatttaacaatctcttgagggctgcacctttaaattcccagattgtcaatagacatgtacagtatatgggataaggtggacacaagtgcacatataaataaaatcttcttaagacttttaactattcatttacagtaggagagtatgtagaaatcatcatccacaagtcataattaggttgtgtgcctactgtagttttttccatttctgtattatataaacatttgcatattaaaatttgatttttcccagagacaagtattatatactgtatctatatttaaatcaaactgtggtaatatatttctcagaaaataatgttggggactatagcctgaacatgtggacttgaagcgacatggaggaggaggttgatcccattgtgtataagttaatatgtgataactattgaatcttgtacaaaaacaaaaattgaaaaaaaaaaagaaaagcaaaaatacagtttttattttgaaatacatttgttctctggagaatgtactttatctttttttcctccagtcttttacagatatttaaaagcatttaaatgatgacagcatttacttaaatctttcaggtgctactggattttgcattagtgtgttatgttgtgaaatcctaactttgacataaaaggttttataagtattcccctgcctggaaaattagtttttgttctcctctctctctctttctcttttccactttctttctgcagactaaaacatgctcacgaagttgcatctctccttgtctctatagaagatctccagcaccatcatagatttgatgttctgctgtcattgaactgttgggaagcagttagaggaaaagctcactttttttttcaggtggaaataaaaggaacactcaaaattaagccaacaccaccactacctttaaaaactagtttatttgccctgttaaaattaaatgtattctttaacatgtgggctacagtctcccatgtttttatttaactgaagcatatacacttcggtcatttatctccttgtggtcctgattttgtcagtactggaatgggaggcaggtcggggaaagtttgtttgatggcagtggattcttattgttgttttaaccattgcattt

SEQ ID NO: 141345 - DNA, 815 bp, Homo sapiens
  Payload ID: 7785
  Gene Symbol: HOMER1
  Gene Name: homer scaffolding protein 1
  Uniprot ID: Q86YM7
  ENST ID: ENST00000508576
  CDS Start-End: 21-554
gcaagttttcattgggcaaaatgggggaacaacctatcttcagcactcgagctcatgtcttccaaattgacccaaacacaaagaagaactgggtacccaccagcaagcatgcagttactgtgtcttatttctatgacagcacaagaaatgtgtataggataatcagtttagatggctcaaaggcaataataaatagtaccatcaccccaaacatgacatttactaaaacatctcagaagtttggccagtgggctgatagccgggcaaacaccgtttatggattgggattctcctctgagcatcatctttcgaaatttgcagaaaagtttcaggaatttaaagaagctgctcgactagcaaaggaaaaatcacaagagaagatggaacttaccagtacaccttcacaggaatccgcaggcggggatcttcagtctcctttaacaccggaaagtatcaacgggacagatgatgaaagaacacctgatgtgacacagaactcagagccaagggctgaaccaactcagaatgcattgccattttcacataggaagtagaaattcggaacaaagacctggagggacaactgtctgacttagagcaacgtctggagaaaagtcagaatgaacaagaagcttttcgcaataacctgaagacactcttagaaattctggatggaaagatatttgaactaacagaattacgagataacttggccaagctactagaatgcagctaaggaaagtgaaatttcagtgccaattaattaaaagatacactgtctctcttcataggactgtttaggctctgcatcaaga

SEQ ID NO: 141346 - DNA, 642 bp, Homo sapiens
  Payload ID: 7785
  Gene Symbol: HOMER1
  Gene Name: homer scaffolding protein 1
  ENST ID: ENST00000535690
  CDS Start-End: 21-563
gcaagttttcattgggcaaaatgggttcagcaatcagcaaacattgggaggctgaactggctaccctcaaaggaaataatgccaaactcactgcagccctgctggagtccactgccaatgtgaaacaatggaaacagcaacttgctgcctatcaagaggaagcagaacgtctgcacaagcgggtgactgaacttgaatgtgttagtagccaagcaaatgcagtacatactcataagacagaattaaatcagacaatacaagaactggaagagacactgaaactgaaggaagaggaaatagaaaggttaaaacaagaaattgataatgccagagaactacaagaacagagggattctttgactcagaaactacaggaagtagaaattcggaacaaagacctggagggacaactgtctgacttagagcaacgtctggagaaaagtcagaatgaacaagaagcttttcgcaataacctgaagacactcttagaaattctggatggaaagatatttgaactaacagaattacgagataacttggccaagctactagaatgcagctaaggaaagtgaaatttcagtgccaattaattaaaagatacactgtctctcttcataggactgtttaggctctgcatcaaga

SEQ ID NO: 141347 - DNA, 1990 bp, Homo sapiens
  Payload ID: 7786
  Gene Symbol: HOMER2
  Gene Name: homer scaffolding protein 2
  Uniprot ID: Q9NSB8
  ENST ID: ENST00000304231
  CDS Start-End: 194-1258
gcccgcccgcgcctggcggcggtggcggcagtggcagcagtggcagccgcgcagccccgcggaatggagcggcgccggggctgagccgggcgcgcacgggccgccgcatgtgccgcgcggggagcggctgccgagcgggcggagagcgagcgcgagaggccccgtcggagcggccgccggagcagcgccggagatgggagaacagcccatcttcaccacccgagcgcatgtcttccagattgaccccaacaccaagaagaactggatgcctgcgagcaagcaggcggtcaccgtttcctacttctatgatgtcacaaggaacagctatcggatcatcagtgtggacggagccaaggtgatcataaacagcacaatcacaccgaatatgaccttcaccaaaacgtcacagaagtttgggcagtgggccgacagcagagccaacacagtgtttggtttggggttttcctctgagcagcagctgacaaagtttgcagagaaattccaggaggtgaaagaagctgccaagatagccaaagacaagacgcaggagaaaatcgagacctcaagtaatcattcccaagaatctgggcgtgaaaccccatcttctactcaggcatccagtgtcaacgggacggacgatgaaaaggcctctcacgccggtccagccaacacacacctgaagtctgagaatgacaagctgaagattgccttgacgcagagcgcagccaacgtgaagaagtgggagatcgagctgcagacccttcgggagagcaatgcacggctgaccacagcactgcaggagtcggcagccagtgtggagcagtggaagaggcagttctccatctgccgtgatgagaatgaccggctccgcaacaagattgatgagctggaagaacaatgcagtgagatcaacagagagaaggagaagaacacgcagctgaagaggaggatcgaggagctggaggcagagctccgagaaaaggagacagagctgaaagatctccgaaaacaaagtgaaatcatacctcagctcatgtcagagtgcgaatatgtctctgagaagctagaggcggcagagagagacaatcaaaacctggaagacaaagtgcgttccttaaagacagacattgaggagagcaaataccgacagcgccacctgaaggtggagttgaagagcttcctggaggtgctggacgggaagattgacgacctgcatgacttccgccgagggctctccaagctgggcaccgataactagggctggccgaggcccaggccccgcccgtgagtcccaagcgtgtgtgcgagaccagatagctctaggacgttcttctgtgtgcattgcttctgtaaatgcaggcgcagtttgtcgtgtttccaaaccagttgtgccgtccactcactccttttcagaatagaaatctcctctcgcttctctggccttgtgaggttgtggacaactggaagattctgactcaggaatccagaactaggtctaccttcaacatttatgcagtcagggcagggatgtttatatctttcataagggctgttgcaaccatatgaactgaaaaaacacgcattttgtaatccaaatattgatattctttacaccaagccatcaggctccttttatcaaatagcattcagagtatttgaatgtccaccagacaccagccccggggggcacagagagaacaacattcctctctgtcaacatcgagaggctttaaaacaactgtttagtggaaactttctgagagatggaaaacaagcttctggtgggtgcattttctggcccggagttgcctgcatccacgctactgccccctgccccccgcccccccagtttgtacggttgcaacagtgttccttttcttggttttaatttctgagcagatgattgtgctgtgggaacagcacacagtgagggtgcctagcacaatgtctggcacaaagtaggtgcttaataaatatttgttcaattaaa

SEQ ID NO: 141348 - DNA, 1950 bp, Homo sapiens
  Payload ID: 7786
  Gene Symbol: HOMER2
  Gene Name: homer scaffolding protein 2
  Uniprot ID: Q9NSB8
  ENST ID: ENST00000450735
  CDS Start-End: 187-1218
cgcgcctggcggcggtggcggcagtggcagcagtggcagccgcgcagccccgcggaatggagcggcgccggggctgagccgggcgcgcacgggccgccgcatgtgccgcgcggggagcggctgccgagcgggcggagagcgagcgcgagaggccccgtcggagcggccgccggagcagcgccggagatgggagaacagcccatcttcaccacccgagcgcatgtcttccagattgaccccaacaccaagaagaactggatgcctgcgagcaagcaggcggtcaccgtttcctacttctatgatgtcacaaggaacagctatcggatcatcagtgtggacggagccaaggtgatcataaacagcacaatcacaccgaatatgaccttcaccaaaacgtcacagaagtttgggcagtgggccgacagcagagccaacacagtgtttggtttggggttttcctctgagcagcagctgacaaagtttgcagagaaattccaggaggtgaaagaagctgccaagatagccaaagacaagacgcaggagaaaatcgagacctcaagtaatcattcccaagcatccagtgtcaacgggacggacgatgaaaaggcctctcacgccggtccagccaacacacacctgaagtctgagaatgacaagctgaagattgccttgacgcagagcgcagccaacgtgaagaagtgggagatcgagctgcagacccttcgggagagcaatgcacggctgaccacagcactgcaggagtcggcagccagtgtggagcagtggaagaggcagttctccatctgccgtgatgagaatgaccggctccgcaacaagattgatgagctggaagaacaatgcagtgagatcaacagagagaaggagaagaacacgcagctgaagaggaggatcgaggagctggaggcagagctccgagaaaaggagacagagctgaaagatctccgaaaacaaagtgaaatcatacctcagctcatgtcagagtgcgaatatgtctctgagaagctagaggcggcagagagagacaatcaaaacctggaagacaaagtgcgttccttaaagacagacattgaggagagcaaataccgacagcgccacctgaaggtggagttgaagagcttcctggaggtgctggacgggaagattgacgacctgcatgacttccgccgagggctctccaagctgggcaccgataactagggctggccgaggcccaggccccgcccgtgagtcccaagcgtgtgtgcgagaccagatagctctaggacgttcttctgtgtgcattgcttctgtaaatgcaggcgcagtttgtcgtgtttccaaaccagttgtgccgtccactcactccttttcagaatagaaatctcctctcgcttctctggccttgtgaggttgtggacaactggaagattctgactcaggaatccagaactaggtctaccttcaacatttatgcagtcagggcagggatgtttatatctttcataagggctgttgcaaccatatgaactgaaaaaacacgcattttgtaatccaaatattgatattctttacaccaagccatcaggctccttttatcaaatagcattcagagtatttgaatgtccaccagacaccagccccggggggcacagagagaacaacattcctctctgtcaacatcgagaggctttaaaacaactgtttagtggaaactttctgagagatggaaaacaagcttctggtgggtgcattttctggcccggagttgcctgcatccacgctactgccccctgccccccgcccccccagtttgtacggttgcaacagtgttccttttcttggttttaatttctgagcagatgattgtgctgtgggaacagcacacagtgagggtgcctagcacaatgtctggcacaaagtaggtgcttaataaatatttgttcaattaaa

SEQ ID NO: 141349 - DNA, 10341 bp, Homo sapiens
  Payload ID: 7786
  Gene Symbol: HOMER2
  Gene Name: homer scaffolding protein 2
  ENST ID: ENST00000558090
  CDS Start-End: 1-13
caccgataactagggctggccgaggcccaggccccgccctggccctggagcaacctggacggtgttcccttgagctggtgtgacgtgccctcgtttattctgacatccagcccagtctcagtactgttgtcataaccttacgccagactcaggcagaatgtaagccattcactcgtgagcatcgcagccgcttgtgctgcctggaagctgcagggccaggactgcattttcagtttgcaattgaggtctcctgattttggtgtttccaagactggctgctataccttgataagctttccttctgcctccatgaaacctggtgtctaaaaaagatcaactaaaacttggaaccctttaaccaagaggacctttaaaaataacctttcattccagtcaagacccagctggatgcattttaaagttgggagtggcgaggaagccttcctagtgccgcccggggaatgtaaaaccaccagagcaacaggttgggacagtatggtcaggccttggagggaaagagaaccagtatccacacaagacctcgaacttgtgtggcccctcagtttcatctctcctgcctgccatcacattagactttaattgggtgagagaacagggcagagactgtcacctgcattttgcagatgggaagtagagacagagaaagtgacacgcccagggtcacccagcggtgaccagcagcgtggactctgcatccaggtctcctggaccttgatgcagtatcttttgagacatgccactctagtccctttggtgacccgtgggtgccaagagaaaataattcttatatcctgataagagcatattacaattatattatttcaatatgtgtccacagcaaaggacagtttacaaaaatgtgaatccgaatgacatttaggaatgtttgttataaatgataagttccactttggaatgattctggttttgcaggaatctttccaagaaagttggttaaaatgatgtctctgcctgtgaggccagttctatggaaaacaaacacaccctgagttctttattgatggctttagtggaggcagagcagtatgttcaaaacaagtgggaggccctgagatcgcaggaatggaaacagagttctggctgggggtggcctgtccactgcccgccccttcctggagatgcactcctttctggctttctggggagggagcagccttgctcagtggtgggagcagcttgaacgggacctgatcaacacccaggaagactgtgcacagagggcagttggtctccagcctgcaggctccatgagcacagccttgatggtggtgggcaggcgcctgcctgctgtggactacatttgatgcaaaacatcaagtaaagggtggagcgtaatacagtgaatatgcctcccagaaacatcatgctctgcctattttaacagggctctttttctttagaaaagtctccttctctatagaaaccagggacaattttggatgagagccaaccacaggacgcgctggggacgttatggtgggacctcacatgtggccaggtgcacctttgggaagaaggcagacgtgatgtgacttagcacaggcactcaaaagaggcagccactggtctttgctaatatccagaagtggattgtttgttccattcatccttctagaagctaaattctttcattgccttgagacatcactagattttgaagcacttgcaaactagaagcttgcaagatcaatgtccatgtatatttttaaagatatgcatgctttaaaaggaccctaatttctgagtacatggcttccccaaagaaacagtatatattctggagatgatgggggttttggcatggagagggactcctgtctagtctagaaaatgttacttacatgcctcttccatgtaccgatctcaagaatatgggttttctagttggctttaaacactacccaggcaggaaggtggctttggtaagaattttgagctggatgaaatgttctagtgaacttacgactgtgtatgtgcgcacgcgtgtgtgtgtgtgtgtgtgtgtgtgtgtgtgtgtgtgtgtgtgaagaaacagcaaaaggggaagtgggagaaacagtaaggaagcgtttttaattaaaaatatgtatacctaagaggagactttattttctatttctggtggtggtgatctatgttctggaatccatttaccagaagtttgtggatcttttgtttgaagtggaattgttcagtgccctactctctttgacggtgcagagccttgcggcaaagtgttctcctgggccctagagacccccagggcacctggcaggagcccgtaaaccacggcagagtcccaagtggtgcatgttttggcgagtgatgggcaggactgatgattcacagctgtgaggctgtgctattgtttttaccctcttgtactgcttttaataggaagtcccgactttacgtcagttgtgagagcagcgtcttatgatgtgacaggcaagaagacattccttgcatcaaatataagagtttaatgagaagagtggagtggataagtgaactctcccaagagtactgttttttgtttccctttttaaatgctttcttggtacataaataatataatactttttttaaagaaattccagatgagtgggaaaaaaaccaatcacctgttattacactatctgattataaccactgttaacatttcagtttttatcttttcagacttttttctatgcatctgtgtgtgttttattactttttccatgaaatataatcatattatacatactgttttataacttttatcccttttaatgctatattgtgaatagatttctatatcagtaaatatgtaattacattatttttaacctctatgtaggttgtaccttggatacttaggttgtttccaatttttttactgttgtagtcaaggacataatgaagttcttctaacatccttgcgaacttttcagaatattgacttagggtaattttctgaagttatcactggctcaaaagtacgcgcctccctatctgcggctcctttccttctgaggcatacaggacttcaccctccatcccccttgtactcattcagggtcctatgactaattctggccaatgaaatgtgagcacaggtgacacatgaagctccagacagacactgaaatgcccatgagcagttccgcagtgtctgccttcccttccctcagcaaatgctgatgtcccagggacagagcctctgtcaagcctggatccctgagtgactacgtggagcagcccccttctcccttcatgttaccctcacctgccaccctgcatggacgggtagcatgaataaaaaaaataaaccttaggtgttaaacactggggtttcagggttaattggttaactgcagcataacatatcctgttgcaacaataaaaaagaatgcacatttttaggacttgtaatatgtattgcctcaaattgccttccagaaagacagacccaattatactcccacccacagtgtgtgagtgtgtactgcttcctctttaacactggagttaccctggggacagagagctaaaaaaaatatttttttggttaaaatgtaaccctttaaggtgttcagcagtatcattgatttctaagaggtttatttcataaacattgtaaaacaaaattttaagttgcacgtatggctttttaaaaacgtttagacatttaaaaaaacaccttttagtcaagtttatctgttacttttttttttttttttaatggttgctacctatgccgtcatgcttatgcaggtctttccaattcttttttttttttttttttttttttttttttgagacggggtccaccctggcccccaggctggagtgcagtggcgtgatctcagctcactgcaacctgcgcctcccgggttcaagcgattctcatgtgtcaacctccctcctgagtagctgggactacaagtgtatgccaccacgcccaggtaactttttgtttttagtagagatgggtttcgccatgttgcctaggctggtctcgaactcctgaactcaggcaatccacacgccttggcctcccaaagtgctggaattacaggtgtgagccaccaagcccggcgaggtcttcccaattctgatggcaaggttgtataaatattcaccactatcttattcttgtacttttattatttctttctaaacagttaaatctgtgatctggctgggcgtgttggctcttgcctgtaatcccaacactttgggtcgccaaggtggaaggatcacttgagtccaggcatttgaggttacagtgagctttgatggcaccggtgcactccagcctggggaacagagcaagaccctgtctctaaaaaaaattttaaaaacctctgatctatctggaatgtattttctaaattaccccaacactgtttattgggaagtctgtcctttattctatatgaaatcccatttttgccatacacctagtagcccttctgttgggtgccaggataagcaccctggccttgagtgtgctgtgaactctttattatgggttgtgatcttcctgcacattctagcactggtaccacattgtttggatcgccatagctttggactaaacttccccattaaactttttcaaaacttgcctagtatattgtgcaggccgggcatggtggctcacgcctgtaatcccagcactttgggaggccaaggtggatggatcacctgagatcaggagttcgagaccagcctggataacatggcgaaaccccatctctactaaaaatacaaaaaaaaaaaaaaaaaaaaaaaattagctggctgtggtgataggaacctgtaatctcagctacttgggaggctgaggcagtgaacccaggaggcagaggttgcagtgagctgagatagcaccagcctgggcaacggagcgagactctgtctcaaaaaaacaaaaaacaaaacaaaaaaaaaaccttccaaaagaagtttgagataattttatgtttagaaaaattagaaattggattgagtaaaatttacatattttacacaagaggactaacatctttataatatttaacctttcagtaaatttatgttttatgtttctcagcctatcttttctagtataggtgatttttttagtgtggttactattgtaaatgagatcctactactttaaaaaatgaaaattaaatctatcgcttttatgactttaaaacattagacttatgtaagtgtaaacattatttaaaaacataatgtagaaaattaaagtcccccataattaaaatccctttcccccagaaaaagtcaacagcatattcatcagttttttcctaaagtatgttttagcactttgaccatatgagacaacccttctgctgttagcatttttctctttgcaatagatcttcctatgtcagtacacatcaatctacctcattcttacctctgcataagagagtagtgtgtagttgtataatagtttaacttggcgattggttattgattttgtaactagccagttactgaattattctaaaggttttgctgttgttaatttctttcgcctttttcagttgggtaatagttctgggtaggttgataattttattcccatatttgtaatcttatttcactttctcaactcatcacattgactggtacttttagaacaatgttaaaaaacatttacataattgtgctgatattgtacattatttgatatatatatatcaaattttttttacttagaagagtgtttctccaaaactataaatttgactcttagtgtaaaataatcttaatatttgaattatacattcaggttatgccctctatttctagtttgatgaaaatattattagtaatggatgttggggttttattaaatggcttttttccacatctgtcaagatgatcaactggcttttctctattatgactttagatgaatcgttttaatagatttgctaatgttaagacatctctgcatttctacaagaatctgatgtagtcatagtatactattcttttaatatacatctcctttcaatgttaacagtggttatttatgattggttggtccatagtagatttttattttgtgtttcttatctgtactttctgatttttctacaaagattgtgtattacttgtataataaaaataagagctttaaattgtgaaattcttctggatttggttttctcattttattatggaatttttcatacctaaataagatgaatagttgggtaattttttttctgctttgtcagttattggtgtttgttaacttcttaaaaaaattaaaaagaacttgggaagctctgtttttctatgccctggaaacatttaaatatttagaattttttgctctttgaagtttttataacatgtatgaaactgtccaaatctagtagtgcctttttaggaaatatggggttgttgtttttttttaatttttttcatgctcattattttcttcaaactttatttctattctgtaagtttttggcaatttaaattttcccggctaagcacagtggctcatgcttgtaatcccagcacttctggaggcggaggcaggaagattgcttgagcccaggagttcacaatcagcctgggcaacatagtcgctactaaaaattagctaggcatggtggtgtgtgcctgtagtcccagctactcaggaggctgaagcagtaggatcacttgagccctgggggccgaagctgcagtgagccgtgagcatgcctgggacacagagcaagaccctttctcaaaaaaaaattttttttaattaagtgaattttcctaaatagtgattctgttctattttcagatttgttggcctggagttgtagtattctgcttcctcattcccatgttgcgtgtgctttccctttttgttctcattggtttttccagaattactctgtttcattgatcttttcaaataaccaactctgagatttatatcttaattttactgttttactatttcatgattcttttcgttttgttcttaattttttcctttattattttcccaccttcttaagttacatgccattttaactttttcttacttaataaaagacagttactaacattgtaaggtacgacttttcctctaaatacatctttatccatatctcttaaatttatatttagtgttctaagttataaataatttataatttcagatttgactttattttttactggagttttttgaaattatacttttaaatttccaggtagtttattttgttgttgttttttagcatttcttacaaacttctagttttattgccttgtcaaagagagtatggcctgtacaatttgtgtgcattttggagatcatggatgttttcttgagacctgatttttagttttaatacatatctccaggaaactgaagaagaaagcatattctctgaagggaacaaaattcaatcagatgtattcatttgaccttacaaagtataatattatggacctttaattttaatttacttgattcattaaggctaagaaagatatgttcgtctcctattattgtatttctgtctgtttcttttgtttctaacagtttttgctttgtttctttttgatgttatttggcaaatgatctttttatatttaagggaaaaaatattttcctttaaaggcttgtatacctttgtgaattttacctgattttgttgtaatagtttctgtagaaatacatagttcagtaaaatatttgtgtctgtttttaagtcaacagaaatctttcagaaatcctttgtatcttgacaagatactttggaagttcttgatctccctaagtaggctaatgtccttgcaggctactcctgaaccaaagcataagtggaagtgggggctggggcatattaggcttgggattttttgagtgtgccaatgtttctggttcttgctttggggcaaccccatgcttagggatgtttaggggatgcctgcccttcatctggtcatattctgcctcagtagggcccacacaaaggcaacctatgaggcacttttcttctgtggggactagccttctgagaaggcaggagaatgtagctttatatgcctggctattggggtaaaagctaatctcagagactcattccaccagataagattttggttttttttttctgtagagtcagagtcccgccatgttttccaggctggtcctgactcctgggctcaaatgatcctcctgccttggccttccacaatgccagaatcacaggtgcaagccaccatacacagcccccaccagaaaaggtttttccagagctgttggaacaggctattcacatggcaaagtctgtatcaaacacagaaccggcttttcccaaatgtgtaggagtggtgaatcccagccctcagctcaagagtaaaagaaataggaccttctctatttttccttcattcaagtgagtgttgatttttgagcccctgttccaccaggctcatgcaatttgactcagtcagcttcagcactcccctttctccagaggagagtcctttacagttctggggagcttacatattccaacatgttaaggggaggggattcacgtctgctgagatatccccgtttcctaccccgctggatacctcatgcctccatcccatgcttgggacataggaattagctgttctgtgctgtaggaatctccatgaagctgtacttggctctgcctgcctgggccctccctgtagccatgccctgtctggcgccacaatgacttcatttaacttgaagggactgctagataagcccaatgtgtgtttgcacgggagtcaagaccactgagtggaaataattctgtggctgccaccgatgctgtttgcattgccgagagccacagttctaccccctacttcccagcagtggccccgctgcgcctgccagagttgttaccatctctgtgccctttctcttgcttattgcacagtaggttacacagtcttgtgcttctccatcttgccatgtcatctcttcactctaccgctgctctgaccggcccatgcctaccctgttcccgtaccctccaggatctcctccgttttcgtattcctttaatgcagagctgccagaggcttcttcctaaagcatagacagatcaggtcctaggaccctgcaggctcttcccctgcctgcccaggccttgctgtgcactctccctgtgttcttcttgcttatgctgttccatccctggaatcctttcctgctccaactccattcctcttttaggccccaaaggccccagccctccggatgaaactaaaccactaccagggagggggacttgtgcctcttccatcgtccttttcatacttacagctgttaaatcattcattcatgttttcatttagcaaatatttattgtgcaccctcatgcccaggccctgggaacaccacagtaagaagactattactttccccagatctgctctgttccagtggaggggtgagctgctccattgcaggcgttcatggaactcagctgatgggggattttggaggctcccccacaaggcagagctctcataggcagccgacgacagaggccagtgtgcaccccacttctccagacttgggacgacctgggacattctgaagacctcatgaataccaggcttcaggatcgctgaccccaggaggagcccacggtggctctaagtgtacctgcttcgctgttcctgcgtcaccagcccactaaggtcctctgacttttgtgtagtagcatttttctaaggacaatctgcagagcagctgcttcagaactatttgtgttgccggcccatcccaaaaaaacctggatgaggacccttgcattctgggcctggaaatcttcattctagaaagctccttttactagacagaataatggtccccaaagatgtccacatcctaatccctggaacctgtggctatgttaccatagttggcaaaagggcccttcagatggagagatgatcctggattatccgggtgggcccagactaatcacacaagttctcagcagcagcagagaacctttccttgggtcagaaagagatgtgatgatggaagaagggtcagatacgatgctgctggcactgaaggtggaggaaggggccacaagccaaggaacaggggcaacctctagaaaccagaaagggcaaggaaatggcttctccccggagcctttagaagagaacacagccctgtcaacaccttgattttagcccagtgagacccatgtcagacttctgactatggaactgtaagataagaaatttgtcttttaagca

SEQ ID NO: 141350 - DNA, 555 bp, Homo sapiens
  Payload ID: 7786
  Gene Symbol: HOMER2
  Gene Name: homer scaffolding protein 2
  ENST ID: ENST00000558817
  CDS Start-End: 1-555
tttgcagagaaattccaggaggtgaaagaagctgccaagatagccaaagacaagacgcaggagaaaatcgagacctcaagtaatcattcccaaataattcactttggccaggaatctgggcgtgaaaccccatcttctactcaggcatccagtgtcaacgggacggacgatgaaaaggcctctcacgccggtccagccaacacacacctgaagtctgagaatgacaagctgaagattgccttgacgcagagcgcagccaacgtgaagaagtgggagatcgagctgcagacccttcgggagagcaatgcacggctgaccacagcactgcaggagtcggcagccagtgtggagcagtggaagaggcagttctccatctgccgtgatgagaatgaccggctccgcaacaagattgatgagctggaagaacaatgcagtgagatcaacagagagaaggagaagaacacgcagctgaagaggaggatcgaggagctggaggcagagctccgagaaaaggagacagagctgaaagatctccgaaaacaaagtgaaatcata

SEQ ID NO: 141351 - DNA, 1384 bp, Homo sapiens
  Payload ID: 7787
  Gene Symbol: HOMER3
  Gene Name: homer scaffolding protein 3
  Uniprot ID: Q9NSC5
  ENST ID: ENST00000221222
  CDS Start-End: 68-1144
gggccaaaccagtgctcctgccacctctctggctgccccctagagcctgcccatcccagcctgaccaatgtccacagccagggagcagccaatcttcagcacacgggcgcacgtgttccaaattgacccagccaccaagcgaaactggatcccagcgggcaagcacgcactcactgtctcctatttctacgatgccacccgcaatgtgtaccgcatcatcagcatcggaggcgccaaggccatcatcaacagcactgtcactcccaacatgaccttcaccaaaacttcccagaagttcgggcagtgggccgacagtcgcgccaacacagtctacggcctgggctttgcctctgaacagcatctgacacagtttgccgagaagttccaggaagtgaaggaagcagccaggctggccagggagaaatctcaggatggcggggagctcaccagtccagccctggggctcgcctcccaccaggtgcccccgagccctctcgtcagtgccaacggccccggcgaggaaaaactgttccgcagccagagcgctgatgcccccggccccacagagcgcgagcggctaaagaagatgttgtctgagggctccgtgggcgaggtacagtgggaggccgagtttttcgcactgcaggacagcaacaacaagctggcaggcgccctgcgagaggccaacgccgccgcagcccagtggaggcagcagctggaggctcagcgtgcagaggccgagcggctgcggcagcgggtggctgagctggaggctcaggcagcttcagaggtgacccccaccggtgagaaggaggggctgggccagggccagtcgctggaacagctggaagctctggtgcaaaccaaggaccaggagattcagaccctgaagagtcagactggggggccccgcgaggccctggaggctgccgagcgtgaggagactcagcagaaggtgcagacccgcaatgcggagttggagcaccagctgcgggcgatggagcgcagcctggaggaggcacgggcagagcgggagcgggcgcgggctgaggtgggccgggcagcgcagctgctggacgtcagcctgtttgagctgagtgagctgcgtgagggcctggcccgcctggctgaggctgcgccctgagccggggctggttttctatgaacgattccggcctgggatgcgggccaggctgcaggcggcatagttgggcccattcgtcctggaaagggactggggggtcccaacttagccctgggtgggccgggccgggctgggctggggtgggccccagtcggctctggttgttggcagctttggggctgtttttgagcttctcattgtgtagaatttctagatcccccgattacatttctaagcgtg

SEQ ID NO: 141352 - DNA, 1557 bp, Homo sapiens
  Payload ID: 7787
  Gene Symbol: HOMER3
  Gene Name: homer scaffolding protein 3
  Uniprot ID: Q9NSC5
  ENST ID: ENST00000392351
  CDS Start-End: 232-1317
ggcggcggcggcgcagacaaaggcacgggcggcgtggagggcggcgcggagggcgcgggcccgggagccagggagcgagcggggcgcccggcagcgcggagtcagcgccgcgggggccgcacccgactcgcgcctggacactcgcggggcgccgacctggcagggggccaaaccagtgctcctgccacctctctggctgccccctagagcctgcccatcccagcctgaccaatgtccacagccagggagcagccaatcttcagcacacgggcgcacgtgttccaaattgacccagccaccaagcgaaactggatcccagcgggcaagcacgcactcactgtctcctatttctacgatgccacccgcaatgtgtaccgcatcatcagcatcggaggcgccaaggccatcatcaacagcactgtcactcccaacatgaccttcaccaaaacttcccagaagttcgggcagtgggccgacagtcgcgccaacacagtctacggcctgggctttgcctctgaacagcatctgacacagtttgccgagaagttccaggaagtgaaggaagcagccaggctggccagggagaaatctcaggatggcggggagctcaccagtccagccctggggctcgcctcccaccaggtgcccccgagccctctcgtcagtgccaacggccccggcgaggaaaaactgttccgcagccagagcgctgatgcccccggccccacagagcgcgagcggctaaagaagatgttgtctgagggctccgtgggcgaggtacagtgggaggccgagtttttcgcactgcaggacagcaacaacaagctggcaggcgccctgcgagaggccaacgccgccgcagcccagtggaggcagcagctggaggctcagcgtgcagaggccgagcggctgcggcagcgggtggctgagctggaggctcaggcagcttcagaggtgacccccaccggtgagaaggaggggctgggccagggccagtcgctggaacagctggaagctctggtgcaaaccaaggaccaggagattcagaccctgaagagtcagactggggggccccgcgaggccctggaggctgccgagcgtgaggagactcagcagaaggtgcaggacctggagacccgcaatgcggagttggagcaccagctgcgggcgatggagcgcagcctggaggaggcacgggcagagcgggagcgggcgcgggctgaggtgggccgggcagcgcagctgctggacgtcagcctgtttgagctgagtgagctgcgtgagggcctggcccgcctggctgaggctgcgccctgagccggggctggttttctatgaacgattccggcctgggatgcgggccaggctgcaggcggcatagttgggcccattcgtcctggaaagggactggggggtcccaacttagccctgggtgggccgggccgggctgggctggggtgggccccagtcggctctggttgttggcagctttggggctgtttttgagcttctcattgtgtagaatttctagatcccccgattacatttctaagcgtg

SEQ ID NO: 141353 - DNA, 1418 bp, Homo sapiens
  Payload ID: 7787
  Gene Symbol: HOMER3
  Gene Name: homer scaffolding protein 3
  Uniprot ID: Q9NSC5
  ENST ID: ENST00000433218
  CDS Start-End: 100-1176
ggccggcggcatccgaggcgcatgactagttggggccaaaccagtgctcctgccacctctctggctgccccctagagcctgcccatcccagcctgaccaatgtccacagccagggagcagccaatcttcagcacacgggcgcacgtgttccaaattgacccagccaccaagcgaaactggatcccagcgggcaagcacgcactcactgtctcctatttctacgatgccacccgcaatgtgtaccgcatcatcagcatcggaggcgccaaggccatcatcaacagcactgtcactcccaacatgaccttcaccaaaacttcccagaagttcgggcagtgggccgacagtcgcgccaacacagtctacggcctgggctttgcctctgaacagcatctgacacagtttgccgagaagttccaggaagtgaaggaagcagccaggctggccagggagaaatctcaggatggcggggagctcaccagtccagccctggggctcgcctcccaccaggtgcccccgagccctctcgtcagtgccaacggccccggcgaggaaaaactgttccgcagccagagcgctgatgcccccggccccacagagcgcgagcggctaaagaagatgttgtctgagggctccgtgggcgaggtacagtgggaggccgagtttttcgcactgcaggacagcaacaacaagctggcaggcgccctgcgagaggccaacgccgccgcagcccagtggaggcagcagctggaggctcagcgtgcagaggccgagcggctgcggcagcgggtggctgagctggaggctcaggcagcttcagaggtgacccccaccggtgagaaggaggggctgggccagggccagtcgctggaacagctggaagctctggtgcaaaccaaggaccaggagattcagaccctgaagagtcagactggggggccccgcgaggccctggaggctgccgagcgtgaggagactcagcagaaggtgcagacccgcaatgcggagttggagcaccagctgcgggcgatggagcgcagcctggaggaggcacgggcagagcgggagcgggcgcgggctgaggtgggccgggcagcgcagctgctggacgtcagcctgtttgagctgagtgagctgcgtgagggcctggcccgcctggctgaggctgcgccctgagccggggctggttttctatgaacgattccggcctgggatgcgggccaggctgcaggcggcatagttgggcccattcgtcctggaaagggactggggggtcccaacttagccctgggtgggccgggccgggctgggctggggtgggccccagtcggctctggttgttggcagctttggggctgtttttgagcttctcattgtgtagaatttctagatcccccgattacatttctaagcgtggc

SEQ ID NO: 141354 - DNA, 1979 bp, Homo sapiens
  Payload ID: 7787
  Gene Symbol: HOMER3
  Gene Name: homer scaffolding protein 3
  Uniprot ID: Q9NSC5
  ENST ID: ENST00000539827
  CDS Start-End: 654-1739
caataaccaggacaatgagaaatttacatctggatgtcagcggccaccaggctcctctcagagggccatctcctgtacagggtgttgtgggggcttcccctagacaaagaaagatggggtctgcttgctctgagttatctataataattatcttacctttttgtttctttttataatttctttcttttttgagacagggtctcactctcttgtccaggctggagtgcagtggcctgaccatagctcactgcactgcagccttgacctcctgggctcaagtgatcctcccacctcagcctccccagtagctgggacggcaggcacatgccaccacacccagctaattgtttaaatttttggtagagatggggtctcgccatgttgctcaggatggtctcgaactcctgggctcaaaggatcctcctgactcagcctcccaaagcaccaggtgtactttgggcctctcctgcctttttgattgaaagttccatgacgggcacacctggtgatgggtcctgagatggaacctgcttggcctccctcagcctggcctgagggacactcatagtccctcctctctccctaggggccaaaccagtgctcctgccacctctctggctgccccctagagcctgcccatcccagcctgaccaatgtccacagccagggagcagccaatcttcagcacacgggcgcacgtgttccaaattgacccagccaccaagcgaaactggatcccagcgggcaagcacgcactcactgtctcctatttctacgatgccacccgcaatgtgtaccgcatcatcagcatcggaggcgccaaggccatcatcaacagcactgtcactcccaacatgaccttcaccaaaacttcccagaagttcgggcagtgggccgacagtcgcgccaacacagtctacggcctgggctttgcctctgaacagcatctgacacagtttgccgagaagttccaggaagtgaaggaagcagccaggctggccagggagaaatctcaggatggcggggagctcaccagtccagccctggggctcgcctcccaccaggtgcccccgagccctctcgtcagtgccaacggccccggcgaggaaaaactgttccgcagccagagcgctgatgcccccggccccacagagcgcgagcggctaaagaagatgttgtctgagggctccgtgggcgaggtacagtgggaggccgagtttttcgcactgcaggacagcaacaacaagctggcaggcgccctgcgagaggccaacgccgccgcagcccagtggaggcagcagctggaggctcagcgtgcagaggccgagcggctgcggcagcgggtggctgagctggaggctcaggcagcttcagaggtgacccccaccggtgagaaggaggggctgggccagggccagtcgctggaacagctggaagctctggtgcaaaccaaggaccaggagattcagaccctgaagagtcagactggggggccccgcgaggccctggaggctgccgagcgtgaggagactcagcagaaggtgcaggacctggagacccgcaatgcggagttggagcaccagctgcgggcgatggagcgcagcctggaggaggcacgggcagagcgggagcgggcgcgggctgaggtgggccgggcagcgcagctgctggacgtcagcctgtttgagctgagtgagctgcgtgagggcctggcccgcctggctgaggctgcgccctgagccggggctggttttctatgaacgattccggcctgggatgcgggccaggctgcaggcggcatagttgggcccattcgtcctggaaagggactggggggtcccaacttagccctgggtgggccgggccgggctgggctggggtgggccccagtcggctctggttgttggcagctttggggctgtttttgagcttctcattgtgtagaatttctagatcccccgattacatttctaagcgtg

SEQ ID NO: 141355 - DNA, 1607 bp, Homo sapiens
  Payload ID: 7787
  Gene Symbol: HOMER3
  Gene Name: homer scaffolding protein 3
  Uniprot ID: Q9NSC5
  ENST ID: ENST00000542541
  CDS Start-End: 522-1607
aaacgctgcaagtcgcagcaggagctgccggaccggaagggcctgggttccggggacccctgtgttccccaactcccacccggcgcaggacccgcccccagtccaggccagagctgccgccccacccccactcaggggctccggtttcagaccctgtgaccaggacagcagctgcccaggacaggatagggggggcatcccccctttgaccacagaggccgctgggccagggcctcccctcccccacctgtcttccccctcctccaaactcctccttggtcccctgcagattcggggttgctgaatggcccaatggggaggttggggagccctggtctcccagtgtggattctgctctgccctcatggtgggcattgggattggctgtttgtctacatcttgtctttttaacttggctgggggctccctggggatttggactctggacttcaaggggccaaaccagtgctcctgccacctctctggctgccccctagagcctgcccatcccagcctgaccaatgtccacagccagggagcagccaatcttcagcacacgggcgcacgtgttccaaattgacccagccaccaagcgaaactggatcccagcgggcaagcacgcactcactgtctcctatttctacgatgccacccgcaatgtgtaccgcatcatcagcatcggaggcgccaaggccatcatcaacagcactgtcactcccaacatgaccttcaccaaaacttcccagaagttcgggcagtgggccgacagtcgcgccaacacagtctacggcctgggctttgcctctgaacagcatctgacacagtttgccgagaagttccaggaagtgaaggaagcagccaggctggccagggagaaatctcaggatggcggggagctcaccagtccagccctggggctcgcctcccaccaggtgcccccgagccctctcgtcagtgccaacggccccggcgaggaaaaactgttccgcagccagagcgctgatgcccccggccccacagagcgcgagcggctaaagaagatgttgtctgagggctccgtgggcgaggtacagtgggaggccgagtttttcgcactgcaggacagcaacaacaagctggcaggcgccctgcgagaggccaacgccgccgcagcccagtggaggcagcagctggaggctcagcgtgcagaggccgagcggctgcggcagcgggtggctgagctggaggctcaggcagcttcagaggtgacccccaccggtgagaaggaggggctgggccagggccagtcgctggaacagctggaagctctggtgcaaaccaaggaccaggagattcagaccctgaagagtcagactggggggccccgcgaggccctggaggctgccgagcgtgaggagactcagcagaaggtgcaggacctggagacccgcaatgcggagttggagcaccagctgcgggcgatggagcgcagcctggaggaggcacgggcagagcgggagcgggcgcgggctgaggtgggccgggcagcgcagctgctggacgtcagcctgtttgagctgagtgagctgcgtgagggcctggcccgcctggctgaggctgcgccctga

SEQ ID NO: 141356 - DNA, 903 bp, Homo sapiens
  Payload ID: 7787
  Gene Symbol: HOMER3
  Gene Name: homer scaffolding protein 3
  ENST ID: ENST00000594794
  CDS Start-End: 208-666
acgggcggcgtggagggcggcgcggagggcgcgggcccgggagccagggagcgagcggggcgcccggcagcgcggagtcagcgccgcgggggccgcacccgactcgcgcctggacactcgcggggcgccgacctggcagggggccaaaccagtgctcctgccacctctctggctgccccctagagcctgcccatcccagcctgaccaatgtccacagccaggcagcagctggaggctcagcgtgcagaggccgagcggctgcggcagcgggtggctgagctggaggctcaggcagcttcagaggtgacccccaccggtgagaaggaggggctgggccagggccagtcgctggaacagctggaagctctggtgcaaaccaaggaccaggagattcagaccctgaagagtcagactggggggccccgcgaggccctggaggctgccgagcgtgaggagactcagcagaaggtgcaggacctggagacccgcaatgcggagttggagcaccagctgcgggcgatggagcgcagcctggaggaggcacgggcagagcgggagcgggcgcgggctgaggtgggccgggcagcgcagctgctggacgtcagcctgtttgagctgagtgagctgcgtgagggcctggcccgcctggctgaggctgcgccctgagccggggctggttttctatgaacgattccggcctgggatgcgggccaggctgcaggcggcatagttgggcccattcgtcctggaaagggactggggggtcccaacttagccctgggtgggccgggccgggctgggctggggtgggccccagtcggctctggttgttggcagctttggggctgtttttgagcttctcattgtgtagaatttctagatcccccgattacatttctaagc

SEQ ID NO: 141357 - DNA, 675 bp, Homo sapiens
  Payload ID: 7787
  Gene Symbol: HOMER3
  Gene Name: homer scaffolding protein 3
  ENST ID: ENST00000600077
  CDS Start-End: 224-675
agcgcggagtcagcgccgcgggggccgcacccgactcgcgcctggacactcgcggggcgccgacctggcaggattggggatcccgggcaccgggcggtgtcggacccccctccgggagccccgtggccggcggcatccgaggcgcatgactagttggggccaaaccagtgctcctgccacctctctggctgccccctagagcctgcccatcccagcctgaccaatgtccacagccagggagcagccaatcttcagcacacgggcgcacgtgttccaaattgacccagccaccaagcgaaactggatcccagcgggcaagcacgcactcactgtctcctatttctacgatgccacccgcaatgtgtaccgcatcatcagcatcggaggcgccaaggccatcatcaacagcactgtcactcccaacatgaccttcaccaaaacttcccagaagttcgggcagtgggccgacagtcgcgccaacacagtctacggcctgggctttgcctctgaacagcatctgacacagtttgccgagaagttccaggaagtgaaggaagcagccaggctggccagggagaaatctcaggatggcggggagctcaccagtccagccctggggctcgcctcccaccaggtgcccccgagccctctcgtcagtgccaacggccccggcga

SEQ ID NO: 141358 - DNA, 982 bp, Homo sapiens
  Payload ID: 7787
  Gene Symbol: HOMER3
  Gene Name: homer scaffolding protein 3
  Uniprot ID: Q9NSC5
  ENST ID: ENST00000594439
  CDS Start-End: 1-978
atgtccacagccagggagcagccaatcttcagcacacgggcgcacgtgttccaaattgacccagccaccaagcgaaactggatcccagcgggcaagcacgcactcactgtctcctatttctacgatgccacccgcaatgtgtaccgcatcatcagcatcggaggcgccaaggccatcatcaacagcactgtcactcccaacatgaccttcaccaaaacttcccagaagttcgggcagtgggccgacagtcgcgccaacacagtctacggcctgggctttgcctctgaacagcatctgacacaggtgcccccgagccctctcgtcagtgccaacggccccggcgaggaaaaactgttccgcagccagagcgctgatgcccccggccccacagagcgcgagcggctaaagaagatgttgtctgagggctccgtgggcgaggtacagtgggaggccgagtttttcgcactgcaggacagcaacaacaagctggcaggcgccctgcgagaggccaacgccgccgcagcccagtggaggcagcagctggaggctcagcgtgcagaggccgagcggctgcggcagcgggtggctgagctggaggctcaggcagcttcagaggtgacccccaccggtgagaaggaggggctgggccagggccagtcgctggaacagctggaagctctggtgcaaaccaaggaccaggagattcagaccctgaagagtcagactggggggccccgcgaggccctggaggctgccgagcgtgaggagactcagcagaaggtgcaggacctggagacccgcaatgcggagttggagcaccagctgcgggcgatggagcgcagcctggaggaggcacgggcagagcgggagcgggcgcgggctgaggtgggccgggcagcgcagctgctggacgtcagcctgtttgagctgagtgagctgcgtgagggcctggcccgcctggctgaggctgcgccctgagccg

SEQ ID NO: 141359 - DNA, 770 bp, Homo sapiens
  Payload ID: 7787
  Gene Symbol: HOMER3
  Gene Name: homer scaffolding protein 3
  ENST ID: ENST00000599097
  CDS Start-End: 514-770
aggggtccggacgtcccggacccagggactggaggggtggcagggggtcctcgaagtttaggagtctaggacaacgcggaggaccggggtcccggacccagttagaggaggagtcacgaagggagtccccggagttaccgacctggggttggaggaggcagaagaggtgtcccccgaagttctggacccagagacagggggcgtcgcgggaatctcggaagttccagggtcagagcccgcgtcccggagttggggcgtgcactgggtgtcctgcctcgggtggggatgggatcctgaattaatattaacccccccgtcccccgcactcgggtgcatgggatggggcctcatccaccggccagattggggatcccgggcaccgggcggtgtcggacccccctccgggagccccgtggccggcggcatccgaggcgcatgactagttggggccaaaccagtgctcctgccacctctctggctgccccctagagcctgcccatcccagcctgaccaatgtccacagccagggagcagccaatcttcagcacacgggcgcacgtgttccaaattgacccagccaccaagcgaaactggatcccagcgggcaagcacgcactcactgtctcctatttctacgatgccacccgcaatgtgtaccgcatcatcagcatcggaggcgccaaggccatcatcaacagcactgtcactcccaacatgaccttcaccaaaacttcccagaagttcgggcagtgggccgacagtcgcgccaa

SEQ ID NO: 141360 - DNA, 866 bp, Homo sapiens
  Payload ID: 7787
  Gene Symbol: HOMER3
  Gene Name: homer scaffolding protein 3
  ENST ID: ENST00000596482
  CDS Start-End: 137-866
gcggcggccgcgtcgggaccggccgcgatgggaccggaggcggcgcgggcggcggcggcgcagacaaaggggccaaaccagtgctcctgccacctctctggctgccccctagagcctgcccatcccagcctgaccaatgtccacagccagggagcagccaatcttcagcacacgggcgcacgtgttccaaattgacccagccaccaagcgaaactggatcccagcgggcaagcacgcactcactgtctcctatttctacgatgccacccgcaatgtgtaccgcatcatcagcatcggaggcgccaaggccatcatcaacagcactgtcactcccaacatgaccttcaccaaaacttcccagaagttcgggcagtgggccgacagtcgcgccaacacagtctacggcctgggctttgcctctgaacagcatctgacacagtttgccgagaagttccaggaagtgaaggaagcagccaggctggccagggagaaatctcaggatggcggggagctcaccagtccagccctggggctcgcctcccaccaggtgcccccgagccctctcgtcagtgccaacggccccggcgaggaaaaactgttccgcagccagagcgctgatgcccccggccccacagagcgcgagcggctaaagaagatgttgtctgagggctccgtgggcgaggtacagtgggaggccgagtttttcgcactgcaggacagcaacaacaagctggcaggcgccctgcgagaggccaacgccgccgcagcccagtggaggcagcagctggaggctcagcgtgcagaggccgagcggctgcggcagcgggtggctgagctggaggctcaggcagcttcagaggtgaccc

SEQ ID NO: 141361 - DNA, 16389 bp, Homo sapiens
  Payload ID: 7788
  Gene Symbol:
  Gene Name: Homo sapiens Fc fragment of IgG binding protein (FCGBP), mRNA. [Source:RefSeq mRNA
  Acc:NM_003890]
  Uniprot ID: Q9Y6R7
  ENST ID: ENST00000628705
  CDS Start-End: 9-16226
ctgcagccatgggtgccctatggagctggtggatactctgggctggagcaaccctcctgtggggattgacccaggaggcttcagtggacctcaagaacactggcagagaggaattcctcacagccttcctgcagaactatcagctggcctacagcaaggcctacccccgcctccttatctccagtctgtcagagagccccgcttcagtctccatcctcagccaggcagacaacacctcaaagaaggtcacagtgaggcccggggagtcggtcatggtcaacatcagtgccaaggctgagatgataggcagcaagatcttccagcatgcggtggtgatccattctgactatgccatctctgtgcaggcactaaatgccaagcctgacacagcggagctgacactgctgcggcccatccaggccctaggcaccgagtattttgtgctcacaccccccggcacctcagccaggaatgtcaaggagtttgccgtggtggccggtgccgcaggtgcctcggtcagtgtcacgctgaaggggtcagtgacattcaatggcaagttctatccagcaggcgatgtcctaagagtgactctacagccctacaatgtggcccagctacagagctcagtggatctctcggggtcaaaggtcacagctagtagccccgtggctgtcctctctggccacagctgtgcgcagaaacatacgacctgcaaccatgtggttgagcagctgctacccacgtctgcctggggcacccactatgtagtacccacgctggcctcccaatctcgctatgatttggccttcgttgtggccagccaggccacaaagctgacctacaaccatgggggtatcactggctcccgtgggctccaggcaggtgatgtggtagagtttgaggtccggccatcctggccactctacctgtctgcaaatgtgggcatccaggtcctgttgtttggcacaggtgccataaggaatgaagtgacttatgacccctacctggtcctgatcccagatgtggcggcctactgcccagcctatgtggtcaagagtgtaccaggctgtgagggcgtggccctggtagtggcacagacgaaggctatcagcgggctgaccatagatgggcatgcagtgggggccaagctcacctgggaggctgtgccaggcagtgagttctcgtatgctgaagtggagctcggcacagctgacatgatccacacggccgaggccaccaccaacttgggactgctcaccttcgggctggccaaggctataggctacgcaacagctgctgattgcggccggactgtactgtccccagtggagccctcctgcgaaggcatgcagtgcgcagccgggcagcgctgccaggtggtaggcgggaaggccgggtgtgtggcggagtccaccgctgtctgccgcgcccagggcgacccccattacaccaccttcgacggccgtcgctacgacatgatgggcacctgttcgtacacgatggtggagctgtgcagcgaggacgacaccctgcccgccttcagcgtggaggccaagaacgagcaccggggcagccgccgcgtctcctacgtgggcctcgtcactgtgcgcgcctacagccactctgtgtcgctgacccgcggtgaagttggcttcgtcctggttgacaaccagcgctcgcgcctgccagtctccctgagtgagggtcgcctgcgtgtgtaccagagcggaccacgggccgtggtggagctggtctttgggctggtggtcacttatgactgggactgccagctggcactcagcctgcctgcacgcttccaagaccaggtgtgcgggctgtgtggcaactataatggtgacccagcagacgacttcctcacgcctgacggggctctggctcctgacgctgtggagttcgcaagtagctggaagctggatgatggggactacctgtgtgaggatggctgccagaacaactgtcccgcctgcaccccaggccaggcccaacactatgagggcgaccgactctgtggcatgctgaccaagctcgatggccccttcgctgtctgccatgacaccctggaccccaggcccttcctggagcagtgtgtatatgacctgtgtgtggtcggtggggagcggctcagcctgtgccgtggcctcagcgcctatgcccaggcctgtctggagcttggcatctcggttggggactggagatcaccagccaactgccccctgtcctgccctgccaacagccgctatgagctctgcggccctgcttgcccgacctcctgcaacggggctgcggcgccgtccaactgctccgggcgcccctgcgtggagggctgcgtgtgcctcccaggcttcgtggccagcggcggcgcctgcgtgccggcctcgtcgtgtggctgcaccttccagggtctccagctcgctccgggccaggaagtgtgggcggacgagttgtgccaaaggcgctgcacctgcaacggcgccacccatcaggtcacctgccgcgacaagcagagctgcccggcgggtgagcgctgcagcgtccagaacggcctcctgggctgctaccccgatcgcttcgggacctgccaggggtccggggacccacactatgtgagcttcgacggccggcgcttcgacttcatgggcacctgcacgtacctgctggtcggctcatgcggccagaacgcagcgctgcctgccttccgggtgctggtggaaaacgagcatcggggcagccagactgtgagctacacgcgcgccgtgcgggtggaggcccgcggggtgaaggtggccgtgcgccgggagtaccccgggcaagtgctggtggatgacgtccttcagtatctgcccttccaagcagcagatgggcaggtgcaggtgttccgacagggcagggatgccgtcgtgcgcacggactttggcctgactgtcacttatgactggaatgcacgagtgactgccaaggtgcccagcagctatgctgaggccctgtgtggactctgtgggaacttcaacggggacccagctgatgacctggctctgcggggtgggggtcaagctgccaatgcactggcctttgggaacagctggcaagaagagacgaggcccggctgtggagcaactgaaccgggtgactgtcccaagctggactccctggtggcccagcagctgcagagcaagaatgagtgtggaatccttgccgaccccaaggggcccttccgggagtgccatagcaagctggacccccagggtgccgtgcgcgactgtgtctatgaccgctgcctgctgccaggccagtctgggccactgtgtgacgcactggccacctatgctgctgcatgccaggctgctggagccacagtgcacccctggaggagtgaagaactttgcccactgagctgcccaccccacagccactatgaggcgtgttcctacggctgcccgctgtcctgtggagacctcccagtgcccgggggctgtggctcagaatgccatgagggctgcgtgtgcgatgagggctttgcgctcagtggtgagtcctgcctgcccctggcctcctgtggctgcgtacaccagggcacctaccacccaccaggccagaccttctaccctggccccggatgtgattccctttgccactgccaggagggcggcctggtgtcctgtgagtcctccagctgcggaccgcacgaggcctgccagccatccggtggcagcttgggctgtgtggccgtgggctctagcacctgccaggcgtcaggagacccccactacaccaccttcgatggccgccgcttcgacttcatgggcacctgcgtgtatgtgctggctcagacctgcggcacccggcctggcctgcatcggtttgccgtcctgcaggagaacgtggcctggggtaatgggcgagtcagtgtgaccagggtgatcacggtccaggtggcaaacttcaccctgcggctggagcagagacagtggaaggtcacggtgaacggtgtggacatgaagctgcccgtggtgctggccaacggccagatccgtgcctcccagcatggttcagatgttgtgattgagaccgacttcggcctgcgtgtggcctacgaccttgtgtactatgtgcgggtcaccgtccccggaaactactaccagcagatgtgtggcctgtgtgggaactacaacggcgaccccaaggatgacttccagaagcccaatggctcacaggcaggcaacgccaatgagttcggcaactcctgggaggaggtggtgcccgactctccctgcctgccgcccaccccttgcccgccggggagcgaggactgtatccccagccacaagtgtcctcccgagctggagaagaagtatcagaaggaggagttctgtgggctcctctccagccccacagggccactgtcctcctgccacaagctggtggatccccagggtcccttgaaagattgcatctttgatctctgcctgggtggtgggaacctgagcattctctgcagcaacatccatgcctacgtgagtgcttgccaggcggctggaggccacgtggagccctggaggactgaaactttctgtcccatggagtgccctccgaacagtcactacgagctctgtgcggacacctgctccctgggctgctcagctctcagtgcccctccacagtgccaggatgggtgtgctgagggctgccagtgtgactccggcttcctctacaatggccaagcctgcgtgcccatccagcaatgcggctgctaccacaatggtgtctactatgagccggagcagacagtcctcattgacaactgtcggcagcagtgcacgtgccatgcgggtaaaggcatggtgtgccaggaacacagctgcaagccggggcaggtgtgccagccctccggaggcatcctgagctgcgtcaccaaagacccgtgccacggcgtgacatgccggccacaggagacatgcaaggagcagggtggccagggcgtgtgcctgcccaactatgaggccacgtgctggctgtggggcgacccacactaccactccttcgatggccggaagtttgacttccagggcacctgtaactatgtgctggcaacaactggctgcccgggggtcagcacccagggcctgacacccttcaccgtcaccaccaagaaccagaaccggggcaaccctgctgtgtcctacgtgagagtcgtcaccgtggctgccctcggcaccaacatctccatccacaaggacgagatcggcaaagtccgggtgaacggtgtgctcacagccttgcctgtctctgtggccgacgggcggatttcagtgacccagggtgcatcgaaggcactgctggtggctgactttggactgcaagtcagctatgactggaactggcgggtagacgtgacgctgcccagcagctatcatggcgcagtgtgcgggctctgcggtaacatggaccgcaaccccaacaatgaccaggtcttccctaatggcacactggctccctccatacccatctggggcggcagctggcgagccccaggctgggacccactgtgttgggacgaatgtcgggggtcctgcccaacgtgccctgaggaccggttggagcagtacgagggccctggcttctgcggacccctggcccccggcacagggggccctttcaccacctgccatgctcatgtgccacctgagagcttcttcaagggctgtgttctggacgtctgcatgggtggtggggaccgtgacattctttgcaaggctctggcttcctatgtggccgcctgccaggctgctggggttgtcatcgaagactggcgggcacaggttggctgtgagatcacctgcccagaaaacagccactatgaggtctgtggctcaccctgcccggccagctgtccgtcccctgcaccccttacgacgccagccgtatgtgagggcccctgtgtggagggctgccagtgcgacgcgggtttcgtgttaagtgctgaccgctgtgttcccctcaacaacggctgcggctgctgggccaatggcacctaccacgaggcgggcagtgagttttgggctgatggcacctgctcccagtggtgtcgctgcgggcctgggggtggctcgctggtctgcacacctgccagctgtgggctgggtgaagtgtgtggcctcctgccatccggccagcacggctgccagcccgtcagcacagctgagtgccaggcgtggggtgacccccattacgtcactctggatgggcaccgattcaatttccaaggcacctgcgagtacctgctgagtgcaccctgccacggaccacccttgggggctgagaacttcactgtcactgtagccaatgagcaccggggcagccaggctgtcagctacacccgcagtgtcaccctgcaaatctacaaccacagcctgacactgagtgcccgctggccccggaagctacaggtggacggcgtgttcgtcactctgcccttccagctggactcgctcctgcacgcacacctgagcggcgccgacgtggtggtgaccacaacctcagggctctcgctggctttcgacggggacagcttcgtgcgcctgcgcgtgccggcggcgtacgcgggctctctctgtggcttatgcgggaactacaaccaggaccccgcagacgacctgaaggcggtgggcgggaagcccgccggatggcaggtgggcggcgcccagggctgcggggaatgtgtgtccaagccatgcccgtcgccgtgcaccccagagcagcaagagtccttcggcggcccggacgcctgcggcgtgatctccgccaccgacggcccgctggcgccctgccacggccttgtgccgcccgcgcagtacttccagggctgcttgctggacgcctgccaagttcagggccatcctggaggcctctgtcctgcagtggccacctacgtggcagcctgtcaggccgctggggcccagctccgcgagtggaggcggccggacttctgtcccttccagtgccctgcccacagccactacgagctctgcggtgactcctgtcctgggagctgcccgagcctgtcggcacccgagggctgtgagtcggcctgccgtgaaggctgtgtctgcgatgctggcttcgtgctcagtggtgacacgtgtgtacctgtgggccagtgtggctgcctccacgatgaccgctactacccactgggccagaccttctaccctggccctgggtgtgattccctttgccgctgccgggagggcggtgaggtgtcctgtgagccctccagctgcggcccgcatgagacctgccggccatccggtggcagcttgggctgcgtggccgtgggctctaccacctgccaggcgtcgggagatccccactacaccaccttcgatggccgccgcttcgacttcatgggcacctgcgtgtatgtgctggctcagacctgcggcacccggcctggcctacatcggtttgccgtcctgcaggagaacgtggcctggggtaatgggcgagtcagtgtgaccagggtgatcacggtccaggtggcaaacttcaccctgcggctggagcagagacagtggaaggtcacggtgaacggtgtggacatgaagctgcccgtggtgctggccaacggccagatccgtgcctcccagcatggttcagatgttgtgattgagaccgacttcggcctgcgtgtggcctacgaccttgtgtactatgtgcgggtcaccgtccctggaaactactaccagctgatgtgtggcctgtgtgggaactacaacggcgaccccaaggatgacttccagaagcccaatggctcgcaggcaggcaacgccaatgagttcggcaactcctgggaggaggtggtgcccgactctccctgcctgccgccgcccacctgcccgccggggagcgagggctgtatccccagcgaggagtgtcctcccgagctggagaagaagtatcagaaggaggagttctgtgggctcctctccagccccacagggccactgtcctcttgccacaagctggtggatccccagggtcccttgaaagattgcatctttgatctctgcctgggtggtgggaacctgagcattctctgcagcaacatccatgcctacgtgagtgcttgccaggcagctggaggccaggtggagccctggaggaatgaaactttctgtcccatggaatgccctcagaacagtcactacgagctctgtgcggacacctgctccctgggctgctcggctctcagtgcccctctgcagtgcccagatgggtgtgctgagggctgccagtgtgactccggcttcctctacaacggccaagcctgcgtgcccatccagcaatgtggctgctaccacaatggtgcctactatgagccggagcagacagtcctcattgacaactgtcggcagcagtgcacgtgccatgtgggtaaagtcgtggtgtgccaggaacacagctgcaagccggggcaggtgtgccagccctccggaggcatcctgagctgcgtcaacaaagacccgtgccacggcgtgacatgccggccacaggagacatgcaaggagcagggtggccagggcgtgtgcctgcccaactatgaggccacgtgctggctgtggggcgacccacactaccactccttcgatggccggaagtttgacttccagggcacctgtaactatgtgctggcaacaactggctgcccgggggtcagcacccagggcctgacacccttcaccgtcaccaccaagaaccagaaccggggcaaccctgctgtgtcctacgtgagagtcgtcaccgtggctgccctcggcaccaacatctccatccacaaggacgagatcggcaaagtccgggtgaacggtgtgctcacagccttgcctgtctctgtggccgacgggcggatttcagtgacccagggtgcatcgaaggcactgctggtggctgactttggactgcaagtcagctatgactggaactggcgggtagacgtgacgctgcccagcagctatcatggcgcagtgtgcgggctctgcggtaacatggaccgcaaccccaacaatgaccaggtcttccctaatggcacactggctccctccatacccatctggggcggcagctggcgagccccaggctgggacccactgtgttgggacgaatgtcgggggtcctgcccaacgtgccctgaggaccggttggagcagtacgagggccctggcttctgcggacccctggcccccggcacagggggccctttcaccacctgccatgctcatgtgccacctgagagcttcttcaagggctgtgttctggacgtctgcatgggtggtggggaccgtgacattctttgcaaggctctggcttcctatgtggccgcctgccaggctgctggggttgtcatcgaagactggcgggcacaggttggctgtgagatcacctgcccagaaaacagccactatgaggtctgtggcccaccctgcccggccagctgtccgtcccctgcaccccttacgacgccagccgtatgtgagggcccctgtgtggagggctgccagtgcgacgcgggtttcgtgttaagtgctgaccgctgtgttcccctcaacaacggctgcggctgctgggccaatggcacctaccacgaggcgggcagtgagttttgggctgatggcacctgctcccagtggtgtcgctgcgggcctgggggtggctcgctggtctgcacacctgccagctgtgggctgggtgaagtgtgtggcctcctgccatccggccagcacggctgccagcccgtcagcacagctgagtgccaggcgtggggtgacccccattacgtcactctggatgggcaccgattcgatttccaaggcacctgcgagtacctgctgagtgcaccctgccacggaccacccttgggggctgagaacttcactgtcactgtagccaatgagcaccggggcagccaggctgtcagctacacccgcagtgtcaccctgcaaatctacaaccacagcctgacactgagtgcccgctggccccggaagctacaggtggacggcgtgttcgtcactctgcccttccagctggactcgctcctgcacgcacacctgagcggcgccgacgtggtggtgaccacaacctcagggctctcgctggctttcgatggggacagcttcgtgcgcctgcgcgtgccggcggcgtacgcgggctctctctgtggcttatgcgggaactacaaccaggaccccgcagacgacctgaaggcggtgggcgggaagcccgccggatggcaggtgggcggcgcccagggctgcggggaatgtgtgtccaagccatgcccgtcgccgtgcaccccagagcagcaagagtccttcggcggcccggacgcctgcggcgtgatctccgccaccgacggcccgctggcgccctgccacggccttgtgccgcccgcgcagtacttccagggctgcttgctggacgcctgccaagttcagggccatcctggaggcctctgtcctgcagtggccacctacgtggcagcctgtcaggccgctggggcccagctccgcgagtggaggcggccggacttctgtcccttccagtgccctgcccacagccactacgagctctgcggtgactcctgtcctgggagctgcccgagcctgtcggcacccgagggctgtgagtcggcctgccgtgaaggctgtgtctgcgatgctggcttcgtgctcagtggtgacacgtgtgtacctgtgggccagtgtggctgcctccacgatgaccgctactacccactgggccagaccttctaccctggccctgggtgtgattccctttgccgctgccgggagggcggtgaggtgtcctgtgagccctccagctgcggcccgcatgagacctgccggccatccggtggcagcttgggctgcgtggccgtgggctctaccacctgccaggcgtcgggagatccccactacaccaccttcgatggccaccgcttcgacttcatgggcacctgcgtgtatgtgctggctcagacctgcggcacccggcctggcctgcatcggtttgccgtcctgcaggagaacgtggcctggggtaatgggcgagtcagtgtgaccagggtgatcacggtccaggtggcaaacttcaccctgcggctggagcagagacagtggaaggtcacggtgaacggtgtggacatgaagctgcccgtggtgctggccaacggccagatccgtgcctcccagcatggttcagatgttgtgattgagaccgacttcggcctgcgtgtggcctacgaccttgtgtactatgtgcgggtcaccgtccctggaaactactaccagctgatgtgtggcctgtgtgggaactacaacggcgaccccaaggatgacttccagaagcccaatggctcgcaggcaggcaacgccaatgagttcggcaactcctgggaggaggtggtgcccgactctccctgcctgccgccgcccacctgcccgccggggagcgcgggctgtatccccagcgacaagtgtcctcccgagctggagaagaagtatcagaaggaggagttctgtgggctcctctccagccccacagggccactgtcctcctgccacaagctggtggatccccagggtcccttgaaagattgcatctttgatctctgcctgggtggtgggaacctgagcattctctgcagcaacatccatgcctacgtgagtgcttgccaggcggctggaggccacgtggagccctggaggaatgaaactttctgtcccatggaatgccctcagaacagtcactacgagctctgtgcggacacctgctccctgggctgctcggctctcagtgcccctctgcagtgcccagatgggtgtgctgagggctgccagtgtgactccggcttcctctacaacggccaagcctgcgtgcccatccagcaatgtggctgctaccacaatggtgtctactatgagccggagcagacagtcctcattgacaactgtcggcagcagtgcacgtgccatgtgggtaaagtcgtggtgtgccaggaacacagctgcaagccggggcaggtgtgccagccctccggaggcatcctgagctgcgtcaccaaagacccgtgccacggcgtgacatgccggccacaggagacatgcaaggagcagggtggccagggcgtgtgcctgcccaactatgaggccacgtgctggctgtggggcgacccacactaccactccttcgatggccggaagtttgacttccagggcacctgtaactatgtgctggcaacaactggctgcccgggggtcagcacccagggcctgacacccttcaccgtcaccaccaagaaccagaaccggggcaaccctgctgtgtcctacgtgagagtcgtcaccgtggctgccctcggcaccaacatctccatccacaaggacgagatcggcaaagtccgggtgaacggtgtgctcacagccttgcctgtctccgtggccgacgggcggatttcagtggcccagggtgcatcgaaggcactgctggtggctgactttggactgcaagtcagctatgactggaactggcgggtagacgtgacgctccccagcagctatcatggcgcagtgtgcgggctctgcggtaacatggaccgcaaccccaacaatgaccaggtcttccctaatggcacactggctccctccatacccatctggggcggcagctggcgagccccaggctgggacccactgtgttgggacgaatgtcgggggtcctgcccaacgtgccctgaggaccggttggagcagtacgagggccctggcttctgcggacccctttcatctggcacagggggccccttcaccacctgccatgctcatgtgccacctgagagcttcttcaagggctgtgttctggacgtctgcatgggtggtggggaccgtgacattctttgcaaggctctggcttcctacgtggccgcctgccaggccgctggggttgtcatcgaagactggcgggcacaggttggctgtgagatcacctgcccagaaaacagccactatgaggtctgtggcccaccctgcccagccagctgtccgtcccctgcaccccttacgacgccagccgtatgtgagggcccctgtgtggagggctgccagtgcgacgcgggtttcgtgttaagtgctgaccgctgtgttcccctcaacaacggctgcggctgctgggccaatggcacctaccacgaggcgggcagtgagttttgggctgatggcacctgctcccagtggtgtcgctgcgggcctgggggtggctcgctggtctgcacacctgccagctgtgggctgggtgaagtgtgtggcctcctgccatccggccagcacggctgccagcccgtcagcacagctgagtgccaggcgtggggtgacccccattacgtcactctggatgggcaccgattcgatttccaaggcacctgcgagtacctgctgagtgcaccctgccacggaccacccttgggggctgagaacttcactgtcactgtagccaatgagcaccggggcagccaggctgtcagctacacccgcagtgtcaccctgcaaatctacaaccacagcctgacactgagtgcccgctggccccggaagctacaggtcgacggcgtgttcgtggctctgcctttccagctggactcgctcctgcacgcacacctgagcggcgccgacgtggtggtgaccacaacctcagggctctcgctggctttcgatggggacagcttcgtgcgcctgcgcgtgccggcggcgtacgcggcctctctctgtggcttatgcgggaactacaaccaggaccccgcagacgacctcaaggctgtgggcgggaagcccgctggatggcaggtgggcggggcccagggctgcggggaatgtgtgtccaagccatgcccgtcgccgtgcaccccagagcagcaggagtccttcggcggcccggacgcctgcggcgtgatctccgccaccgacggcccgctggcaccctgccacggccttgtgccgcccgcgcagtacttccagggctgcttgctggacgcctgccaagttcagggccatcctggaggcctctgtcctgcagtggctacctacgtggcagcctgtcaggccgctggggcccagctcggcgagtggaggcggccggacttctgtcccttgcagtgccctgcccacagccactatgagctctgcggtgactcctgccctgtgagctgcccgagcctctcagcacccgagggctgtgagtcggcctgccgtgaaggctgtgtctgcgatgctggcttcgtactcagtggtgacacctgcgtacccgtgggccagtgtggctgcctccatgatggccgctactacccactgggcgaggtcttctacccgggccctgagtgtgagcggcgctgtgagtgtgggccaggtggccatgtcacctgccaggagggcgcagcctgtgggccccatgaggagtgccggttagaggatggtgtccaggcctgtcatgccacaggctgtggccgctgcctggccaacgggggcatccactacatcacccttgatggccgtgtctacgacctgcatggctcctgctcctatgtcttggcccaagtctgccacccaaagcctggggacgaggacttttccatcgtgcttgagaagaatgcagctggagatctccaacgcctcctggttactgtggctggccaggttgtgagcctagctcaggggcagcaggtcaccgtggacggcgaggctgtggccctgcctgtggctgtgggccgcgtgcgggtgaccgccgagggccgaaacatggttctgcagacgaccaaggggctgcggcttctctttgatggcgatgcccacctcctcatgtccatccccagccccttccgtggacggctctgtggcctctgtgggaacttcaatggcaactggagtgacgactttgtcctgcccaatggctcagcagcgtccagtgtggagaccttcggggctgcatggcgggcgcccggctcctccaagggctgtggcgagggctgcgggccccaaggctgcccagtgtgcttggcagaggagactgcaccctatgagagcaacgaggcctgcgggcagctccggaacccccagggccccttcgcgacctgccaggcggtgctgagtccctctgagtacttccgccaatgcgtatacgacctgtgcgcgcaaaagggtgacaaagccttcctgtgccgcagcctggcagcctacacggcggcctgtcaggcagctggcgtggccgtgaagccctggaggacagacagcttctgcccgctccattgccccgcccacagccactactccatctgcactcgcacctgccagggatcctgtgcggctctctccggcctcacgggctgcaccacccgctgttttgagggctgtgagtgcgacgaccgcttcctgctttcccagggtgtctgcatccctgtccaagattgtggctgcacccataatggccgatacttgccggtaaactcctccctgctgacctcagactgcagcgagcgctgttcctgttcctcaagctctggcctgacatgccaggcagctggctgcccaccaggccgtgtatgtgaggtcaaggctgaagcccggaactgctgggccacccgtggtctctgtgtcctgtctgtgggtgccaacctcaccacctttgatggggcccgtggtgccaccacctctcctggtgtctatgagctctcttcccgctgcccaggactacagaataccatcccctggtaccgtgtagttgccgaagtccagatctgccatggcaaaacggaggctgtgggccaggtccacatcttcttccaggatgggatggtgacgttgactccaaacaagggtgtgtgggtgaatggtctccgagtggatctcccagctgagaagttagcatctgtgtccgtgagtcgtacacctgatggctccctgctagtccgccagaaggcaggggtccaggtgtggcttggagccaatgggaaggtggctgtgattgtcagcaatgaccatgctgggaaactgtgtggggcctgtggaaactttgacggggaccagaccaatgattggcatgactcccaggagaagccagcgatggagaaatggagagcgcaggacttctccccatgttatggctgatcagtcatccaccaggaacgaagatttcctgaagaagacctggtccctctggaggttgcagtggctgaaggatgcatcatgtgctcctaccctgctctaccgcttttctgggtcacagaggccaaatgtgagagcattgaataaatatcttaagctaagctgc

SEQ ID NO: 141362 - DNA, 8700 bp, Homo sapiens
  Payload ID: 7789
  Gene Symbol:
  Gene Name: Homo sapiens phosphatase and tensin homolog (PTEN), transcript variant 1, mRNA. [Source:RefSeq mRNA
  Acc:NM_001304717]
  ENST ID: ENST00000634767
  CDS Start-End: 513-2243
cctcccctcgcccggcgcggtcccgtccgcctctcgctcgcctcccgcctcccctcggtcttccgaggcgcccgggctcccggcgcggcggcggagggggcgggcaggccggcgggcggtgatgtggcgggactctttatgcgctgcggcaggatacgcgctcggcgctgggacgcgactgcgctcagttctctcctctcggaagctgcagccatgatggaagtttgagagttgagccgctgtgaggcgaggccgggctcaggcgagggagatgagagacggcggcggccgcggcccggagcccctctcagcgcctgtgagcagccgcgggggcagcgccctcggggagccggccggcctgcggcggcggcagcggcggcgtttctcgcctcctcttcgtcttttctaaccgtgcagcctcttcctcggcttctcctgaaagggaaggtggaagccgtgggctcgggcgggagccggctgaggcgcggcggcggcggcggcacctcccgctcctggagcgggggggagaagcggcggcggcggcggccgcggcggctgcagctccagggagggggtctgagtcgcctgtcaccatttccagggctgggaacgccggagagttggtctctccccttctactgcctccaacacggcggcggcggcggcggcacatccagggacccgggccggttttaaacctcccgtccgccgccgccgcaccccccgtggcccgggctccggaggccgccggcggaggcagccgttcggaggattattcgtcttctccccattccgctgccgccgctgccaggcctctggctgctgaggagaagcaggcccagtcgctgcaaccatccagcagccgccgcagcagccattacccggctgcggtccagagccaagcggcggcagagcgaggggcatcagctaccgccaagtccagagccatttccatcctgcagaagaagccccgccaccagcagcttctgccatctctctcctcctttttcttcagccacaggctcccagacatgacagccatcatcaaagagatcgttagcagaaacaaaaggagatatcaagaggatggattcgacttagacttgacctatatttatccaaacattattgctatgggatttcctgcagaaagacttgaaggcgtatacaggaacaatattgatgatgtagtaaggtttttggattcaaagcataaaaaccattacaagatatacaatctttgtgctgaaagacattatgacaccgccaaatttaattgcagagttgcacaatatccttttgaagaccataacccaccacagctagaacttatcaaacccttttgtgaagatcttgaccaatggctaagtgaagatgacaatcatgttgcagcaattcactgtaaagctggaaagggacgaactggtgtaatgatatgtgcatatttattacatcggggcaaatttttaaaggcacaagaggccctagatttctatggggaagtaaggaccagagacaaaaagggagtaactattcccagtcagaggcgctatgtgtattattatagctacctgttaaagaatcatctggattatagaccagtggcactgttgtttcacaagatgatgtttgaaactattccaatgttcagtggcggaacttgcaatcctcagtttgtggtctgccagctaaaggtgaagatatattcctccaattcaggacccacacgacgggaagacaagttcatgtactttgagttccctcagccgttacctgtgtgtggtgatatcaaagtagagttcttccacaaacagaacaagatgctaaaaaaggacaaaatgtttcacttttgggtaaatacattcttcataccaggaccagaggaaacctcagaaaaagtagaaaatggaagtctatgtgatcaagaaatcgatagcatttgcagtatagagcgtgcagataatgacaaggaatatctagtacttactttaacaaaaaatgatcttgacaaagcaaataaagacaaagccaaccgatacttttctccaaattttaaggtgaagctgtacttcacaaaaacagtagaggagccgtcaaatccagaggctagcagttcaacttctgtaacaccagatgttagtgacaatgaacctgatcattatagatattctgacaccactgactctgatccagagaatgaaccttttgatgaagatcagcatacacaaattacaaaagtctgaatttttttttatcaagagggataaaacaccatgaaaataaacttgaataaactgaaaatggacctttttttttttaatggcaataggacattgtgtcagattaccagttataggaacaattctcttttcctgaccaatcttgttttaccctatacatccacagggttttgacacttgttgtccagttgaaaaaaggttgtgtagctgtgtcatgtatatacctttttgtgtcaaaaggacatttaaaattcaattaggattaataaagatggcactttcccgttttattccagttttataaaaagtggagacagactgatgtgtatacgtaggaattttttccttttgtgttctgtcaccaactgaagtggctaaagagctttgtgatatactggttcacatcctacccctttgcacttgtggcaacagataagtttgcagttggctaagagaggtttccgaagggttttgctacattctaatgcatgtattcgggttaggggaatggagggaatgctcagaaaggaaataattttatgctggactctggaccatataccatctccagctatttacacacacctttctttagcatgctacagttattaatctggacattcgaggaattggccgctgtcactgcttgttgtttgcgcatttttttttaaagcatattggtgctagaaaaggcagctaaaggaagtgaatctgtattggggtacaggaatgaaccttctgcaacatcttaagatccacaaatgaagggatataaaaataatgtcataggtaagaaacacagcaacaatgacttaaccatataaatgtggaggctatcaacaaagaatgggcttgaaacattataaaaattgacaatgatttattaaatatgttttctcaattgtaacgacttctccatctcctgtgtaatcaaggccagtgctaaaattcagatgctgttagtacctacatcagtcaacaacttacacttattttactagttttcaatcataatacctgctgtggatgcttcatgtgctgcctgcaagcttcttttttctcattaaatataaaatattttgtaatgctgcacagaaattttcaatttgagattctacagtaagcgttttttttctttgaagatttatgatgcacttattcaatagctgtcagccgttccacccttttgaccttacacattctattacaatgaattttgcagttttgcacattttttaaatgtcattaactgttagggaattttacttgaatactgaatacatataatgtttatattaaaaaggacatttgtgttaaaaaggaaattagagttgcagtaaactttcaatgctgcacacaaaaaaaagacatttgatttttcagtagaaattgtcctacatgtgctttattgatttgctattgaaagaatagggtttttttttttttttttttttttttttttaaatgtgcagtgttgaatcatttcttcatagtgctcccccgagttgggactagggcttcaatttcacttcttaaaaaaaatcatcatatatttgatatgcccagactgcatacgattttaagcggagtacaactactattgtaaagctaatgtgaagatattattaaaaaggtttttttttccagaaatttggtgtcttcaaattataccttcaccttgacatttgaatatccagccattttgtttcttaatggtataaaattccattttcaataacttattggtgctgaaattgttcactagctgtggtctgacctagttaatttacaaatacagattgaataggacctactagagcagcatttatagagtttgatggcaaatagattaggcagaacttcatctaaaatattcttagtaaataatgttgacacgttttccataccttgtcagtttcattcaacaatttttaaatttttaacaaagctcttaggatttacacatttatatttaaacattgatatatagagtattgattgattgctcataagttaaattggtaaagttagagacaactattctaacacctcaccattgaaatttatatgccaccttgtctttcataaaagctgaaaattgttacctaaaatgaaaatcaacttcatgttttgaagatagttataaatattgttctttgttacaatttcgggcaccgcatattaaaacgtaactttattgttccaatatgtaacatggagggccaggtcataaataatgacattataatgggcttttgcactgttattatttttcctttggaatgtgaaggtctgaatgagggttttgattttgaatgtttcaatgtttttgagaagccttgcttacattttatggtgtagtcattggaaatggaaaaatggcattatatatattatatatataaatatatattatacatactctccttactttatttcagttaccatccccatagaatttgacaagaattgctatgactgaaaggttttcgagtcctaattaaaactttatttatggcagtattcataattagcctgaaatgcattctgtaggtaatctctgagtttctggaatattttcttagactttttggatgtgcagcagcttacatgtctgaagttacttgaaggcatcacttttaagaaagcttacagttgggccctgtaccatcccaagtcctttgtagctcctcttgaacatgtttgccatacttttaaaagggtagttgaataaatagcatcaccattctttgctgtggcacaggttataaacttaagtggagtttaccggcagcatcaaatgtttcagctttaaaaaataaaagtagggtacaagtttaatgtttagttctagaaattttgtgcaatatgttcataacgatggctgtggttgccacaaagtgcctcgtttacctttaaatactgttaatgtgtcatgcatgcagatggaaggggtggaactgtgcactaaagtgggggctttaactgtagtatttggcagagttgccttctacctgccagttcaaaagttcaacctgttttcatatagaatatatatactaaaaaatttcagtctgttaaacagccttactctgattcagcctcttcagatactcttgtgctgtgcagcagtggctctgtgtgtaaatgctatgcactgaggatacacaaaaataccaatatgatgtgtacaggataatgcctcatcccaatcagatgtccatttgttattgtgtttgttaacaaccctttatctcttagtgttataaactccacttaaaactgattaaagtctcattcttgtcattgtgtgggtgttttattaaatgagagtttataattcaaattgcttaagtccattgaagttttaattaatgggcagccaaatgtgaatacaaagttttcagtttttttttttcctgctgtccttcaaagcctactgtttaaaaaaaaaaaaaaaaaaaaacatggcctgagagtagagtatctgtctactcatgtttaattaaggaaaaacacttatttttagggctttagtcatcacttcataaattgtataagcacattaaatagcgttctagtcctgaaaaagtccaagattcttagaaaattgtgcatatttttattatgacagatgtttgaagataattccccagaatggatttgatactttagatttcaattttgtggcttttgtctattattctgtactctgccatcagcatatggaaagcttcatttactcatcatgacttgtgccatataaaaattgatatttcggaatagtctaaaggactttttgtacttgaatttaatcatgttgtttctaatattcttaaaagcttgaagactaaagcatatcctttcaacaaagcatagtaaggtaataagaaagtgtagtttgtacaagtgttaaaaaaataaagtagacaatgttacagtgggacttattatttcaagtttacattttctccatgtaattttttaaaaagtaaatgaaaaaatgtgcaataatgtaaaatatgaagtgtatgtgtacacacattttatttttcggtatcttgggtatacgtatggttgaaaactatactggagtctaaaagtattctaatttataagaagacattttggtgatgtttgaaaaatagaaatgtgctagttttgtttttatatcatgtcctttgtacgttgtaatatgagctggcttggttcagtaaatgccatcaccatttccattgagaatttaaaactcaccagtgtttaatatgcaggcttccaaaggcttatgaaaaaaatcaagacccttaaatctagttaatttgctgctaacatgaaactctttggttcttttatttttgccagataattagacacacatctaaagcttagtcttaaatggcttaagtgtagctattgattagtgctgttgctagttcagaaagaaatgtttgtgaatggaaacaagaatattcagtccaaactgttgtaaggacagtacctgaaaaccaggaaacaggataatggaaaaagtcttttaaagatgaaatgttggagccaactttcttatagaattaattgtatgtggctatagaaagcctaatgattgttgcttatttttgagagcatattattcttttatgaccataatcttgctgtttttccatcttccaaaagatcttccttctaatatgtatatcagaatgtgggtagccagtcagacaaattcatattggttggtagctttaaaaagtttgtaatgtgaagacaggaaaggacaaaatagtttgctttggtggtagtactctggttgttaagctaggtattttgagactacttccccatcacaacaacaataaaataatcactcataatcctatcacctggagacatagccatcgttaatatgttagtgactatacaatcatgttttcttctgtatatccatgtatattctttaaaaatgaaatttatactgtacctgatctcaaagctttttagcttagtatatctgtcatgaatttgtaggatgttccattgcatcagaaaacggacagtgatttgattactttctaatgccacagatgcagattacatgtagttattgagaatcctttcgaattcagtggcttaatcatgaatgtctaaatattgttgacattaggatgatacatgtaaattaaagttacatttgtttagcatagacaagcttaacattgtagatgtttctcttcaaaaatcatcttaaacatttgcatttggaattgtgttaaatagaatgtgtgaaacactgtattagtaaacttcatcacctttctacttccttatagtttgaacttttcagtttttgtagttcccaaacagttgctcaatttagagcaaattaatttaacacctgccaaaaaaaggctgctgttggcttatcagttgtctttaaattcaaatgctcatgtgacttttatcacatcaaaaaatatttcattaatgattcacctttagctctgaaaattaccgcgtttagtaattatagtgggcttataaaaacatgcaactctttttgatagttatttgagaattttggtgaaaaatatttagctgagggcagtatagaacttataaaccaatatattgatatttttaaaacatttttacatataagtaaactgccatctttgagcataactacatttaaaaataaagctgcatatttttaaatcaagtgtttaacaagaatttatattttttattttttaaaattaaaaataatttatatttcctctgttgcatgaggattctcatctgtgcttataatggttagagattttatttgtgtggaatgaagtgaggcttgtagtcatggttctagtgtttcagtttgccaagtctgtttactgcagtgaaattcatcaaatgtttcagtgtggttttctgtagcctatcatttactggctatttttttatgtacacctttaggattttctgcctactctatccagttgtccaaatgatatcctacattttacaaatgccctttcagtttctattttctttttccattaaattgccctcatgtcctaatgtgcagtttgtaagtgtgtgtgtgtgtgtctgtgtgtgtgtgaatttgattttcaagagtgctagacttccaatttgagagattaaataatttaattcaggcaaacatttttcattggaatttcacagttcattgtaatgaaaatgttaatcctggatgacctttgacatacagtaatgaatcttggatattaatgaatttgttagtagcatcttgatgtgtgttttaatgagttattttcaaagttgtgcattaaaccaaagttggcatactggaagtgtttatatcaagttccatttggctactgatggacaaaaaatagaaatgccttcctatggagagtatttttcctttaaaaaattaaaaaggttaattattttgact

SEQ ID NO: 141363 - DNA, 3148 bp, Homo sapiens
  Payload ID: 7790
  Gene Symbol:
  Gene Name: Homo sapiens surfeit 4 (SURF4), transcript variant 2, mRNA. [Source:RefSeq mRNA
  Acc:NM_001280788]
  ENST ID: ENST00000627384
  CDS Start-End: 425-1105
aagacgcaccggggcgggcccgggcggcgcgcggcccctttaaggcttggcctacgtggcagccgctggagccgcagccgacgcggagcgaggccggccgccgggcacttcctgtggaggccgcagcgggtgcgggcgccgacgggcgagagccagcgagcgagcgagcgagccgagccgagcctcccgccgtcgccatgggccagaacgacctgatgggcacggccgaggacttcgccgaccagcgtctgttcctcacacaccccgcccaaggacgtgcctggcagcggcctggtgctccccgccgcagccacctcacccttgggtttctgtggccctgcagttcctccgtgtcacaaagcagtacctgccccacgtggcgcgcctctgtctgatcagcaccttcctggaggacggcatccgtatgtggttccagtggagcgagcagcgcgactacatcgacaccacctggaactgcggctacctgctggcctcgtccttcgtcttcctcaacttgctgggacagctgactggctgcgtcctggtgttgagcaggaacttcgtgcagtacgcctgcttcgggctctttggaatcatagctctgcagacgattgcctacagcattttatgggacttgaagtttttgatgaggaacctggccctgggaggaggcctgttgctgctcctagcagaatcccgttctgaagggaagagcatgtttgcgggcgtccccaccatgcgtgagagctcccccaaacagtacatgcagctcggaggcagggtcttgctggttctgatgttcatgaccctccttcactttgacgccagcttcttttctattgtccagaacatcgtgggcacagctctgatgattttagtggccattggttttaaaaccaagctggctgctttgactcttgttgtgtggctctttgccatcaacgtatatttcaacgccttctggaccattccagtctacaagcccatgcatgacttcctgaaatacgacttcttccagaccatgtcggtgattgggggcttgctcctggtggtggccctgggccctgggggtgtctccatggatgagaagaagaaggagtggtaacagtcacagatccctacctgcctggctaagacccgtggccgtcaaggactggttcggggtggattcaacaaaactgccagcttttatgtatcctcttcccttcccctcccttggtaaaggcacagatgttttgagaactttatttgcagagacacctgagaatcgatggctcagtctgctctggagccacagtctggcgtctgacccttcagtgcaggccagcctggcagctggaagcctcccccacgccgaggctttggagtgaacagcccgcttggctgtggcatctcagtcctatttttgagtttttttgtgggggtacaggagggggccttcaagctgtactgtgagcagacgcattggtattatcattcaaagcagtctccctcttatttgtaagtttacatttttagcggaaactactaaattattttgggtggttcagccaaacctcaaaacagttaatctccctggtttaaaatcacaccagtggctttgatgttgtttctgccccgcattgtattttataggaatagtgaaaacatttagggacacccaaagaatgatgcagtattaaaggggtggtagaagctgctgtttatgataaaagtcatcggtcagaaaatcagcttggattggtgccaagtgttttattgggtaacaccctgggagttttagtagcttgaggcaaggtggaggggcaagaagtccttggggaagctgctggtctgggtgctgctggcctccaagctggcagtgggaagggctagtgagaccacacaggggtagccccagcagcagcaccctgcaagccagcctggccagctgctcagaccagcttgcagagccgcagccgctgtgggcagggggtgtggcaggagctcccagcactggagacccacggactcaacccagttacctcacatggggccttttctgagcaaggtctcgaaagcgcaggccgccctggctgagcagcaccgccctttcccagctgcactcgccctgtggacagccccgacacaccactttcctgaggctgtcgctcactcagattgtccgtttgctatgccgaatgcagccaaaattcctttttacaatttgtgatgccttaccgatttgatcttaatcctgtatttaaagttttctaacactgccttatactgtgtttctctttttgggggagcttaactgcttgttgctccctgtcgtctgcaccatagtaaatgccacaagggtagtcgaacacctctctggcccctagacctatctggggacaggctggctcagcctgtctccagggctgctgcggcccagccccgagcctgcctccctcttggcctctcatccattggctctgcagggcaggggtgaggcaggtttctgctcataagtgcttttggaagtcacctacctttttaacacagccgaactagtcccaacgcgtttgcaaatattcccctggtagcctacttccttacccccgaatattggtaagatcgagcaatggcttcaggacatgggttctcttctcctgtgatcattcaagtgctcactgcatgaagactggcttgtctcagtgtttcaacctcaccagggctgtctcttggtccacacctcgctccctgttagtgccgtatgacagcccccatcaaatgaccttggccaagtcacggtttctctgtggtcaaggttggttggctgattggtggaaagtagggtggaccaaaggaggccacgtgagcagtcagcaccagttctgcaccagcagcgcctccgtcctagtgggtgttcctgtttctcctggccctgggtgggctagggcctgattcgggaagatgcctttgcagggaggggaggataagtgggatctaccaattgattctggcaaaacaatttctaagatttttttgctttatgtgggaaacagatctaaatctcattttatgctgtattttatatcttagttgtgtttgaaaacgttttgatttttggaaacacatcaaaataaataatggcgtttgttgtatgcagtgtgatcct

SEQ ID NO: 141364 - DNA, 2984 bp, Homo sapiens
  Payload ID: 7790
  Gene Symbol:
  Gene Name: Homo sapiens surfeit 4 (SURF4), transcript variant 2, mRNA. [Source:RefSeq mRNA
  Acc:NM_001280788]
  ENST ID: ENST00000629578
  CDS Start-End: 131-940
ggagccgcagccgacgcggagcgaggccggccgccgggcacttcctgtggaggccgcagcgggtgcgggcgccgacgggcgagagccagcgagcgagcgagcgagccgagccgagcctcccgccgtcgccatgggccagaacgacctgatgggcacggccgaggacttcgccgaccagttcctccgtgtcacaaagcagtacctgccccacgtggcgcgcctctgtctgatcagcaccttcctggaggacggcatccgtatgtggttccagtggagcgagcagcgcgactacatcgacaccacctggaactgcggctacctgctggcctcgtccttcgtcttcctcaacttgctgggacagctgactggctgcgtcctggtgttgagcaggaacttcgtgcagtacgcctgcttcgggctctttggaatcatagctctgcagacgattgcctacagcattttatgggacttgaagtttttgatgaggaacctggccctgggaggaggcctgttgctgctcctagcagaatcccgttctgaagggaagagcatgtttgcgggcgtccccaccatgcgtgagagctcccccaaacagtacatgcagctcggaggcagggtcttgctggttctgatgttcatgaccctccttcactttgacgccagcttcttttctattgtccagaacatcgtgggcacagctctgatgattttagtggccattggttttaaaaccaagctggctgctttgactcttgttgtgtggctctttgccatcaacgtatatttcaacgccttctggaccattccagtctacaagcccatgcatgacttcctgaaatacgacttcttccagaccatgtcggtgattgggggcttgctcctggtggtggccctgggccctgggggtgtctccatggatgagaagaagaaggagtggtaacagtcacagatccctacctgcctggctaagacccgtggccgtcaaggactggttcggggtggattcaacaaaactgccagcttttatgtatcctcttcccttcccctcccttggtaaaggcacagatgttttgagaactttatttgcagagacacctgagaatcgatggctcagtctgctctggagccacagtctggcgtctgacccttcagtgcaggccagcctggcagctggaagcctcccccacgccgaggctttggagtgaacagcccgcttggctgtggcatctcagtcctatttttgagtttttttgtgggggtacaggagggggccttcaagctgtactgtgagcagacgcattggtattatcattcaaagcagtctccctcttatttgtaagtttacatttttagcggaaactactaaattattttgggtggttcagccaaacctcaaaacagttaatctccctggtttaaaatcacaccagtggctttgatgttgtttctgccccgcattgtattttataggaatagtgaaaacatttagggacacccaaagaatgatgcagtattaaaggggtggtagaagctgctgtttatgataaaagtcatcggtcagaaaatcagcttggattggtgccaagtgttttattgggtaacaccctgggagttttagtagcttgaggcaaggtggaggggcaagaagtccttggggaagctgctggtctgggtgctgctggcctccaagctggcagtgggaagggctagtgagaccacacaggggtagccccagcagcagcaccctgcaagccagcctggccagctgctcagaccagcttgcagagccgcagccgctgtgggcagggggtgtggcaggagctcccagcactggagacccacggactcaacccagttacctcacatggggccttttctgagcaaggtctcgaaagcgcaggccgccctggctgagcagcaccgccctttcccagctgcactcgccctgtggacagccccgacacaccactttcctgaggctgtcgctcactcagattgtccgtttgctatgccgaatgcagccaaaattcctttttacaatttgtgatgccttaccgatttgatcttaatcctgtatttaaagttttctaacactgccttatactgtgtttctctttttgggggagcttaactgcttgttgctccctgtcgtctgcaccatagtaaatgccacaagggtagtcgaacacctctctggcccctagacctatctggggacaggctggctcagcctgtctccagggctgctgcggcccagccccgagcctgcctccctcttggcctctcatccattggctctgcagggcaggggtgaggcaggtttctgctcataagtgcttttggaagtcacctacctttttaacacagccgaactagtcccaacgcgtttgcaaatattcccctggtagcctacttccttacccccgaatattggtaagatcgagcaatggcttcaggacatgggttctcttctcctgtgatcattcaagtgctcactgcatgaagactggcttgtctcagtgtttcaacctcaccagggctgtctcttggtccacacctcgctccctgttagtgccgtatgacagcccccatcaaatgaccttggccaagtcacggtttctctgtggtcaaggttggttggctgattggtggaaagtagggtggaccaaaggaggccacgtgagcagtcagcaccagttctgcaccagcagcgcctccgtcctagtgggtgttcctgtttctcctggccctgggtgggctagggcctgattcgggaagatgcctttgcagggaggggaggataagtgggatctaccaattgattctggcaaaacaatttctaagatttttttgctttatgtgggaaacagatctaaatctcattttatgctgtattttatatcttagttgtgtttgaaaacgttttgatttttggaaacacatcaaaataaataatggcgtttgttgtatgcagtgtgatccta

SEQ ID NO: 141365 - DNA, 3200 bp, Homo sapiens
  Payload ID: 7790
  Gene Symbol:
  Gene Name: Homo sapiens surfeit 4 (SURF4), transcript variant 2, mRNA. [Source:RefSeq mRNA
  Acc:NM_001280788]
  ENST ID: ENST00000625213
  CDS Start-End: 477-1157
aagacgcaccggggcgggcccgggcggcgcgcggcccctttaaggcttggcctacgtggcagccgctggagccgcagccgacgcggagcgaggccggccgccgggcacttcctgtggaggccgcagcgggtgcgggcgccgacgggcgagagccagcgagcgagcgagcgagccgagccgagcctcccgccgtcgccatgggccagaacgacctgatgggcacggccgaggacttcgccgaccagatgtgctggactcttggggtccctttgaccctgtctgcgtctccctccccgtttggactctgccctgggctggattgagtggggacctgtacacagcctgggaggaggggaagcctatctccctgatagtctccttccagaagtgtccagttcctccgtgtcacaaagcagtacctgccccacgtggcgcgcctctgtctgatcagcaccttcctggaggacggcatccgtatgtggttccagtggagcgagcagcgcgactacatcgacaccacctggaactgcggctacctgctggcctcgtccttcgtcttcctcaacttgctgggacagctgactggctgcgtcctggtgttgagcaggaacttcgtgcagtacgcctgcttcgggctctttggaatcatagctctgcagacgattgcctacagcattttatgggacttgaagtttttgatgaggaacctggccctgggaggaggcctgttgctgctcctagcagaatcccgttctgaagggaagagcatgtttgcgggcgtccccaccatgcgtgagagctcccccaaacagtacatgcagctcggaggcagggtcttgctggttctgatgttcatgaccctccttcactttgacgccagcttcttttctattgtccagaacatcgtgggcacagctctgatgattttagtggccattggttttaaaaccaagctggctgctttgactcttgttgtgtggctctttgccatcaacgtatatttcaacgccttctggaccattccagtctacaagcccatgcatgacttcctgaaatacgacttcttccagaccatgtcggtgattgggggcttgctcctggtggtggccctgggccctgggggtgtctccatggatgagaagaagaaggagtggtaacagtcacagatccctacctgcctggctaagacccgtggccgtcaaggactggttcggggtggattcaacaaaactgccagcttttatgtatcctcttcccttcccctcccttggtaaaggcacagatgttttgagaactttatttgcagagacacctgagaatcgatggctcagtctgctctggagccacagtctggcgtctgacccttcagtgcaggccagcctggcagctggaagcctcccccacgccgaggctttggagtgaacagcccgcttggctgtggcatctcagtcctatttttgagtttttttgtgggggtacaggagggggccttcaagctgtactgtgagcagacgcattggtattatcattcaaagcagtctccctcttatttgtaagtttacatttttagcggaaactactaaattattttgggtggttcagccaaacctcaaaacagttaatctccctggtttaaaatcacaccagtggctttgatgttgtttctgccccgcattgtattttataggaatagtgaaaacatttagggacacccaaagaatgatgcagtattaaaggggtggtagaagctgctgtttatgataaaagtcatcggtcagaaaatcagcttggattggtgccaagtgttttattgggtaacaccctgggagttttagtagcttgaggcaaggtggaggggcaagaagtccttggggaagctgctggtctgggtgctgctggcctccaagctggcagtgggaagggctagtgagaccacacaggggtagccccagcagcagcaccctgcaagccagcctggccagctgctcagaccagcttgcagagccgcagccgctgtgggcagggggtgtggcaggagctcccagcactggagacccacggactcaacccagttacctcacatggggccttttctgagcaaggtctcgaaagcgcaggccgccctggctgagcagcaccgccctttcccagctgcactcgccctgtggacagccccgacacaccactttcctgaggctgtcgctcactcagattgtccgtttgctatgccgaatgcagccaaaattcctttttacaatttgtgatgccttaccgatttgatcttaatcctgtatttaaagttttctaacactgccttatactgtgtttctctttttgggggagcttaactgcttgttgctccctgtcgtctgcaccatagtaaatgccacaagggtagtcgaacacctctctggcccctagacctatctggggacaggctggctcagcctgtctccagggctgctgcggcccagccccgagcctgcctccctcttggcctctcatccattggctctgcagggcaggggtgaggcaggtttctgctcataagtgcttttggaagtcacctacctttttaacacagccgaactagtcccaacgcgtttgcaaatattcccctggtagcctacttccttacccccgaatattggtaagatcgagcaatggcttcaggacatgggttctcttctcctgtgatcattcaagtgctcactgcatgaagactggcttgtctcagtgtttcaacctcaccagggctgtctcttggtccacacctcgctccctgttagtgccgtatgacagcccccatcaaatgaccttggccaagtcacggtttctctgtggtcaaggttggttggctgattggtggaaagtagggtggaccaaaggaggccacgtgagcagtcagcaccagttctgcaccagcagcgcctccgtcctagtgggtgttcctgtttctcctggccctgggtgggctagggcctgattcgggaagatgcctttgcagggaggggaggataagtgggatctaccaattgattctggcaaaacaatttctaagatttttttgctttatgtgggaaacagatctaaatctcattttatgctgtattttatatcttagttgtgtttgaaaacgttttgatttttggaaacacatcaaaataaataatggcgtttgttgtatgcagtgtgatcct

SEQ ID NO: 141366 - DNA, 2863 bp, Homo sapiens
  Payload ID: 7790
  Gene Symbol:
  Gene Name: Homo sapiens surfeit 4 (SURF4), transcript variant 2, mRNA. [Source:RefSeq mRNA
  Acc:NM_001280788]
  ENST ID: ENST00000629119
  CDS Start-End: 198-584
aagacgcaccggggcgggcccgggcggcgcgcggcccctttaaggcttggcctacgtggcagccgctggagccgcagccgacgcggagcgaggccggccgccgggcacttcctgtggaggccgcagcgggtgcgggcgccgacgggcgagagccagcgagcgagcgagcgagccgagccgagcctcccgccgtcgccatgggccagaacgacctgatgggcacggccgaggacttcgccgaccagttcctccgtgtcacaaagcagtacctgccccacgtggcgcgcctctgtctgatcagcaccttcctggaggacggcatccgtatgtggttccagtggagcgagcagcgcgactacatcgacaccacctggaactgcggctacctgctggcctcgtccttcgtcttcctcaacttgctgggacagctgactggctgcgtcctggtgttgagcaggaacttcgtgcagtacgcctgcttcgggctctttggaatcatagctctgcagacgattgcctacagcattttatgggacttgaagtttttgatgagattgtccagaacatcgtgggcacagctctgatgattttagtggccattggttttaaaaccaagctggctgctttgactcttgttgtgtggctctttgccatcaacgtatatttcaacgccttctggaccattccagtctacaagcccatgcatgacttcctgaaatacgacttcttccagaccatgtcggtgattgggggcttgctcctggtggtggccctgggccctgggggtgtctccatggatgagaagaagaaggagtggtaacagtcacagatccctacctgcctggctaagacccgtggccgtcaaggactggttcggggtggattcaacaaaactgccagcttttatgtatcctcttcccttcccctcccttggtaaaggcacagatgttttgagaactttatttgcagagacacctgagaatcgatggctcagtctgctctggagccacagtctggcgtctgacccttcagtgcaggccagcctggcagctggaagcctcccccacgccgaggctttggagtgaacagcccgcttggctgtggcatctcagtcctatttttgagtttttttgtgggggtacaggagggggccttcaagctgtactgtgagcagacgcattggtattatcattcaaagcagtctccctcttatttgtaagtttacatttttagcggaaactactaaattattttgggtggttcagccaaacctcaaaacagttaatctccctggtttaaaatcacaccagtggctttgatgttgtttctgccccgcattgtattttataggaatagtgaaaacatttagggacacccaaagaatgatgcagtattaaaggggtggtagaagctgctgtttatgataaaagtcatcggtcagaaaatcagcttggattggtgccaagtgttttattgggtaacaccctgggagttttagtagcttgaggcaaggtggaggggcaagaagtccttggggaagctgctggtctgggtgctgctggcctccaagctggcagtgggaagggctagtgagaccacacaggggtagccccagcagcagcaccctgcaagccagcctggccagctgctcagaccagcttgcagagccgcagccgctgtgggcagggggtgtggcaggagctcccagcactggagacccacggactcaacccagttacctcacatggggccttttctgagcaaggtctcgaaagcgcaggccgccctggctgagcagcaccgccctttcccagctgcactcgccctgtggacagccccgacacaccactttcctgaggctgtcgctcactcagattgtccgtttgctatgccgaatgcagccaaaattcctttttacaatttgtgatgccttaccgatttgatcttaatcctgtatttaaagttttctaacactgccttatactgtgtttctctttttgggggagcttaactgcttgttgctccctgtcgtctgcaccatagtaaatgccacaagggtagtcgaacacctctctggcccctagacctatctggggacaggctggctcagcctgtctccagggctgctgcggcccagccccgagcctgcctccctcttggcctctcatccattggctctgcagggcaggggtgaggcaggtttctgctcataagtgcttttggaagtcacctacctttttaacacagccgaactagtcccaacgcgtttgcaaatattcccctggtagcctacttccttacccccgaatattggtaagatcgagcaatggcttcaggacatgggttctcttctcctgtgatcattcaagtgctcactgcatgaagactggcttgtctcagtgtttcaacctcaccagggctgtctcttggtccacacctcgctccctgttagtgccgtatgacagcccccatcaaatgaccttggccaagtcacggtttctctgtggtcaaggttggttggctgattggtggaaagtagggtggaccaaaggaggccacgtgagcagtcagcaccagttctgcaccagcagcgcctccgtcctagtgggtgttcctgtttctcctggccctgggtgggctagggcctgattcgggaagatgcctttgcagggaggggaggataagtgggatctaccaattgattctggcaaaacaatttctaagatttttttgctttatgtgggaaacagatctaaatctcattttatgctgtattttatatcttagttgtgtttgaaaacgttttgatttttggaaacacatcaaaataaataatggcgtttgttgtatgcagtgtgatcct

SEQ ID NO: 141367 - DNA, 715 bp, Homo sapiens
  Payload ID: 7790
  Gene Symbol:
  Gene Name: Homo sapiens surfeit 4 (SURF4), transcript variant 2, mRNA. [Source:RefSeq mRNA
  Acc:NM_001280788]
  ENST ID: ENST00000625797
  CDS Start-End: 75-635
cagcgggtgcgggcgccgacgggcgagagccagcgagcgagcgagcgagccgagccgagcctcccgccgtcgccatgggccagaacgacctgatgggcacggccgaggacttcgccgaccagttcctccgtgtcacaaagcagtacctgccccacgtggcgcgcctctgtctgatcagcaccttcctggaggacggcatccgtatgtggttccagtggagcgagcagcgcgactacatcgacaccacctggaactgcggctacctgctggcctcgtccttcgtcttcctcaacttgctgggacagctgactggctgcgtcctggtgttgagcaggaacttcgtgcagtacgcctgcttcgggctctttggaatcatagctctgcagacgattgcctacagcattttatgggacttgaagtttttgatgaggaacctggccctgggaggaggcctgttgctgctcctagcagaatcccgttctgaagggaagagcatgtttgcgggcgtccccaccatgcgtgagagctcccccaaacagtacatgcagctcggaggcagggtcttgctggttctgatgttcatgaccctccttcactttgacgccagcttcttttctcagccgtctcagcagtagctacatcagcctgatggatagagacttcatgacgtgcagcagctggaacttttgtttataaagcatctcttttcctcaca

SEQ ID NO: 141368 - DNA, 1206 bp, Homo sapiens
  Payload ID: 7790
  Gene Symbol:
  Gene Name: Homo sapiens surfeit 4 (SURF4), transcript variant 2, mRNA. [Source:RefSeq mRNA
  Acc:NM_001280788]
  ENST ID: ENST00000626303
  CDS Start-End: 131-610
ggagccgcagccgacgcggagcgaggccggccgccgggcacttcctgtggaggccgcagcgggtgcgggcgccgacgggcgagagccagcgagcgagcgagcgagccgagccgagcctcccgccgtcgccatgggccagaacgacctgatgggcacggccgaggacttcgccgaccagttcctccgtgtcacaaagcagtacctgccccacgtggcgcgcctctgtctgatcagcaccttcctggaggacggcatccgtatgtggttccagtggagcgagcagcgcgactacatcgacaccacctggaactgcggctacctgctggcctcgtccttcgtcttcctcaacttgctgggacagctgactggctgcgtcctggtgttgagcaggaacttcgtgcagtacgcctgcttcgggctctttggaatcatagctctgcagacgattgcctacagcattttatgggacttgaagtttttgatgaggaacctggccctgggaggaggcctgttgctgctcctagcagaatcccgttctgaagggaagagcatgtttgcgggcgtccccaccatgcgtgagagctcccccaaacagtacctgcctggctaagacccgtggccgtcaaggactggttcggggtggattcaacaaaactgccagcttttatgtatcctcttcccttcccctcccttggtaaaggcacagatgttttgagaactttatttgcagagacacctgagaatcgatggctcagtctgctctggagccacagtctggcgtctgacccttcagtgcaggccagcctggcagctggaagcctcccccacgccgaggctttggagtgaacagcccgcttggctgtggcatctcagtcctatttttgagtttttttgtgggggtacaggagggggccttcaagctgtactgtgagcagacgcattggtattatcattcaaagcagtctccctcttatttgtaagtttacatttttagcggaaactactaaattattttgggtggttcagccaaacctcaaaacagttaatctccctggtttaaaatcacaccagtggctttgatgttgtttctgccccgcattgtattttataggaatagtgaaaacatttagggacacccaaagaatgatgcagtattaaaggggtggtagaagctgctgtttatgataaaagtcatcggtcagaaaa

SEQ ID NO: 141369 - DNA, 1862 bp, Homo sapiens
  Payload ID: 7791
  Gene Symbol: HERPUD1
  Gene Name: homocysteine-inducible, endoplasmic reticulum stress-inducible, ubiquitin-like domain member 1
  Uniprot ID: Q15011
  ENST ID: ENST00000300302
  CDS Start-End: 99-1271
agagacgtgaactgtcgttgcagagattgcgggcggctgagacgccgcctgcctggcacctaggagcgcagcggagccccgacaccgccgccgccgccatggagtccgagaccgaacccgagcccgtcacgctcctggtgaagagccccaaccagcgccaccgcgacttggagctgagtggcgaccgcggctggagtgtgggccacctcaaggcccacctgagccgcgtctaccccgagcgtccgcgtccagaggaccagaggttaatttattctgggaagctgttgttggatcaccaatgtctcagggacttgcttccaaaggaaaaacggcatgttttgcatctggtgtgcaatgtgaagagtccttcaaaaatgccagaaatcaacgccaaggtggctgaatccacagaggagcctgctggttctaatcggggacagtatcctgaggattcctcaagtgatggtttaaggcaaagggaagttcttcggaacctttcttcccctggatgggaaaacatctcaaggcctgaagctgcccagcaggcattccaaggcctgggtcctggtttctccggttacacaccctatgggtggcttcagctttcctggttccagcagatatatgcacgacagtactacatgcaatatttagcagccactgctgcatcaggggcttttgttccaccaccaagtgcacaagagatacctgtggtctctgcacctgctccagcccctattcacaaccagtttccagctgaaaaccagcctgccaatcagaatgctgctcctcaagtggttgttaatcctggagccaatcaaaatttgcggatgaatgcacaaggtggccctattgtggaagaagatgatgaaataaatcgagattggttggattggacctattcagcagctacattttctgtttttctcagtatcctctacttctactcctccctgagcagattcctcatggtcatgggggccaccgttgttatgtacctgcatcacgttgggtggtttccatttagaccgaggccggttcagaacttcccaaatgatggtcctcctcctgacgttgtaaatcaggaccccaacaataacttacaggaaggcactgatcctgaaactgaagaccccaaccacctccctccagacagggatgtactagatggcgagcagaccagcccctcctttatgagcacagcatggcttgtcttcaagactttctttgcctctcttcttccagaaggccccccagccatcgcaaactgatggtgtttgtgctgtagctgttggaggctttgacaggaatggactggatcacctgactccagctagattgcctctcctggacatggcaatgatgagtttttaaaaaacagtgtggatgatgatatgcttttgtgagcaagcaaaagcagaaacgtgaagccgtgatacaaattggtgaacaaaaaatgcccaaggcttctcatgtctttattctgaagagctttaatatatactctatgtagtttaataagcactgtacgtagaaggccttaggtgttgcatgtctatgcttgaggaacttttccaaatgtgtgtgtctgcatgtgtgtttgtacatagaagtcatagatgcagaagtggttctgctggtacgatttgattcctgttggaatgtttaaattacactaagtgtactactttatataatcaatgaaattgctagacatgttttagcaggacttttctaggaaagacttatgtataattgctttttaaaatgcagtgctttactttaaactaaggggaactttgcggaggtgaaaacctttgctgggttttctgttcaataaagttttactatgaatgaccctg

SEQ ID NO: 141370 - DNA, 1388 bp, Homo sapiens
  Payload ID: 7791
  Gene Symbol: HERPUD1
  Gene Name: homocysteine-inducible, endoplasmic reticulum stress-inducible, ubiquitin-like domain member 1
  Uniprot ID: Q15011
  ENST ID: ENST00000344114
  CDS Start-End: 99-797
agagacgtgaactgtcgttgcagagattgcgggcggctgagacgccgcctgcctggcacctaggagcgcagcggagccccgacaccgccgccgccgccatggagtccgagaccgaacccgagcccgtcacgctcctggtgaagagccccaaccagcgccaccgcgacttggagctgagtggcgaccgcggctggagtgtgggccacctcaaggcccacctgagccgcgtctaccccgagcgtccgcgtccagaggaccagaggttaatttattctgggaagctgttgttggatcaccaatgtctcagggacttgcttccaaaggaaaaacggcatgttttgcatctggtgtgcaatgtgaagagtccttcaaaaatgccagaaatcaacgccaaggtggctgaatccacagaggagcctgctggttctaatcggggacagtatcctgaggattcctcaagtgatggtttaaggcaaagggaagttcttcggaacctttcttcccctggatgggaaaacatctcaaggcatcacgttgggtggtttccatttagaccgaggccggttcagaacttcccaaatgatggtcctcctcctgacgttgtaaatcaggaccccaacaataacttacaggaaggcactgatcctgaaactgaagaccccaaccacctccctccagacagggatgtactagatggcgagcagaccagcccctcctttatgagcacagcatggcttgtcttcaagactttctttgcctctcttcttccagaaggccccccagccatcgcaaactgatggtgtttgtgctgtagctgttggaggctttgacaggaatggactggatcacctgactccagctagattgcctctcctggacatggcaatgatgagtttttaaaaaacagtgtggatgatgatatgcttttgtgagcaagcaaaagcagaaacgtgaagccgtgatacaaattggtgaacaaaaaatgcccaaggcttctcatgtctttattctgaagagctttaatatatactctatgtagtttaataagcactgtacgtagaaggccttaggtgttgcatgtctatgcttgaggaacttttccaaatgtgtgtgtctgcatgtgtgtttgtacatagaagtcatagatgcagaagtggttctgctggtacgatttgattcctgttggaatgtttaaattacactaagtgtactactttatataatcaatgaaattgctagacatgttttagcaggacttttctaggaaagacttatgtataattgctttttaaaatgcagtgctttactttaaactaaggggaactttgcggaggtgaaaacctttgctgggttttctgttcaataaagttttactatgaatgaccctg

SEQ ID NO: 141371 - DNA, 1782 bp, Homo sapiens
  Payload ID: 7791
  Gene Symbol: HERPUD1
  Gene Name: homocysteine-inducible, endoplasmic reticulum stress-inducible, ubiquitin-like domain member 1
  Uniprot ID: Q15011
  ENST ID: ENST00000379792
  CDS Start-End: 86-1186
gtcgttgcagagattgcgggcggctgagacgccgcctgcctggcacctaggagcgcagcggagccccgacaccgccgccgccgccatggagtccgagaccgaacccgagcccgtcacgctcctggtgaagagccccaaccagcgccaccgcgacttggagctgagtggcgaccgcggctggagtgtgggccacctcaaggcccacctgagccgcgtctaccccgagcgtccgcgtccagaggaccagaggttaatttattctgggaagctgttgttggatcaccaatgtctcagggacttgcttccaaaggtggctgaatccacagaggagcctgctggttctaatcggggacagtatcctgaggattcctcaagtgatggtttaaggcaaagggaagttcttcggaacctttcttcccctggatgggaaaacatctcaaggcctgaagctgcccagcaggcattccaaggcctgggtcctggtttctccggttacacaccctatgggtggcttcagctttcctggttccagcagatatatgcacgacagtactacatgcaatatttagcagccactgctgcatcaggggcttttgttccaccaccaagtgcacaagagatacctgtggtctctgcacctgctccagcccctattcacaaccagtttccagctgaaaaccagcctgccaatcagaatgctgctcctcaagtggttgttaatcctggagccaatcaaaatttgcggatgaatgcacaaggtggccctattgtggaagaagatgatgaaataaatcgagattggttggattggacctattcagcagctacattttctgtttttctcagtatcctctacttctactcctccctgagcagattcctcatggtcatgggggccaccgttgttatgtacctgcatcacgttgggtggtttccatttagaccgaggccggttcagaacttcccaaatgatggtcctcctcctgacgttgtaaatcaggaccccaacaataacttacaggaaggcactgatcctgaaactgaagaccccaaccacctccctccagacagggatgtactagatggcgagcagaccagcccctcctttatgagcacagcatggcttgtcttcaagactttctttgcctctcttcttccagaaggccccccagccatcgcaaactgatggtgtttgtgctgtagctgttggaggctttgacaggaatggactggatcacctgactccagctagattgcctctcctggacatggcaatgatgagtttttaaaaaacagtgtggatgatgatatgcttttgtgagcaagcaaaagcagaaacgtgaagccgtgatacaaattggtgaacaaaaaatgcccaaggcttctcatgtctttattctgaagagctttaatatatactctatgtagtttaataagcactgtacgtagaaggccttaggtgttgcatgtctatgcttgaggaacttttccaaatgtgtgtgtctgcatgtgtgtttgtacatagaagtcatagatgcagaagtggttctgctggtacgatttgattcctgttggaatgtttaaattacactaagtgtactactttatataatcaatgaaattgctagacatgttttagcaggacttttctaggaaagacttatgtataattgctttttaaaatgcagtgctttactttaaactaaggggaactttgcggaggtgaaaacctttgctgggttttctgttcaataaagttttactatgaatgaccctggcaga

SEQ ID NO: 141372 - DNA, 2946 bp, Homo sapiens
  Payload ID: 7791
  Gene Symbol: HERPUD1
  Gene Name: homocysteine-inducible, endoplasmic reticulum stress-inducible, ubiquitin-like domain member 1
  Uniprot ID: Q15011
  ENST ID: ENST00000439977
  CDS Start-End: 198-1373
ctccgcctcagccaatgggcggcagccacagagcgttctgtccgcagagccgggcgcggggcttctataaaaggcgcccgaagcgggggcgcgcgccccagagacgtgaactgtcgttgcagagattgcgggcggctgagacgccgcctgcctggcacctaggagcgcagcggagccccgacaccgccgccgccgccatggagtccgagaccgaacccgagcccgtcacgctcctggtgaagagccccaaccagcgccaccgcgacttggagctgagtggcgaccgcggctggagtgtgggccacctcaaggcccacctgagccgcgtctaccccgagcgtccgcgtccagaggaccagaggttaatttattctgggaagctgttgttggatcaccaatgtctcagggacttgcttccaaagcaggaaaaacggcatgttttgcatctggtgtgcaatgtgaagagtccttcaaaaatgccagaaatcaacgccaaggtggctgaatccacagaggagcctgctggttctaatcggggacagtatcctgaggattcctcaagtgatggtttaaggcaaagggaagttcttcggaacctttcttcccctggatgggaaaacatctcaaggcctgaagctgcccagcaggcattccaaggcctgggtcctggtttctccggttacacaccctatgggtggcttcagctttcctggttccagcagatatatgcacgacagtactacatgcaatatttagcagccactgctgcatcaggggcttttgttccaccaccaagtgcacaagagatacctgtggtctctgcacctgctccagcccctattcacaaccagtttccagctgaaaaccagcctgccaatcagaatgctgctcctcaagtggttgttaatcctggagccaatcaaaatttgcggatgaatgcacaaggtggccctattgtggaagaagatgatgaaataaatcgagattggttggattggacctattcagcagctacattttctgtttttctcagtatcctctacttctactcctccctgagcagattcctcatggtcatgggggccaccgttgttatgtacctgcatcacgttgggtggtttccatttagaccgaggccggttcagaacttcccaaatgatggtcctcctcctgacgttgtaaatcaggaccccaacaataacttacaggaaggcactgatcctgaaactgaagaccccaaccacctccctccagacagggatgtactagatggcgagcagaccagcccctcctttatgagcacagcatggcttgtcttcaagactttctttgcctctcttcttccagaaggccccccagccatcgcaaactgatggtgtttgtgctgtagctgttggaggctttgacaggaatggactggatcacctgactccagctagattgcctctcctggacatggcaatgatgagtttttaaaaaacagtgtggatgatgatatgcttttgtgagcaagcaaaagcagaaacgtgaagccgtgatacaaattggtgaacaaaaaatgcccaaggcttctcatgtctttattctgaagagctttaatatatactctatgtagtttaataagcactgtacgtagaaggccttaggtgttgcatgtctatgcttgaggaacttttccaaatgtgtgtgtctgcatgtgtgtttgtacatagaagtcatagatgcagaagtggttctgctggtacgatttgattcctgttggaatgtttaaattacactaagtgtactactttatataatcaatgaaattgctagacatgttttagcaggacttttctaggaaagacttatgtataattgctttttaaaatgcagtgctttactttaaactaaggggaactttgcggaggtgaaaacctttgctgggttttctgttcaataaagttttactatgaatgaccctggcagagactcctgtcatcctagcagtttactctgcgtttgttgtatctagacagtcaacaactgagttgtcggtgtttaacctgaatgcttgtttttcagaagaggactgtttgtgccggtaagaatgatcaggtaaggccatgaaagtttttgttggcgtttttgtttttgagatggggtcttgctttgttccttgggccagagtacattggctactcacaagtgggctggtagctggctacagccccagactcctggcttaagccacctcctgcctcagccaccctggcagctgggactacaggcatgcgccatcacacttagcttgaaagttttaatttactaagaatatacctgtgtttccccccatttcctgatttaaacagtactggcttatataggaacccatcaaagttaaattccccaaatttaaatttagtaaatttagtggtttcaccttggcaaatctgcaatagtttcaccagctcaaatttcatgcttttgtaagctgagcttatgtttgtgattttaatcctttaagtactactgtggtaactaatcatttttttgttttttttggtggtgtttttgtttttgttttgagatggagtctcactctgttgcccaggctggagtgccgtggcgcgatctcggctcactgcaacctctacctcctgagttcaagcgattctcctgcctcagcctcccgaatagctgggattacaggtgcccaccacaatgtctggctaattttttgtatttttagtagagacgaggtttcacccatgttggccaggctggtctcaaacccctgacctcaggtgatctgcccgcctcggcctcccaaagtgctgggattacagatgtgagccaccgcacccagccagggactaatctttaaagcaaagttttatatatttttacgtgagtaatgttatgtgtaggtgttctatttggcaaaataaatcagccttttctatc

SEQ ID NO: 141373 - DNA, 567 bp, Homo sapiens
  Payload ID: 7791
  Gene Symbol: HERPUD1
  Gene Name: homocysteine-inducible, endoplasmic reticulum stress-inducible, ubiquitin-like domain member 1
  ENST ID: ENST00000563343
  CDS Start-End: 88-567
cacacaggagagggcatccgggcaggaaaagatagtgaagtcgtgagttccagcttgtggtagcgcctgtgtctgtttttgtttcatatggtcaagaatgttttagaacgtccagaggaccagaggttaatttattctgggaagctgttgttggatcaccaatgtctcagggacttgcttccaaagcaggaaaaacggcatgttttgcatctggtgtgcaatgtgaagagtccttcaaaaatgccagaaatcaacgccaaggtggctgaatccacagaggagcctgctggttctaatcggggacagtatcctgaggattcctcaagtgatggtttaaggcaaagggaagttcttcggaacctttcttcccctggatgggaaaacatctcaaggcctgaagctgcccagcaggcattccaaggcctgggtcctggtttctccggttacacaccctatgggtggcttcagctttcctggttccagcagatatatgcacgacagtactacatgcaatatttagcagccactgctgcatcaggggcttttgttccaccaccaagtgcacaa

SEQ ID NO: 141374 - DNA, 844 bp, Homo sapiens
  Payload ID: 7791
  Gene Symbol: HERPUD1
  Gene Name: homocysteine-inducible, endoplasmic reticulum stress-inducible, ubiquitin-like domain member 1
  ENST ID: ENST00000563911
  CDS Start-End: 1-680
ggggacagtatcctgaggattcctcaagtgatggtttaaggcaaagggaagttcttcggaacctttcttcccctggatgggaaaacatctcaagtttagcagccactgctgcatcaggggcttttgttccaccaccaagtgcacaagagatacctgtggtctctgcacctgctccagcccctattcacaaccagtttccagctgaaaaccagcctgccaatcagaatgctgctcctcaagtggttgttaatcctggagccaatcaaaatttgcggatgaatgcacaaggtggccctattgtggaagaagatgatgaaataaatcgagattggttggattggacctattcagcagctacattttctgtttttctcagtatcctctacttctactcctccctgagcagattcctcatggtcatgggggccaccgttgttatgtacctgcatcacgttgggtggtttccatttagaccgaggccggttcagaacttcccaaatgatggtcctcctcctgacgttgtaaatcaggaccccaacaataacttacagaaggccccccagccatcgcaaactgatggtgtttgtgctgtagctgttggaggctttgacaggaatggactggatcacctgactccagctagattgcctctcctggacatggcaatgatgagtttttaaaaaacagtgtggatgatgatatgcttttgtgagcaagcaaaagcagaaacgtgaagccgtgatacaaattggtgaacaaaaaatgcccaaggcttctcatgtctttattctgaagagctttaatatatactctatgtagtttaataagcactgtacgtagaagg

SEQ ID NO: 141375 - DNA, 798 bp, Homo sapiens
  Payload ID: 7791
  Gene Symbol: HERPUD1
  Gene Name: homocysteine-inducible, endoplasmic reticulum stress-inducible, ubiquitin-like domain member 1
  ENST ID: ENST00000565966
  CDS Start-End: 99-260
agagacgtgaactgtcgttgcagagattgcgggcggctgagacgccgcctgcctggcacctaggagcgcagcggagccccgacaccgccgccgccgccatggagtccgagaccgaacccgagcccgtcacgctcctggtgaagagccccaaccagcgccaccgcgacttggagctgagtggcgaccgcggctggagtgtgggccacctcaaggcccacctgagccgcgtctaccccgagcgtccgaggaccagaggttaatttattctgggaagctgttgttggatcaccaatgtctcagggacttgcttccaaagcaggaaaaacggcatgttttgcatctggtgtgcaatgtgaagagtccttcaaaaatgccagaaatcaacgccaaggtggctgaatccacagaggagcctgctggttctaatcggggacagtatcctgaggattcctcaagtgatggtttaaggcaaagggaagttcttcggaacctttcttcccctggatgggaaaacatctcaaggcctgaagctgcccagcaggcattccaaggcctgggtcctggtttctccggttacacaccctatgggtggcttcagctttcctggttccagcagatatatgcacgacagtactacatgcaatatttagcagccactgctgcatcaggggcttttgttccaccaccaagtgcacaagagatacctgtggtctctgcacctgctccagcccctattcacaaccagtttccagctgaaaaccagcctgccaatcagaatgctgctcctcaagtggttgt

SEQ ID NO: 141376 - DNA, 751 bp, Homo sapiens
  Payload ID: 7791
  Gene Symbol: HERPUD1
  Gene Name: homocysteine-inducible, endoplasmic reticulum stress-inducible, ubiquitin-like domain member 1
  ENST ID: ENST00000568358
  CDS Start-End: 1-329
aggaaaaacggcatgttttgcatctggtgtgcaatgtgaagagtccttcaaaaatgccagaaatcaacgccaaggtggctgaatccacagaggagcctgctggttctaatcggggacagtatcctgaggattcctcaagtgatggtttaaggcaaagggaagttcttcggaacctttcttcccctggatgggaaaacatctcaaggcctgaagctgcccagcaggcattccaaggcctgggtcctggtttctccggttacacaccctatgggtggcttcagctttcctggttccagcagatatatgcacgacagtactacatgcaatagaaggcactgatcctgaaactgaagaccccaaccacctccctccagacagggatgtactagatggcgagcagaccagcccctcctttatgagcacagcatggcttgtcttcaagactttctttgcctctcttcttccagaaggccccccagccatcgcaaactgatggtgtttgtgctgtagctgttggaggctttgacaggaatggactggatcacctgactccagctagattgcctctcctggacatggcaatgatgagtttttaaaaaacagtgtggatgatgatatgcttttgtgagcaagcaaaagcagaaacgtgaagccgtgatacaaattggtgaacaaaaaatgcccaaggcttctcatgtctttattctgaagagctttaatatatactctatgtagtttaataagcactgta

SEQ ID NO: 141377 - DNA, 562 bp, Homo sapiens
  Payload ID: 7791
  Gene Symbol: HERPUD1
  Gene Name: homocysteine-inducible, endoplasmic reticulum stress-inducible, ubiquitin-like domain member 1
  ENST ID: ENST00000569429
  CDS Start-End: 112-562
ctgcccacgagcataattcttcatcacacaggagagggcatccgggcaggaaaagatagtgaagtcgtgagttccagcttgtggtagcgcctgtgtctgtttttgtttcatatggtcaagaatgttttagaacgtccagaggaccagaggttaatttattctgggaagctgttgttggatcaccaatgtctcagggacttgcttccaaaggtggctgaatccacagaggagcctgctggttctaatcggggacagtatcctgaggattcctcaagtgatggtttaaggcaaagggaagttcttcggaacctttcttcccctggatgggaaaacatctcaaggcctgaagctgcccagcaggcattccaaggcctgggtcctggtttctccggttacacaccctatgggtggcttcagctttcctggttccagcagatatatgcacgacagtactacatgcaatatttagcagccactgctgcatcaggggcttttgttccaccaccaagtgcacaagagatacctgtggtctctgcacctgctccagcccctattcacaacc

SEQ ID NO: 141378 - DNA, 458 bp, Homo sapiens
  Payload ID: 7791
  Gene Symbol: HERPUD1
  Gene Name: homocysteine-inducible, endoplasmic reticulum stress-inducible, ubiquitin-like domain member 1
  ENST ID: ENST00000568651
  CDS Start-End: 1-451
ccagcaggcattccaaggcctgggtcctggtttctccggttacacaccctatgggtggcttcagctttcctggttccagcagatatatgcacgacagtactacatgcaatatatcctctacttctactcctccctgagcagattcctcatggtcatgggggccaccgttgttatgtacctgcatcacgttgggtggtttccatttagaccgaggccggttcagaacttcccaaatgatggtcctcctcctgacgttgtaaatcaggaccccaacaataacttacaggaaggcactgatcctgaaactgaagaccccaaccacctccctccagacagggatgtactagatggcgagcagaccagcccctcctttatgagcacagcatggcttgtcttcaagactttctttgcctctcttcttccagaaggccccccagccatcgcaaactgatggtgtt

SEQ ID NO: 141379 - DNA, 2005 bp, Homo sapiens
  Payload ID: 7792
  Gene Symbol: HGD
  Gene Name: homogentisate 1,2-dioxygenase
  Uniprot ID: Q93099
  ENST ID: ENST00000283871
  CDS Start-End: 461-1798
ctccaggagactcagcactgccctgttccttcctagcctgagtcaggactgagcagagaatcctccaccacacacagcaggcactatctgccacagttcctttccccgatagcttcaaattctctgccttttgaaataagcctacttttaactggaataaataattggtcaatctctacctcaggtgaagaggaaccaagcctctggaaacacttaggaacaaactgtaaaaaccaaaggcaattgtgtaaccggttaaataagcttgctggactttgtccctgtgtatgagttagacaattctttcagctagtttgagtgacgcactgaccagtgaagcgcagtgaagcagtgggaaccggaatatccaaagagtggtttgaaggagaaagaagcattgtggctttatatcctctgggcctgggtttcctgaagtcaccacacatagaggagagagaaaatggctgagttaaagtacatttctggatttgggaatgagtgttcttcagaggatcctcgctgcccaggttccctgccagaaggacagaataatcctcaggtctgcccctacaatctctatgctgagcagctctcaggatcggctttcacttgtccacggagcaccaataagagaagctggctgtataggattctaccttcagtttctcacaagccctttgaatccattgacgaaggccaagtcactcacaactgggatgaagttgatcctgatcctaaccagcttagatggaaaccatttgagattccaaaagcatctcagaagaaagtagactttgtgagtggcctgcataccttgtgtggagctggagacataaagtctaacaatgggcttgctatccacattttcctctgcaatacctccatggagaacagatgcttttacaattcagatggggacttcttgattgttccgcagaaagggaaccttctcatttacaccgagtttggcaagatgcttgtacagcccaatgagatctgcgtcattcagagaggaatgcggttcagcatagatgtctttgaggagaccaggggctacatcttggaggtctatggtgtccactttgagttacctgaccttggaccaattggggccaatggcttggccaatcctcgtgatttcttgatacccattgcctggtatgaggatcgccaagtaccaggtggttacacggtcattaataaataccagggcaagctgtttgctgccaaacaggatgtctccccgttcaatgttgtggcctggcacgggaattatacaccctacaagtacaacctgaagaatttcatggttatcaactcagtggcctttgaccatgcagacccatccattttcacagtattgactgctaagtctgtccgccctggagtggccattgctgattttgtcatcttcccacctcgatggggggttgctgataagaccttcaggcctccttattaccataggaactgcatgagtgagttcatgggactcatccgaggtcactatgaggcaaagcaaggtgggttcctgccagggggagggagtctacacagcacaatgaccccccatggacctgatgctgactgctttgagaaggccagcaaggtcaagctggcacctgagaggattgccgatggcaccatggcatttatgtttgaatcatctttaagtctggcggtcacaaagtggggactcaaggcctccaggtgtttggatgagaactaccacaagtgctgggagccactcaagagccacttcactcccaactccaggaacccagcagaacctaattgagactggaacattgctaccataattaagagtagatttgtgaagatttcttcagaatctcatgctttctggtagtattggaggagggggttggttaaaatgaaaattcacttttcatagtcaagtaactcagaacttttatggaaacgcatttgcaaagttctatggctgtcaccttaattactcaataaacttgctggtgttctgtgg

SEQ ID NO: 141380 - DNA, 565 bp, Homo sapiens
  Payload ID: 7792
  Gene Symbol: HGD
  Gene Name: homogentisate 1,2-dioxygenase
  ENST ID: ENST00000475447
  CDS Start-End: 1-266
ttccgcagaaagggaaccttctcatttacaccgagtttggcaagatgcttgtacagcccaatgagatctgcgtcattcagagaggaatgcggttcagcatagatgtctttgaggagaccaggggctacatcttggaggtctatggtgtccactttgagttacctgaccttggaccaattgattccttgggtcttcctaaaaggatgtctccccgttcaatgttgtggcctggcacgggaattatacaccctacaagtacaacctgaagaatttcatggttatcaactcagtggcctttgaccatgcaatctagcctgattcctgtcagagagtggaactcgagacctctgataatccacatggccatggagtagagctgtgcctgccaagaatgccaatatgaatgttttatgattgttcttctgtcaatccatattctttattaatcctatacaatttactagtttctcctgtgttcttggaattctgcagaaataatgtttaaggggctttgtgttttactggtcttgccttggataataaaaataatactgcttcaaccttc

SEQ ID NO: 141381 - DNA, 683 bp, Homo sapiens
  Payload ID: 7792
  Gene Symbol: HGD
  Gene Name: homogentisate 1,2-dioxygenase
  ENST ID: ENST00000494453
  CDS Start-End: 1-437
aggagaccaggggctacatcttggaggtctatggtgtccactttgagttacctgaccttggaccaattggggccaatggcttggccaatcctcgtgatttcttgatacccattgcctggtatgaggatcgccaagtaccaggtggttacacggtcattaataaataccagggcaagctgtttgctgccaaacaggatgtctccccgttcaatgttgtggcctggcacgggaattatacaccctacaagtacaacctgaagaatttcatggttatcaactcagtggcctttgaccatgcagacccatccattttcacagtattgactgctaagtctgtccgccctggagtggccattgctgattttgtcatcttcccacctcgatggggggttgctgataagaccttcaggcctccttattaccataatctagcctgattcctgtcagagagtggaactcgagacctctgataatccacatggccatggagtagagctgtgcctgccaagaatgccaatatgaatgttttatgattgttcttctgtcaatccatattctttattaatcctatacaatttactagtttctcctgtgttcttggaattctgcagaaataatgtttaaggggctttgtgttttactggtcttgccttggataataaaaataatactgcttcaacctt

SEQ ID NO: 141382 - DNA, 462 bp, Homo sapiens
  Payload ID: 7792
  Gene Symbol: HGD
  Gene Name: homogentisate 1,2-dioxygenase
  ENST ID: ENST00000476082
  CDS Start-End: 37-462
aaatggctgagttaaagtacatttctggatttgggaatgagtgttcttcagaggatcctcgctgcccaggttccctgccagaaggacagctggctgtataggattctaccttcagtttctcacaagccctttgaatccattgacgaaggccaagtcactcacaactgggatgaagttgatcctgatcctaaccagcttagatggaaaccatttgagattccaaaagcatctcagaagaaagtagactttgtgagtggcctgcataccttgtgtggagctggagacataaagtctaacaatgggcttgctatccacattttcctctgcaatacctccatggagaacagatgcttttacaattcagatggggacttcttgattgttccgcagaaagggaaccttctcatttacaccgagtttggcaagatgcttgtacagcccaatgagatctgcgtcattcag

SEQ ID NO: 141383 - DNA, 631 bp, Homo sapiens
  Payload ID: 7792
  Gene Symbol: HGD
  Gene Name: homogentisate 1,2-dioxygenase
  ENST ID: ENST00000492108
  CDS Start-End: 1-297
gacataaagtctaacaatgggcttgctatccacattttcctctgcaatacctccatggagaacagatgcttttacaattcagatggggacttcttgattgttccgcagaaagggaaccttctcatttacaccgagtttggcaagatgcttgtacagcccaatgagatctgcgtcattcaggatgtctccccgttcaatgttgtggcctggcacgggaattatacaccctacaagtacaacctgaagaatttcatggttatcaactcagtggcctttgaccatgcaggaactgcatgagtgagttcatgggactcatccgaggtcactatgaggcaaagcaaggtgggttcctgccagggggagggagtctacacagcacaatgaccccccatggacctgatgctgactgctttgagaaggccagcaaggtcaagctggcacctgagaggattgccgatggcaccatggcatttatgtttgaatcatctttaagtctggcggtcacaaagtggggactcaaggcctccaggtgtttggatgagaactaccacaagtgctgggagccactcaagagccacttcactcccaactccaggaacccagcagaacctaattgagactggaacattgc

SEQ ID NO: 141384 - DNA, 5857 bp, Homo sapiens
  Payload ID: 7793
  Gene Symbol: HOOK1
  Gene Name: hook microtubule-tethering protein 1
  Uniprot ID: Q9UJC3
  ENST ID: ENST00000371208
  CDS Start-End: 258-2444
gcggggctcaggtgcctggcagcgcggccggggcccaggaaggggagggggcgaacgctggagcgaggcgggggcgggtgaggagggggtgacgccggacgcgtcgacagcgcgagggttcgcgcgtgagctgcgcgggtcgggcctggtaccgagctttcctgggggctagcaggtcgtggacgccggctcctggaggagagccggtaggagggagtgtgaaggtgtccgcggcgtcgtcgacggcggcgccggccatggaggagacgcagccgccgccgcagcctaagctgcccctgtgcgacagcctcatgatctggctgcagacattcaatactgcctcaccttgtcaagatgtcaaacagctgactagtggagttgccatggcacaagttcttcatcaaattgatgcagcttggtttaacgaatcttggttaagccgaattaaagaggatgttggggacaactggagaataaaggccagtaatgtaaagaaggtccttcaaggaattatgagttattatcatgagtttttggggcagcagatttcagaagcacttatccctgatttaaaccaaataaccgaatgttcagatccagtggagcttgggaggttgctccagcttattttaggttgtgcgatcaactgtgaaaagaagcaagaacatattcaaaatataatgacactggaagagtctgttcaacatgtggtcatgactgctattcaagagttgatgagtaaagaaatattgagctctcctccaaatgatgctgttggagaattggagcaacagcttaaaagagccttggaagaacttcaggaagcactagcagaaaaagaagagctgaggcaaagatgtgaagaattggatatgcaggtgactacacttcaagatgaaaagaattcactggtttctgaaaatgagatgatgaatgaaaaacttgaccagttggatggctcttttgatgatccaaacacagtggttgcaaaaaagtattttcatgcacaattacaactagaacaattacaggaagaaaacttcaggcttgaagctgcaaaagatgattaccgtgttcactgtgaagaacttgaaaagcagctaatcgaattccagcataggaatgatgaattgactagtcttgcagaagaaacaagagccctgaaagatgaaatagatgttcttagggctacctctgataaagcaaataaactggagtcaacagttgagatatatcgtcagaagctacaagatctgaatgaccttcgcaagcaggtgaaaactttacaggaaaccaacatgatgtatatgcataatacagtcagcttagaagaagaattaaaaaaagcaaatgcagcacgtacacaattagaaacatacaaaaggcaggttcaagatcttcatgttaaactttcctccgaatccaagagggcagacacactagcgtttgaaatgaagcggcttgaagaaaaacatgaagctttacttaaggaaaaagagagactaattgagcagcgtgatactttgaaagaaacaaatgaagagcttcgatgttcacaagtacaacaggaccacctaaaccaaacagatgcatctgctacaaaaagttatgagaatcttgctgctgagattatgccagtggaatatagggaggtgtttattcgactgcaacatgaaaataagatgcttcgcttacagcaagaaggctctgagaatgaacgtattgaggaacttcaggagcagctagaacagaaacaccgtaaaatgaatgaactggaaactgagcagaggctgagcaaagagcgtattagagaattgcagcagcagattgaggacctccagaaatctttacaggaacaaggttccaagtctgaaggcgaaagttccagcaaattaaagcagaagttggaagctcatatggaaaaactcacagaggtccatgaagaattacagaagaaacaagaactcattgaagatcttcagccagatataaatcaaaatgtacaaaagatcaatgaacttgaagctgctcttcagaagaaagatgaagatatgaaagcaatggaggaaagatataaaatgtacttggagaaagccagaaatgtaataaaaactttggatcccaagttaaatccagcatcagctgaaataatgctactaagaaagcagttggcagagaaagagagaagaattgagattctggagagtgaatgcaaagtagcaaaattccgtgattatgaagaaaaactcattgtttctgcgtggtataataagagtctagcattccagaaactggggatggaatctagacttgtgagcggcggtggtgcctgcagtgacactggtgcgtgcactcctgcgcggtctttcttagcgcagcaacggcacatcaccaacaccagaagaaatctctctgttaaagtccctgctacaacatctgattaaactgcaaaaaaaacaaaacaaaacaaaaaaaccacataaaatagaagtgtccttaaaatattttgtacctttcaactaactaccagattgaaaaagagtttatgatgcgggatatcaggtattttaaaatcaacatgcatcaaattaattttgccagttgactttaaaaacaaattatagaattagccatctctctgagggagcacatttgaataattggagatgcagttatacacacatttcaaacaaacatttgtcttttgagagtattataatttcaaattggccttgtatattttagttaaatgttttcagttgtattagtaacttaattaattttcaatagctattcagtaatacttaatcttagaacattaattggatttgtttaatctttttttgttttttgttgatttatatgaaaacagtcttgaggcagggacatggagaactatgcaagggtgatttctttgacttaatatatacaaggctttacttctgtcccctaattcttccattgaatgtgtacctctaccttgtcatgtcatggaagatacaacatttggaagatctgacaattggaatgactttggaataataaaattgactaattggaaattttgcatattctgaaaatctaatctcatagttctaatttgtacctatggcaaataagggcttctggacatcatgtttaaaatgttaagcataagaaataaactgacatttgtaataggtgactttctgatggaaagcaagctatatatatatatatatatatatatatatatatatatatactttttgtgaaatgtctatatactttttaaggtaattaatgaagatttcagttattgcttttaagcataaagttgtatttagcttctgctgaaaaattgtatcatataataattttgcttcattgaaaagggatgttgcagtgatgaaacaaggtgggatcagtttgattttgtttacttattaaggagtttatcttgggctcagtttgtggtattcagttcgtttctgcccaaagctcttattttcagaggtgttacttttgaacttttggggtcatttttaaaagttagcacttttgaattttagttgtgttaaatatgtgctgtcgtatatcatagccatgagccatatatgacaatttaaatttaattaattataaactcagtctcttggttgcaccagccacatttcagatgctcaatagccacatgtggctagtgggtaccatattggacagggcagctatagaatatttccatcattgcagaaagttctattggatagtaccataatctttttatagtaacttggaaatactatttgatattagatgttagaccacaaaaagaagaaaaatgttaggactatttcagatataaaaaggaactgaattgtgacataattagcatcttacattccatacagttgaataccttatgctgtgacaaccatagttaatcatttcagtgctgttcaacatacatacctatcagcagtgtgtttagaccaggggtctgcaaactttctgtgaatggacaaagagtaaatactttagtaaatgtcttaggctttgtggcctacatgatctttgttgcaagtactcaactctgccattatagagttaaagcagccatacacaatatataaacaaaatgggcatagttgtatttcagtaaaactttatttacaaagacaggcggtaggccagatttggcttgcatgctgtagagctgtggtctaaattttattcatagactttctttgcaaatacagtgtgagtattgttccatttacagtattattattttttagatacctggtttttagattcttgcctggtaactttttactgaaaatacaagaatttcgtactgcatttgcatctccgagattagggagcacctgtcaggatatgttgttctatcagggttacttctgttgactacctcttagattttgatacagttatattgttgagtttcattttcatatattcttgtagtgtctgcttgcctgtgacttctggtaaaataaaataagcctttgaaaatattttagcatggtatttaacattttctaaatattatggcattttgacatattttagtcagcgaagacatctgcccctttggtgtttctacttgcttatgattgagattttacaagcccttcaaactccgttttaaaggaatttattgtaaaacattaactttaataaattagtgttttcacagatcagatcattatacttggaacttctaaatcatgcaatttctgaataaggacataaggctagattcatttttcttaatagagaaaaaggaaatttctgatttatcacttttctagttgataagtaggattcaaaacgtttgatatgtaagtatttatataagactaatgtaatttaaagttctgtattattgtgattaatcatacagaaattcaggaactgatcagaagtgagattcttttccacatctggttaatgtagtgagttgacaccctgtgggtggtaaagcattataaacatttcatcttgaaccatgatttatacacatctgtgttataagggaggcttgagtacatataccaatgaagagatattcagcatttgtctatttgataaggaattaaatgtcctagtgattataaagtaaaaccacagaccaatttgcaaatgatcttcaatgttaagcacttgctctaagattaaaattccttttctttttaaggttaagggtgtgtacgtatggcagtgatgtctatgttgagattaacttatgtattgaggaaaatttgaagtttattttttcgatgaataaggctgtcaaatgatttagtatagattaatgacatcttttttagaaatattaaagtgagtattcctcattatgtcatcatttctgataattagagtgctaatttgaatgttagataatgtttccacatctatacctatttctttctagggcacttctgaccctggggcttggggatggcctttaggccacagtagtgtctgtgttaagttcactaaatgtgtatttaatgagaaacattcctatgtaaaaatgtgtgtatgtgaacgtatgcatacatttttattgtgcacctgtacattgtgaagaagtagtttggaaatttgtaaagcacaaaccataaaagagtgtggagttattaaatgatgtagcacaaatgtaatgtttagcttataaaaggtcctttctattttctatggcaaagactttgacacttgaaaaataaaaccaatatttgatttatttttgtaagtatttaggatattattttaaataaatgattgtccattatcaatataatagttgtgaaatgatttaagtaaataaactttatgcttctgtgtctgttga

SEQ ID NO: 141385 - DNA, 519 bp, Homo sapiens
  Payload ID: 7793
  Gene Symbol: HOOK1
  Gene Name: hook microtubule-tethering protein 1
  ENST ID: ENST00000455990
  CDS Start-End: 108-519
aggtcactcagggcggcggggcgaggtcgtggacgccggctcctggaggagagccggtaggagggagtgtgaaggtgtccgcggcgtcgtcgacggcggcgccggccatggaggagacgcagccgccgccgcagcctaagctgcccctgtgcgacagcctcatgatctggctgcagacattcaatactgcctcaccttgtcaagatgtcaaacagctgactagtggagttgccatggcacaagttcttcatcaaattgatgcagcttggtttaacgaatcttggttaagccgaattaaagaggatgttggggacaactggagaataaaggccagtaatgtaaagaaggtccttcaaggaattatgagttattatcatgagtttttggggcagcagatttcagaagcacttatccctgatttaaaccaaataaccgaatgttcagatccagtggagcttgggaggttgctccagcttattttaggttgtgcgatcaactgtgaaaagaagcaagaacata

SEQ ID NO: 141386 - DNA, 2603 bp, Homo sapiens
  Payload ID: 7794
  Gene Symbol: HOOK2
  Gene Name: hook microtubule-tethering protein 2
  Uniprot ID: Q96ED9
  ENST ID: ENST00000264827
  CDS Start-End: 172-2325
gaggcggagcctgggcttgggggcggggcggggcctgcgcctaggggggcggggcggggcggcgctctaggccgagcgggaggtcggggctgcgggcgctcgctggtggcggacccggaggctgctgcggcgccggggctccgtggcctggattgaatccgatcgggagccatgagcgtggacaaagctgagctatgcgggtctctgctcacctggttacagacgttccacgttccgtctccctgtgccagccctcaggacctgagcagcggccttgccgtagcctatgtgctgaaccagatagacccctcctggttcaacgaggcatggctccagggcatctcggaagatccaggtcccaactggaagctgaaggtcagcaatctgaagatggtcttacggagcctagtagagtactcccaggatgtcctggcgcatcctgtgtcagaagagcatctcccagatgtgagcctcattggagagttctcagacccggcagagctcggcaagctgcttcagctggtgctgggctgtgccatcagttgcgagaaaaagcaggaccacatccagagaatcatgacgctggaagaatcggttcagcatgtggtgatggaagccatccaagagctcatgaccaaagacactcctgactccctgtcaccagagacgtatggcaactttgacagccagtcccgcaggtactatttcctaagtgaggaggctgaggagggggacgaattacagcagcgctgtctggatctggagcggcagctgatgctcctgtcagaggagaagcagagcctggcgcaagagaatgcagggctgcgggagcggatgggccggcctgaaggcgagggtaccccaggtctcactgccaagaagctgctgctgctgcaatcccagctggagcagttgcaggaggagaacttcaggctggagagtggcagggaggatgagcgcctgcgctgtgccgagctggagagggaggttgcggagctgcagcaccggaaccaggcgctgactagcctggcccaggaggcacaggccctgaaggatgagatggatgaactacggcagtcttcggagcgtgctgggcagctggaggccacgctgaccagttgccggcgccgcttgggcgagctgagggagctgcggcggcaggtgcggcagctggaggaacgcaacgccggccacgccgagcgcacgcgacaactggaggatgagctacgccgagcgggctccctgcgcgcccagctggaggcgcagcggcggcaggtgcaggaactgcagggccagcggcaggaggaggccatgaaggccgagaaatggctatttgaatgccgcaacctggaggaaaagtatgagtcggtgacaaaggagaaggagcggctgttggcggagcgggactccttgcgggaggccaatgaggagctgcgctgcgcccagctgcagccgcgggggttgacccaggccgatccctcactggatcccacctccacacccgtggataacttagccgcagagatcctgcctgcggagctcagggagacgctcctgcggcttcagctggagaacaagcggctgtgcaggcaggaggcggccgaccgggagcggcaggaggagctgcagcgccacctggaggatgccaaccgcgcgcgccacgggttggagacgcagcaccggctgaaccagcagcagctatccgagctgcgggcccaggtggaggacctgcagaaagccctgcaggagcaggggggcaagactgaagattccattttgctgaaaaggaagctggaggaacatttgcagaagcttcatgaggcagatctggagttgcagaggaagcgggagtacattgaggagctggagccacccactgacagcagcacagcccggcggatcgaggagctgcagcataacttgcagaagaaggacgcggacttgcgggccatggaggagcgataccgccgctacgtggacaaggcccgcatggtcatgcagaccatggaacccaagcagcggccagctgcgggggcacctccagaactccattccctgaggacacagctccgagaacgggatgtccgcatccgacacctggagatggactttgagaaaagccgaagtcagcgggagcaggaagaaaagctgctcatcagtgcctggtataatatgggcatggccttgcagcagcgagctggggaggagcgggcgcctgcccatgcccagtcattcctggcacagcagcggctggcaaccaattctcgccgtggacccttgggacgcctggcatctctgaaccttcgccccactgacaagcactgacagacctcacaatcaagccagcctgggctccacccaccctggcttcctccagctcacatggcgcccagcactgggcttcagccaggtgctcgagagctttgaggccatgatctctgctcttccctctcccagattggtggggagggagggcgggaggtagatataggcctgttctttttagcaatgtgattcttgttgttgattctctctctggagttcatgtgctgcctcaggagactctgattttatatttgagaaaaataaaggcgttcaatctg

SEQ ID NO: 141387 - DNA, 2513 bp, Homo sapiens
  Payload ID: 7794
  Gene Symbol: HOOK2
  Gene Name: hook microtubule-tethering protein 2
  Uniprot ID: Q96ED9
  ENST ID: ENST00000397668
  CDS Start-End: 75-2234
gctcgctggtggcggacccggaggctgctgcggcgccggggctccgtggcctggattgaatccgatcgggagccatgagcgtggacaaagctgagctatgcgggtctctgctcacctggttacagacgttccacgttccgtctccctgtgccagccctcaggacctgagcagcggccttgccgtagcctatgtgctgaaccagatagacccctcctggttcaacgaggcatggctccagggcatctcggaagatccaggtcccaactggaagctgaaggtcagcaatctgaagatggtcttacggagcctagtagagtactcccaggatgtcctggcgcatcctgtgtcagaagagcatctcccagatgtgagcctcattggagagttctcagacccggcagagctcggcaagctgcttcagctggtgctgggctgtgccatcagttgcgagaaaaagcaggaccacatccagagaatcatgacgctggaagaatcggttcagcatgtggtgatggaagccatccaagagctcatgaccaaagacactcctgactccctgtcaccagagacgtatggcaactttgacagccagtcccgcaggtactatttcctaagtgaggaggctgaggagggggacgaattacagcagcgctgtctggatctggagcggcagctgatgctcctgtcagaggagaagcagagcctggcgcaagagaatgcagggctgcgggagcggatgggccggcctgaaggcgagggtaccccaggtctcactgccaagaagctgctgctgctgcaatcccagctggagcagttgcaggaggagaacttcaggctggagagtggcagggaggatgagcgcctgcgctgtgccgagctggagagggaggttgcggagctgcagcaccggaaccaggcgctgactagcctggcccaggaggcacaggccctgaaggatgagatggatgaactacggcagtcttcggagcgtgctgggcagctggaggccacgctgaccagttgccggcgccgcttgggcgagctgagggagctgcggcggcaggtgcggcagctggaggaacgcaacgccggccacgccgagcgcacgcgacaactggaggatgagctacgccgagcgggctccctgcgcgcccagctggaggcgcagcggcggcaggtgcaggaactgcagggccagcggcaggaggaggccatgaaggccgagaaatggctatttgaatgccgcaacctggaggaaaagtatgagtcggtgacaaaggagaaggagcggctgttggcggagcgggactccttgcgggaggccaatgaggagctgcgctgcgcccagctgcagccgcgggggttgacccaggccgatccctcactggatcccacctccacacccgtggataacttagccgcagagatcctgcctgcggagctcagggagacgctcctgcggcttcagctggagaacaagcggctgtgcaggcaggaggcggccgaccgggagcggcaggaggagctgcagcgccacctggaggatgccaaccgcgcgcgccacgggttggagacgcagcaccggctgaaccagcagcagctatccgagctgcgggcccaggtggaggacctgcagaaagccctgcaggagcaggggggcaagactgaagatgccatttccattttgctgaaaaggaagctggaggaacatttgcagaagcttcatgaggcagatctggagttgcagaggaagcgggagtacattgaggagctggagccacccactgacagcagcacagcccggcggatcgaggagctgcagcataacttgcagaagaaggacgcggacttgcgggccatggaggagcgataccgccgctacgtggacaaggcccgcatggtcatgcagaccatggaacccaagcagcggccagctgcgggggcacctccagaactccattccctgaggacacagctccgagaacgggatgtccgcatccgacacctggagatggactttgagaaaagccgaagtcagcgggagcaggaagaaaagctgctcatcagtgcctggtataatatgggcatggccttgcagcagcgagctggggaggagcgggcgcctgcccatgcccagtcattcctggcacagcagcggctggcaaccaattctcgccgtggacccttgggacgcctggcatctctgaaccttcgccccactgacaagcactgacagacctcacaatcaagccagcctgggctccacccaccctggcttcctccagctcacatggcgcccagcactgggcttcagccaggtgctcgagagctttgaggccatgatctctgctcttccctctcccagattggtggggagggagggcgggaggtagatataggcctgttctttttagcaatgtgattcttgttgttgattctctctctggagttcatgtgctgcctcaggagactctgattttatatttgagaaaaataaaggcgttcaatctgc

SEQ ID NO: 141388 - DNA, 965 bp, Homo sapiens
  Payload ID: 7794
  Gene Symbol: HOOK2
  Gene Name: hook microtubule-tethering protein 2
  ENST ID: ENST00000592079
  CDS Start-End: 288-965
cggcccttgtccccttcccccactatcctctccacccgctcccaggggctggagtctggaaaaccacgcgggaggaggttgtggggatatggacgagcatccgaggcccccggttacagacgttccacgttccgtctccctgtgccagccctcaggacctgagcagcggccttgccgtagcctatgtgctgaaccagatagacccctcctggttcaacgaggcatggctccagggcatctcggaagatccaggtcccaactggaagctgaaggtcagcaatctgaagatggtcttacggagcctagtagagtactcccaggatgtcctggcgcatcctgtgtcagaagagcatctcccagatgtgagcctcattggagagttctcagacccggcagagctcggcaagctgcttcagctggtgctgggctgtgccatcagttgcgagaaaaagcaggaccacatccagagaatcatgacgctggaagaatcggttcagcatgtggtgatggaagccatccaagagctcatgaccaaagacactcctgactccctgtcaccagagacgtatggcaactttgacagccagtcccgcaggtactatttcctaagtgaggaggctgaggagggggacgaattacagcagcgctgtctggatctggagcggcagctgatgctcctgtcagaggagaagcagagcctggcgcaagagaatgcagggctgcgggagcggatgggccggcctgaaggcgagggtaccccaggtctcactgccaagaagctgctgctgctgcaatcccagctggagcagttgcaggaggagaacttcaggctggagagtggcagggaggatgagcgcctgcgctgtgccgagctggagagggaggttgcggagctgcagcaccggaaccaggcgctgactagcctggcccaggaggcacaggccctgaaggatgagatggatgaa

SEQ ID NO: 141389 - DNA, 748 bp, Homo sapiens
  Payload ID: 7794
  Gene Symbol: HOOK2
  Gene Name: hook microtubule-tethering protein 2
  ENST ID: ENST00000587178
  CDS Start-End: 122-748
ggggcggggcggcgctctaggccgagcgggaggtcggggctgcgggcgctcgctggtggcggacccggaggctgctgcggcgccggggctccgtggcctggattgaatccgatcgggagccatgagcgtggacaaagctgagctatgcgggtctctgctcacctggttacagacgttccacgttccgtctccctgtgccagccctcaggacctgagcagcggccttgccgtagcctatgtgctgaaccagatagacccctcctggttcaacgaggcatggctccagggcatctcggaagatccaggtcccaactggaagctgaaggtgacaagtggactcctgattagaggacagactggtgaagagatgaccagggacgggccagctaggcacatgtcctgggtgatgggcaggaagagggacagatgtctggtcagcaatctgaagatggtcttacggagcctagtagagtactcccaggatgtcctggcgcatcctgtgtcagaagagcatctcccagatgtgagcctcattggagagttctcagacccggcagagctcggcaagctgcttcagctggtgctgggctgtgccatcagttgcgagaaaaagcaggaccacatccagagaatcatgacgctggaagaatcggttcagcatgtggtgatggaagccatccaagagctcatgaccaaagacactcctgactccctgtcaccagagacgtatggcaactttgacagccag

SEQ ID NO: 141390 - DNA, 444 bp, Homo sapiens
  Payload ID: 7794
  Gene Symbol: HOOK2
  Gene Name: hook microtubule-tethering protein 2
  ENST ID: ENST00000586188
  CDS Start-End: 1-215
tggtgctgggctgtgccatcagttgcgagaaaaagcaggaccacatccagagaatcatgacgctggaagaatcggttcagcatgtggtgatggaagccatccaagagctcatgaccaaagacactcctgactccctgtcaccagagacgtatggcaactttgacagccagccctgcaggagcaggggggcaagactgaagattccattttgctgaaaaggaagctggaggaacatttgcagaagcttcatgaggcagatctggagttgcagaggaagcgggagtacattgaggagctggagccacccactgacagcagcacagcccggcggatcgaggagctgcagcataacttgcagaagaaggacgcggacttgcgggccatggaggagcgataccgccgctacgtggacaaggcccgcatggtcatgcagaccatggaacc

SEQ ID NO: 141391 - DNA, 729 bp, Homo sapiens
  Payload ID: 7794
  Gene Symbol: HOOK2
  Gene Name: hook microtubule-tethering protein 2
  ENST ID: ENST00000586719
  CDS Start-End: 284-565
ctcccaggggctggagtctggaaaaccacgcgggaggaggttgtggggatatggacgagcatccgaggcccccggttacagacgttccacgttccgtctccctgtgccagccctcaggacctgagcagcggccttgccgtagcctatgtgctgaaccagatagacccctcctggttcaacgaggcatggctccagggcatctcggaagatccaggtcccaactggaagctgaaggtgacaagtggactcctgattagaggacagactggtcagcaatctgaagatggtcttacggagcctagtagagtactcccaggatgtcctggcgcatcctgtgtcagaagagcatctcccagatgtgagcctcattggagagttctcagacccggcagagctcggcaagctgcttcagctggtgctgggctgtgccatcagttgcgagaaaaagcaggcctcccccaccttgatccccagaccacatccagagaatcatgacgctggaagaatcggttcagcatgtggtgatggaagccatccaagagctcatgaccaaagacactcctgactccctgtcaccagagacgtatggcaactttgacagccagtcccgcaggtactatttcctaagtgaggaggctgaggagggggacgaattacagcagcgctgtctggatctggagcggcagctgatgctcctgtcagaggagaagcagagcctggcgcaagaga

SEQ ID NO: 141392 - DNA, 607 bp, Homo sapiens
  Payload ID: 7794
  Gene Symbol: HOOK2
  Gene Name: hook microtubule-tethering protein 2
  ENST ID: ENST00000588052
  CDS Start-End: 225-607
aaaaaaaaaaaaaaaaaaaaaagaaacaaagatggtcaggcagacaaaaggggcagacagccagacaggtcacccctagaggaaggcgcacgcagacagaataggatgagatgagcagggaaggagaagtgaggtggagagaggatgggacctacagattcagagtgggaggcctctgaacttgtccacagttccttgttcctccctaggtcagcaatctgaagatggtcttacggagcctagtagagtactcccaggatgtcctggcgcatcctgtgtcagaagagcatctcccagatgtgagcctcattggagagttctcagacccggcagagctcggcaagctgcttcagctggtgctgggctgtgccatcagttgcgagaaaaagcaggaccacatccagagaatcatgacgctggaagaatcggttcagcatgtggtgatggaagccatccaagagctcatgaccaaagacactcctgactccctgtcaccagagacgtatggcaactttgacagccagtcccgcaggtactatttcctaagtgaggaggctgaggagggggacgaattacagcagcgctgtctggatctggagcggcaggt

SEQ ID NO: 141393 - DNA, 801 bp, Homo sapiens
  Payload ID: 7794
  Gene Symbol: HOOK2
  Gene Name: hook microtubule-tethering protein 2
  ENST ID: ENST00000590839
  CDS Start-End: 330-801
gctcccaggggctggagtctggaaaaccacgcgggaggaggttgtggggatatggacgagcatccgaggcccccgggtgcgtacggctgcgcatgagtgggctgtaatcgggtgtctggggttacagacgttccacgttccgtctccctgtgccagccctcaggacctgagcagcggccttgccgtagcctatgtgctgaaccagatagacccctcctggttcaacgaggcatggctccagggcatctcggaagatccaggtcccaactggaagctgaaggtgacaagtggactcctgattagaggacagactggtcagcaatctgaagatggtcttacggagcctagtagagtactcccaggatgtcctggcgcatcctgtgtcagaagagcatctcccagatgtgagcctcattggagagttctcagacccggcagagctcggcaagctgcttcagctggtgctgggctgtgccatcagttgcgagaaaaagcaggaccacatccagagaatcatgacgctggaagaatcggttcagcatgtggtgatggaagccatccaagagctcatgaccaaagacactcctgactccctgtcaccagagacgtatggcaactttgacagccagtcccgcaggtactatttcctaagtgaggaggctgaggagggggacgaattacagcagcgctgtctggatctggagcggcagctgatgctcctgtcagaggagaagcagagcctggcgcaagagaatgcagggctgcgggagcggatgggccggcctgaaggcgagggtaccc

SEQ ID NO: 141394 - DNA, 1097 bp, Homo sapiens
  Payload ID: 7794
  Gene Symbol: HOOK2
  Gene Name: hook microtubule-tethering protein 2
  ENST ID: ENST00000589400
  CDS Start-End: 288-1097
gggctggagtctggaaaaccacgcgggaggaggttgtggggatatggacgagcatccgaggcccccgggtgcgtacggctgcgcatgagtgggctgtaatcgggtgtctggggttacagacgttccacgttccgtctccctgtgccagccctcaggacctgagcagcggccttgccgtagcctatgtgctgaaccagatagacccctcctggttcaacgaggcatggctccagggcatctcggaagatccaggtcccaactggaagctgaaggtcagcaatctgaagatggtcttacggagcctagtagagtactcccaggatgtcctggcgcatcctgtgtcagaagagcatctcccagatgtgagcctcattggagagttctcagacccggcagagctcggcaagctgcttcagctggtgctgggctgtgccatcagttgcgagaaaaagcaggaccacatccagagaatcatgacgctggaagaatcggttcagcatgtggtgatggaagccatccaagagctcatgaccaaagacactcctgactccctgtcaccagagacgtatggcaactttgacagccagtcccgcaggtactatttcctaagtgaggaggctgaggagggggacgaattacagcagcgctgtctggatctggagcggcagctgatgctcctgtcagaggagaagcagagcctggcgcaagagaatgcagggctgcgggagcggatgggccggcctgaaggcgagggtaccccaggtctcactgccaagaagctgctgctgctgcaatcccagctggagcagttgcaggaggagaacttcaggctggagagtggcagggaggatgagcgcctgcgctgtgccgagctggagagggaggttgcggagctgcagcaccggaaccaggcgctgactagcctggcccaggaggcacaggccctgaaggatgagatggatgaactacggcagtcttcggagcgtgctgggcagctggaggccacgctgaccagttgccggcgccgcttgggcgagctgagggagctgcggcggcaggtgcggcagctggaggaacgcaacgccggccacgccgag

SEQ ID NO: 141395 - DNA, 14398 bp, Homo sapiens
  Payload ID: 7795
  Gene Symbol: HOOK3
  Gene Name: hook microtubule-tethering protein 3
  Uniprot ID: Q86VS8
  ENST ID: ENST00000307602
  CDS Start-End: 201-2357
cggtcccgagtgaaaggagaaggaggggcgctgggggtgacggtgcggagccgctgccagcgctgggcgagagtcggcggccggatccgaggagcaggcgggcctgaggccgagtcagctgcgcgggcccccggatcccccgacagagcggcggcggtgtctggccaggcggtaggcgctgcctggccgcggcggggaagatgttcagcgtagagtcgctggagcgggcggagctgtgcgagagcctcctcacttggatccagacatttaatgtggatgcaccatgccagaccgtggaagatttaacgaatggggttgtgatggcccaggttcttcaaaagatagatcctgcatattttgatgaaaattggctaaacagaatcaaaactgaagtaggagataattggaggctaaagataagcaatttaaagaaaattttaaaaggaatcttggattataatcatgagattttaggacagcaaattaatgactttacccttcctgatgtgaaccttattggggagcattctgatgcagcagagcttggaaggatgcttcagctcatcttaggctgtgctgtgaactgtgaacagaagcaagagtacatccaagccattatgatgatggaggaatctgttcaacatgttgtcatgacagccattcaagagctgatgagtaaagaatctcctgtctctgctggaaatgatgcctatgttgaccttgatcgtcagctgaagaaaactacagaggaactaaatgaagctttgtcagcaaaggaagaaattgctcaaagatgccatgaactggatatgcaggttgcagcattgcaggaagagaaaagtagtttgttggcagagaatcaggtattaatggaaagactcaatcaatctgattctatagaagaccctaacagtccagcaggaagaaggcatttgcagctccagactcaattagaacagctccaagaagaaacattcagactagaagcagccaaagatgattatcgaatacgttgtgaagagttagaaaaggagatctctgaacttcggcaacagaatgatgaactgaccactttggcagatgaagctcagtctctgaaagatgagatcgacgtgctgagacattcttctgataaagtatctaaactagaaggtcaagtagaatcttataaaaagaagctagaagaccttggtgatttaaggcggcaggttaaactcttagaagagaagaataccatgtatatgcagaatactgtcagtctagaggaagagttaagaaaggccaacgcagcgcgaagtcaacttgaaacctacaagagacaggtagtagaactacaaaacagattatccgaagaatcaaagaaagcagataaactagattttgaatataagcggctaaaagaaaaagttgacagtcttcaaaaagaaaaggacaggctgagaacagaaagggattctctgaaggaaaccattgaagagcttcgttgtgtacaagctcaagaagggcagctcacaacacaagggttaatgcctcttggaagtcaggagtcttcagacagtctagctgcagagattgttacacctgaaatcagggagaaacttattcgtcttcagcatgagaataagatgttaaagcttaaccaagaaggttcggacaatgaaaaaatagccttattgcagagccttctagatgatgcaaatctacgcaagaatgaactggagacagagaataggctggtgaatcaaagacttctggaagtacagtcacaagttgaagaattacaaaaatctttacaggatcaaggctcaaaagcagaagattcagtccttctaaaaaagaagcttgaagaacatctagagaagctgcatgaggccaataatgaactacagaagaagagagccattattgaagatctcgagccaagatttaacaacagctccttaaaaattgaagaattacaagaagctttacgaaagaaagaggaagaaatgaagcaaatggaagaacgatacaaaaaatacttagagaaagccaaaagtgtcatccgtactttagatcctaaacagaatcaaggagcagcaccagaaatacaagctcttaaaaatcagctccaggaacgagaccgactgttccactcattagagaaagaatatgagaaaacaaagagtcagagagagatggaagagaaatatattgttagtgcctggtacaatatgggaatgaccctgcataaaaaggcagctgaagatagactggcaagcacaggctcagggcagtcatttctggcgaggcagaggcaagcgaccagcagcagaagatcatacccaggccacgtgcagccggccacagcaaggtagagaagttgtgccgctcaatcacagacacctgcacccacaacatacttctgttacacacaagaacatttcaggaaactcagccagcttattttttgtttctcttctatgtcaatacttagtgtttctcattttgaggactttttctctctcctgtatctttgttttagtttctttggtttttattttgtagtcctttcagttatttttaatgtgccaaaaatttgtacatgttcaattaaaaatgttgtataatagtgtaatacttttctttgtatgaaaatgtcctcttcttcaaaggtataggctttgtaatgaattagattttctgccaataattgatatacaatttatattctttattgtgcctgtgtgttaccatgctaagaatgtctttgtttaaagggaattaatctttttatgatgtattaatctgtgttttcaattgttttccaagtacagttcaaataacttgcatatttactatacaaaatggttgacaagtgttctttttgcaaagacttgaatacattggcagaggtgctaatcacatcttccctaaggcacctggaagaattatttgaggaaaaaatgagttttcacattgttttataggaaattaaatttgtccaaagatttggagactatttttaaaacataaatacataaaatttcattatttcctgctatcttgtttgctggcagaagtgaatgtttggtgaggttattttgggataaattacaaaagaaaaaaaattagacactgcattaatttcttgttcttttggaatatcttagtaactgaggatcattttctaacaatgtggttgacataccttcagttgctttccacatctaaaagagttatctttcatatatgtacaagttattggtagtcttatttttgggctgtttgttgacttatgccccatttgttttacttgttctttaatataaacccttccattttttaacaattcctaacacttgatatcttaatatcagtcactaacattagtaacttcttgtatgttatattatggcagatctctttacgttttttctcacatctatctgctagtccaggaatttgttactaaatagattttcttggatatttggttgcctcaaagtgcttacatttgttaacagattgtaaaccacatttatttacattgatgaatgggctgttgaataatcattgtaaagcactttgtatatataaggtgctatataagtgtgaaatatcattcatttataaatgaaatgccttctaactttccatattgacttatgtatttggtcccaaattatatttaagtcttttttcttgcaacgtagcccattttttgaaagcaaaacatttctgaaattaggtcatggtttttttgtttatttttaggttaggtcacttaatataggaggatgttttctcatgtacttgctatttgcaagttcaggtttcatttggttctttatgttaaatacgaataagtaacctcaaatcaagctaaatgtaattaagaattttcagcaactatattcaagtgtttgatttttaaattctttctttctttttaataagaaagatgacctaaaaatcagtggtatttgtttgtcctcagaagccgtagttgaagaaagatattagagtatacacagaactggagccatacattgtgctaattttttacattaagtacagaagtctgagcacagcatgaatgcttctgcctgacaggaccacaaagcagcagaagttagggataaatggagatagccatgagtagaactgctgtagggcttcaggaggctacgcagacctgatcaactgcaaagtttccaaagtaaaagattaaaaactttcagacggttcttacctctacccgtgtttcacaaatagcctgaggatccaactatttttaaagcaaattggggccagacgtggtgcctcacgcctgcaatctcaccatttgggagacctaggtgggggtggatcacttgaggtcaggagtttgagaccagcctggccaacatggtgaaaccccatctctactaaattacaaaaattagctgggcatggtggcatgtggctgtaatcccagctacttgggaggctgaggcaggagagtcacttgaactcaggagccagagactgcagtgagctgagatcgcaccactgcattccagcctgggcgacagagtgagactctgtctcaatcagtcaatcaatcaatcaatcaaattggaatatgagcactaaccttggtaagttaaaattttgggaaaattgtacctgcagaatatgatggatgaaaacaacagccaggtgcagtggctcacgcgtataatcccagcactttgggaggccgagacaggcacatcatctgaggtcaggacttccagaccagcctgtccaacatggtgaaactccgtctctactaaaaatacaaacaattagccaggcatggtggtgtgtgcctgtagtcccagctacttgggagggtgaggcaggagaattgcttgaacctgggagacagagattgcagtgagccgagatggcgccattgcaccccagcctggcgacaagagcgaaactctgtcgcaagaaaaaaaaaaaaaaaaaaaaaaaaaaaaacagtctgtgaactactcactgaatgaattttgttctgtgagatgagaggttttcattttcattttctatttacagccccagtcctaatctcctacccatccacctacccagatattttttctctatctgggttggaaaggccccaggcttttagaggggagttttacttctgacttttttttccccccgagacggagcctcgttccgtcacccaggctgtagtgccgtggcatgatctcggctcactgcagcctctgcctcccgggttcaagcaattctcctgcctcagcctccagagtagctgggattacaggtgcccaccaccatggctggctaatttttgtaatttagtagagatggtgtttcaccatgttggccaggctggtctcaaactcctgacctcgtgatctacccacctcggcctcccaaagtgctgagattacaggcacgagccaccgcgcccagtcgtacttctgacttttcttcagcatctgttgtatgctattattttgatgtttacatttataattttctttcttttttttttttttgtgagatgatgtctcgctctgtcacccaggctggagtgcagtggcgcgatctcggctcactgcaagctccgcctcccgggttcacgccattctcctgcctcagcctcctgagtagcggggactacaggcgcccgccactacgcccgactaattttttgtattttttagtagagacggggtttcaccatgttagccaggatggtctcgatctcctgacctcgtgatccacccgcctcagcctcccagagtgctgggattacaggcgtgagccaccgcgcccagcctacatttataattttcattctcttttacctataaaattcagtgtattagtttcattacataggagaaattatatttctaaacattttatgatgtttaaaaacaaaacaggctgttgtaaaaaaaaaaaaaaaaaaaacttctgaatatactttaggtatcagaaagccaagaataaaatttagctctaacggtggcaactccatgtccggtgtccagctttggacagggtttatgacgtttctgtttctctagtaatgattaatgattcctcaggagattcgtgatgttgtctggtctatctggaaatttaaagtcactaggagctttgcctcatcgtgagtgatgctgtgctgtatttttacaaactctcgcatacagcaccttcctggggccacgttggcttgtgcagtggagcttgtccaggcaccagcatggagcaagtacagggttgctgtgttgggttggagcacactgtcaccacagtgtctgaagtcttataaacaggaagatcattttctgttttccttctaaccagggtgagaaaatacaaagtaaagaactaaagaatattaaaacctagcatttatgttccacagtgtgtatttcagaagtttgtaatccagaaaatatagtagtgtataatatctgaaaagagaatcaagtatacaattgtacatatttttaaagaactttgaaaaactccgtcatatcttttaccatttgtctatttgatagtaatgcagaaaaaagtccctaaagaccctgtgttccaaaatttaccaagattgacatttctattagacatccttaacctaagtgttttaattagattattagactataataaggatgaaattgctgtctgtaattttgttgaggttttattgttaatataataaaagctcaactgtacaaaattaagctaaatgttatccagtcagaaacatcagcctgtggccaggtgcggtggctcacgcctgtaatcccagcactttgggaggccaaggcaggcggatcacctgaggtcaggagttcaagaccagcctggctaatatggtgaaaccccatctctactaaaaatacagtattagccaggcatggtggcaggcgcctgtgatcccagctacttgggaggctgaggcaggagaatcatgtgaacccaggaggtggaggttgcagtaagccgagattgtgccactgcactccagcctgggccacagagtgagactccatctcaaaaaaaaaaaaaaaaaaaaaaagaaacatcagcctgtatattccagtagttctcacagaagaatgaaaatccgtgctgtgcaaatagatcagtagtgagtgagtgttaagtgaaagatgagctaggttgaagaaaatatacattttattgatgagccactttgctatctctccttccttcctccttccttccttccttccttccttccttccttcccttcttttcttttttcttttcttttcttttctccctcctttcttccttcccttcccttcccctcccctcccccaggctggagtgcagaggcacgatcctggctgactgcaaactctgcctaccaggttcaagcgattctcctgcctcatcctccctagtagctaggattacaggcatctgccaccacgcccagctaatttttgtatttttacaaaatacaaagagacggggtttcaccatgttggccaggctggtctctaactcctgacctcaggtgatccgtccaccttggcctcccaaagtgctgggattacaggcgtgtgttactgccccagcctcctatttccttttcgaaagtagcagtttggtttattctcgtttgctaagtaattgtttgaaatatttttcagcctctcctgctccctcacaaaaattcacctgtcattttaatgataacagcatgttaaaaacttggaagtctttatcccaatataagaattatcttgaaacaaaaatctaaattacttttaaaaattctcttaactctgcatttagtctcctattatctagatctctgagtccaggataactccagttatccccagttggatcatgtgtgatttatctgagaaagcatccacaacccacagctagtggaaaccgagctagtttacagccacgtggataagaacatctttgtttctaaagtgagaggaaagtgcttggtatcttgctttttgctgagggcaaaataacaacatgaagacaaagtgctttttgttgtctattcatgaaactgtagaagaatattttgagtttttattcttatattatgaagggattctttgcctagcagtggccgtcaaactgatgtagcattgtacttctcaacagtgaagcctgtgtaataccatacagtaggatgaaagactattctgagcaaaatcaaatgggatgtcagaatctttgaaaattattttatcattttttctattttttcatttttataaattagaaggattttccattcaataaggataatctctcttcctatcattctgtcaaaatggcagtttcttttggtaattatccaacctagtttcattacatttagaaggaggtttcagagcttattcttgataactataataatgatttgaatgttttatatcatgaagttttttctatgaggaaggctattctcaatgtatctgtcgtctaattttttattttctatctataaagaatatttaaataataattggtgtatgttccttttgttgaaaatgttttattgtccagttttaacacagaagtggtctaaagttttgcagcaaatgctgttcagttcccagaagcctaaaaaacataacataatatgctaacagagctaatttccacccaatccctcaaattaccgaagtattaatatttagcttcctttctagaaaacaaggggcagcacaaatggggtggcatccatctcttttaaatcactgatgattttctggggaagtatatatagatgattttattttttaaatagccttttatcaaaccatttcacatgtattatctatatgactatagaaacttataaaacatttaattcatgttgacttaaaacatgggcatccttggattctccacattgactgaaatgatagagaaagggacatttgtttgagaaacaagagacctgtacctaattatggcaagtatatgagttttggtgattgtggggggttataaatgttttcctatgatagataaatatatagatatagatcaggaattacttgatgtctcttcagaagttttctgttttcttataatttccagtaatactctgtaagactcggtttgcatgctgtgtgtgtttgcatgagtatagaaacctaagaacataatggaaggctattaaggcaaattcattcctagaaagtggagtggatcattgggataagaaatagcctaattataaacaaatatgcaggcagagggaagtcctaatacaatgaaaacttgcattatctaaacagatgttcccaaagcaatagtttgcctaaaatcctctgtattacatgattattcagtaaaagagtaaacaaatatctaatttattttctaattgtccttcccttcattgagtattaactaggtgcataatgtagttgtatatgtttactagtaaagggaaaaacacttattttcattttgagactgtttggctattactaaagctgagaaagtgattttaggtcgccaaggatactatgatttgatgagatgagaagaaatctgcggtggctgaaaatcgtgaccaacttggtgttatctagatctgctttatctagtttgcaagccataggctcaattttatgtccttcttacttacacacagtagccccacacagttttgttttaaatgaaggcaaaagtagacatttttaaagtatattcaacattgtgccattatttacctgataaaggtgaaatcagaggtgtccacggcctcaaagtttgggcccatgggactatcaaatccgaattatatctacttagagcttagaggaagaattaggtatcatgagaaaagcaactcctacttgagagaaagaagactaccaaagcatgttgaggctttaacatgggagacttccaggtaggcgttaacacttgagtggtaactagcttgatgaaggaaaataattactttagcagttatgttgtaaaattaataaaaaggactcatgtttattctggtgtatttgtcaacccatgggtagtgattactccgtgtacattctatagtgtgtgtattttatttagtgtcttaatatatagtctttatatagtatcttaatattatttactgttacttctagtcatttatgtagtatattttactgcaaaatttgtagcactttactaatattagatcattattttccctcttcccctctacctttctggcattttctgttatcttagagtcaggaatctaaaggtctaagtctagaaatctgttggaagctgggttggagctactggatatgagttactttttacatgtctccttaagaagactcttttataatgtaatacttagaagccaaatcctttcaaacgcaaacacccttgaaacttgatgctttctgaagttgtattcataaaaattatcccatcttacagttaatcagaagatgttcttacctttggtttgcctgcctcctgaaacacaaacctgcagattgcccctaacttcagcagtgcctccgtcactgcatgtacctaaaagacaggaaagccaagttctgggagctgtcaagtcggaggatcaggaaaatggtggggaagaggtgactggaaaggcaggcactaaagatggcaggctgcaaaagcattctgagttcccctgtaacagataggttttatgaactcagctgttttcttttttctttttttttcttttgagatggagtctcactctgagtctcactctgttgcccaggctggagtgcagtggcacaatctcagctcactgcagcctccacctcccggtttcaagtgattctcccacctcagcctcccgagtagttaggattacaggtgcccaccaccacgcccaactaatttttgtatttttagtaaagacagggtgtcgccatattggctaggctggttttgaactcctgacctcaggtaatccacccgcctcagcctcccaaagtgctgggattattataggcgtgagccaccatgcccagtgaacttggccattttcttacattcatatatagcaaagttttcaacttgtctaccgagagactttctttaggagccaggacttctacatttgtaacttgagtatattaatattcaaatcatagttcaaaaatactgaaatacttgtttattatgttacataaatatggacacaattactgccaaagaatagagagatttgcttatgagaacattctgtcatttgttctgtttgtagatgagagacatgcttttaaagtacaaaacgtttctcttctaccttaccccctgttctactgacgtgctttgcatgagaagctcatctagaagagagcaacgctggaatagagaagtctagaccctggcctttgagggaaaggactgctttttttctctcccaaattagaaaattaaaagtgaaacataacacataaggacgaaatacaatgttctgaatatcttccactaattaattgttgaatgattaagtctctaagtatcttaacttccattgtcttcttgttaacctagacaagagtagattattcagtagccacatgtgacagttaaaattaagtaaaattaaaactatagtttctcagtggcctagccacatttcaagtgttccacagtcacatgtggatagtagttacctatcagacagtacaggtatagaacatttccagtattgccaaaaatgctattcaacagcacttttattgcccagagagaaaataaggacaaaataaaggcagtgaagtaacttaagacaactctgagattttaccaccatacttagagaaagtttttctgttataaaaattaatactaatcctttttaaagaccttggaaaaaatcaaaaccccattcctttaagctagtcttcagtatatatttttctaagaacagattctcaatactttatttttcaagtgataaaatcattttataaatcatttcttaatatcttcagtgttttttccctttttatgtaaactcttttaaaattgatattagctgggcatggtagctcatgcctgtagtcccagctactccagaggtcgaggcaggagcatcgcttaagcccaggaggttcaggctgcagtaaggtctgatcacacctgactgcactccagcctgggtggcaaagcaagacccctgtctctaaaaaaaaataatataaattgatgttatatagttaacatttatcaggcaaattcatatgaatgcttatttcaaataaagattgatagatttaatgatatccttccttttaaatttatatagatctaatgaacattgccaacagttttttttgtttctgtcccttaaacatttcccctgaaagtccacctcaaaggtacatcaagatgcaaacaatttttttatcttcataacttcctgctcttattaacttgtattatgaatcaaattaagttttatgtataaggcatttactattccagtgacttagctaatgaaaacatttaaaaatatgtattaatttacttggcctgctactaaagtgcttaacataactaaatggatctatagtaacatgtctaaattttttaatggaaataagggactaaccataatccttttgagtcagcttggtgcttacaattattttgttaggaaatcttgatgctttcttctttctctttaaatttttgtaatcaagcaacagacttgatccagcagtgtcgaattccaagcaagttatgatgattcttattgtagttcaagtacagatgagtaagtggtgtgacttcagtttattatcttcttggtgacctactttagtatgtgttctgtagcgattcatattagttaagggacgttttcaatatgcttgaaataagaaatagcattttactctaaatacaagaaatgactgtacacaaatgctaatcagtgatttggggccttttaatgtctttaacagcaatcttttatttatttatttatttatttttgagacggagtcttgctgtgtcaccaggctggagcagtggcacgatctcgcctcactgcaacctccgcctcccaggttcaagctattctcctgcctcagcctcccaagtaactgggactgcaggcacatgccaccacatccagctaatttttgtatttttagtagagacggggtttcaccttgttggccaggatgatctcgatctcttgatctcgtgatctgcccgcattggcctcctgaagtgctgggattacaggcatgagccactgcgcccggcccaaatcttttattttttaacagccttagttatttataattcaaatgcactaaaatatcatcgctgtcatgaactttgctgtttacaggttctgtgtaattcagaatgctttgtacttagaaaataatttctaggcttatcttgttttgcagttttcatgttttgacaattgcccaccatttacaatactcaatttttgattatgaaatgaatagtaaaattcaaacatatctaataataatttgccttagtttgattaataaattatatcaaaaaacttggggatagaaagaggcttttttttccccctgtagtatttttaaaactttttagatgagctggatgaaaccttagtacattggagctggagttgtattgagtacagccccaactctgaagccttatattcatgtcttaagtaccattgattgttctgtgaattgttgttagtttcatatttgacattgtagtaatccaccttgcattttagtctttgcaaaaaggatattgctaggtatattcttatttctgattgagtattgaatttacatttttcagaatttcattctttgtcattataatccaaaaacaatgtccacatcagacttggaacttctcacttcaaaaatgaaatacagatttagcagtgttgtacataatgatgtccaagcatttttccacctgtttactgagttttccaaccatttactatgtgttgagattggtgggttttctggctgtttttctgaggtgaatgacttgttacagagcctcagtaagaaatttcaactaaaatcacaaaaacataaagtccaggaaaccaccagaagatggatttttagtgtttttgaaatcttgtatttccttttgatatcatttactcattttaattttacgactgccaacttgttacggtattaattatatgtatgtgtttatatgtatgcatataatatatgtatatgtatatgaagaataaagttaagatttggtcaaactatattttcccattcaagtacaaaaatgttttcaaggctgcaaaaagtgtacagttgttaaacaagttgtaaataaagacttgtataaaaattca

SEQ ID NO: 141396 - DNA, 774 bp, Homo sapiens
  Payload ID: 7795
  Gene Symbol: HOOK3
  Gene Name: hook microtubule-tethering protein 3
  ENST ID: ENST00000533338
  CDS Start-End: 1-94
aggctcagggcagtcatttctggcgaggcagaggcaagcgaccagcagcagaagatcatacccaggccacgtgcagccggccacagcaagatgagagacatgcttttaaagtacaaaacgtttctcttctaccttaccccctgttctactgacgtgctttgcatgagaagctcatctagaagagagcaacgctggaatagagaagtctagaccctggcctttgagggaaaggactgctttttttctctcccaaattagaaaattaaaagtgaaacataacacataaggacgaaatacaatgttctgaatatcttccactaattaattgttgaatgattaagtctctaagtatcttaacttccattgtcttcttgttaacctagacaagagtagattattcagtagccacatgtgacagttaaaattaagtaaaattaaaactatagtttctcagtggcctagccacatttcaagtgttccacagtcacatgtggatagtagttacctatcagacagtacaggtatagaacatttccagtattgccaaaaatgctattcaacagcacttttattgcccagagagaaaataaggacaaaataaaggcagtgaagtaacttaagacaactctgagattttaccaccatacttagagaaagtttttctgttataaaaattaatactaatcctttttaaagaccttggaaaaaatcaaaaccccattcctttaagctagtcttcagtatatatttttctaagaacagattctcaatact

SEQ ID NO: 141397 - DNA, 485 bp, Homo sapiens
  Payload ID: 7795
  Gene Symbol: HOOK3
  Gene Name: hook microtubule-tethering protein 3
  ENST ID: ENST00000533539
  CDS Start-End: 1-485
gaagaattacaaaaatctttacaggatcaaggctcaaaagcagaagatgctatttcagtccttctaaaaaagaagcttgaagaacatctagagaagctgcatgaggccaataatgaactacagaagaagagagccattattgaagatctcgagccaagatttaacaacagctccttaaaaattgaagaattacaagaagctttacgaaagaaagaggaagaaatgaagcaaatggaagaacgatacaaaaaatacttagagaaagccaaaagtgtcatccgtactttagatcctaaacagaatcaaggagcagcaccagaaatacaagctcttaaaaatcagctccaggaacgagaccgactgttccactcattagagaaagaatatgagaaaacaaagagtcagagagagatggaagagaaatatattgttagtgcctggtacaatatgggaatgaccctgcataaaaaggcagctgaagatag

SEQ ID NO: 141398 - DNA, 598 bp, Homo sapiens
  Payload ID: 7795
  Gene Symbol: HOOK3
  Gene Name: hook microtubule-tethering protein 3
  ENST ID: ENST00000526882
  CDS Start-End: 1-305
cagaaagggattctctgaaggaaaccattgaagagcttcgttgtgtacaagctcaagaagggcagctcacaacacaagggttaatgcctcttggaagtcaggagtcttcagacagtctagctgcagagattgttacacctgaaatcagggagaaacttattcgtcttcagcatgagaataagatgttaaagcttaaccaagaaggttcggacaatgaaaaaatagccttattgcagagccttctagatgatgcaaatctacgcaagaatgaactggagacagagaataggtacttgtgcccataaatttccctcttactacggcttttgctgtatcccatagatttcggctggtgaatcaaagacttctggaagtacagtcacaagttgaagaattacaaaaatctttacaggatcaaggctcaaaagcagaagattcagtccttctaaaaaagaagcttgaagaacatctagagaagctgcatgaggccaataatgaactacagaagaagagagccattattgaagatctcgagccaagatttaacaacagctccttaaaaattgaagaattacaagaagctttacgaaagaaagag

SEQ ID NO: 141399 - DNA, 1129 bp, Homo sapiens
  Payload ID: 7796
  Gene Symbol: HOPX
  Gene Name: HOP homeobox
  Uniprot ID: Q9BPY8
  ENST ID: ENST00000317745
  CDS Start-End: 186-407
gaaggccgcctaccggggaggccggaggccggctagtcgcggactcgggcgaacccaccctcgcgatctgtcaagtctgtccccaggggaggtccccctttcgggaggaagtttttaaggggatttctcaaaatcacccccgcgcttccttcactccttccttagagccggagcgcgcagggaccatgtcggcggagaccgcgagcggccccacagaggaccaggtggaaatcctggagtacaacttcaacaaggtcgacaagcacccggattccaccacgctgtgcctcatcgcggccgaggcaggcctttccgaggaggagacccagaaatggtttaagcagcgcctggcaaagtggcggcgctcagaaggcctgccctcagagtgcagatccgtcacagactaaggagatggcaggcattgacagcttcactccatgaaggccatctctgtttctctcctccgcttaaccaagctgttgtggtttttcagcatagtgttgtatgttccattgctagctgtcctgctgtttaacacagtgttgtattttttttctaaatgtacataattagaaaagaaaataacaataggaagctatgtgtatcttctgtgtaaagcagtggcttcactggaaaaatggtgtggctagcatttccctttgagtcatgatgacagatggtgtgaaaaccatctaagtttgcttttgaccatcacctcccagtagcaatttgctttcataatccatttagcaatccaggcctctgttgaaaagataatatgagggagaagggaacacatttccttctgaacttacttccctaagtcactttccttatgtatcatctaatacaatgatggttgagtgaaaatacagaaggggtgtttgagtattcagatttcataaaacacttccttggaatatagctgcattaacttggaaagaagcctgttgggccagaagacagaaactccaactggcaaaaaagcaagcatctaagaaaaaaaaccaccaaagttcttgaatttactatatttaaatgcattggttaagtttattttgctaaataaagtgaactgctttttgtctctaaaatgatattctaaataaaaccttaactttttgttgaa

SEQ ID NO: 141400 - DNA, 1611 bp, Homo sapiens
  Payload ID: 7796
  Gene Symbol: HOPX
  Gene Name: HOP homeobox
  Uniprot ID: Q9BPY8
  ENST ID: ENST00000337881
  CDS Start-End: 658-879
acagatgcaggggaaataaatgagaatcgtttttgagggagacctaaaactgtatcatcctagcccgaatctctcccttttaactgttctttatgtgtacattctgtgcccaaaagaaaacaacctttcattaattgggcaattgtccaggctcttagcttggcatccagctctcagagctgtgaaatcaaccgcaccagatctacgctttgaaatgaggcaacatctaactggaaactcgctcaaagtaaggaagtggatgagaagactcagggtcccttttctcttccccgtcttctctcagccacatctctcttatcctatcttggtgaagaagcttgcttggctaggagagaggtcagggacgagaagatagtgacgagaaagttccatgagactctcagaagtcccagcctgaacatcaaacctgaataaccaggagagacgtaacctcggcatactttcagtggtttacctcctgcccacgctgcaggtttttcaggtccttgctcgagtgtgtgctcataggcgtaaataaacgtgctatcagcagcctgcgtcagccagcccagctatttaagcaggctggcatcagcaaacacagcttccaaacccagggcttgcgcttgcctttgcctcttccaccgcgcagggaccatgtcggcggagaccgcgagcggccccacagaggaccaggtggaaatcctggagtacaacttcaacaaggtcgacaagcacccggattccaccacgctgtgcctcatcgcggccgaggcaggcctttccgaggaggagacccagaaatggtttaagcagcgcctggcaaagtggcggcgctcagaaggcctgccctcagagtgcagatccgtcacagactaaggagatggcaggcattgacagcttcactccatgaaggccatctctgtttctctcctccgcttaaccaagctgttgtggtttttcagcatagtgttgtatgttccattgctagctgtcctgctgtttaacacagtgttgtattttttttctaaatgtacataattagaaaagaaaataacaataggaagctatgtgtatcttctgtgtaaagcagtggcttcactggaaaaatggtgtggctagcatttccctttgagtcatgatgacagatggtgtgaaaaccatctaagtttgcttttgaccatcacctcccagtagcaatttgctttcataatccatttagcaatccaggcctctgttgaaaagataatatgagggagaagggaacacatttccttctgaacttacttccctaagtcactttccttatgtatcatctaatacaatgatggttgagtgaaaatacagaaggggtgtttgagtattcagatttcataaaacacttccttggaatatagctgcattaacttggaaagaagcctgttgggccagaagacagaaactccaactggcaaaaaagcaagcatctaagaaaaaaaaccaccaaagttcttgaatttactatatttaaatgcattggttaagtttattttgctaaataaagtgaactgctttttgtctctaaaatgatattctaaataaaaccttaactttttgttgaagatgcactga

SEQ ID NO: 141401 - DNA, 1164 bp, Homo sapiens
  Payload ID: 7796
  Gene Symbol: HOPX
  Gene Name: HOP homeobox
  Uniprot ID: Q9BPY8
  ENST ID: ENST00000381255
  CDS Start-End: 221-442
ctaccggggaggccggaggccggctagtcgcggactcgggcgaacccaccctcgcgatctgtcaagtctgtccccaggggaggtccccctttcgggaggaagtttttaaggggatttctcaaaatcacccccgcgcttccttcactccttccttagagccggaggtcggtgagggcccgcggaatcatctatctcgcccccgtcgcagcgcgcagggaccatgtcggcggagaccgcgagcggccccacagaggaccaggtggaaatcctggagtacaacttcaacaaggtcgacaagcacccggattccaccacgctgtgcctcatcgcggccgaggcaggcctttccgaggaggagacccagaaatggtttaagcagcgcctggcaaagtggcggcgctcagaaggcctgccctcagagtgcagatccgtcacagactaaggagatggcaggcattgacagcttcactccatgaaggccatctctgtttctctcctccgcttaaccaagctgttgtggtttttcagcatagtgttgtatgttccattgctagctgtcctgctgtttaacacagtgttgtattttttttctaaatgtacataattagaaaagaaaataacaataggaagctatgtgtatcttctgtgtaaagcagtggcttcactggaaaaatggtgtggctagcatttccctttgagtcatgatgacagatggtgtgaaaaccatctaagtttgcttttgaccatcacctcccagtagcaatttgctttcataatccatttagcaatccaggcctctgttgaaaagataatatgagggagaagggaacacatttccttctgaacttacttccctaagtcactttccttatgtatcatctaatacaatgatggttgagtgaaaatacagaaggggtgtttgagtattcagatttcataaaacacttccttggaatatagctgcattaacttggaaagaagcctgttgggccagaagacagaaactccaactggcaaaaaagcaagcatctaagaaaaaaaaccaccaaagttcttgaatttactatatttaaatgcattggttaagtttattttgctaaataaagtgaactgctttttgtctctaaaatgatattctaaataaaaccttaactttttgttgaa

SEQ ID NO: 141402 - DNA, 1141 bp, Homo sapiens
  Payload ID: 7796
  Gene Symbol: HOPX
  Gene Name: HOP homeobox
  Uniprot ID: Q9BPY8
  ENST ID: ENST00000381260
  CDS Start-End: 68-352
cgcaccagatctacgctttgaaatgaggcaacatctaactggaaactcgctcaaacgcgcagggaccatgtcggcggagaccgcgagcggccccacagaggaccaggtggaaatcctggagtacaacttcaacaaggtcgacaagcacccggattccaccacgctgtgcctcatcgcggccgaggcaggcctttccgaggaggagacccagggtagtgatttgatctccaggagcaaaatatggcacccagaaagtagcccccaaagagaaggctacccccatgatagtctgccgtgcttggctttcgattacttttctctactgccgccccagtgtaaagaaatggtttaagcagcgcctggcaaagtggcggcgctcagaaggcctgccctcagagtgcagatccgtcacagactaaggagatggcaggcattgacagcttcactccatgaaggccatctctgtttctctcctccgcttaaccaagctgttgtggtttttcagcatagtgttgtatgttccattgctagctgtcctgctgtttaacacagtgttgtattttttttctaaatgtacataattagaaaagaaaataacaataggaagctatgtgtatcttctgtgtaaagcagtggcttcactggaaaaatggtgtggctagcatttccctttgagtcatgatgacagatggtgtgaaaaccatctaagtttgcttttgaccatcacctcccagtagcaatttgctttcataatccatttagcaatccaggcctctgttgaaaagataatatgagggagaagggaacacatttccttctgaacttacttccctaagtcactttccttatgtatcatctaatacaatgatggttgagtgaaaatacagaaggggtgtttgagtattcagatttcataaaacacttccttggaatatagctgcattaacttggaaagaagcctgttgggccagaagacagaaactccaactggcaaaaaagcaagcatctaagaaaaaaaaccaccaaagttcttgaatttactatatttaaatgcattggttaagtttattttgctaaataaagtgaactgctttttgtctctaaaatgatattctaaataaaaccttaactttttgttgaa

SEQ ID NO: 141403 - DNA, 1543 bp, Homo sapiens
  Payload ID: 7796
  Gene Symbol: HOPX
  Gene Name: HOP homeobox
  Uniprot ID: Q9BPY8
  ENST ID: ENST00000420433
  CDS Start-End: 536-811
gcaccagatctacgctttgaaatgaggcaacatctaactggaaactcgctcaaagtaaggaagtggatgagaagactcagggtcccttttctcttccccgtcttctctcagccacatctctcttatcctatcttggtgaagaagcttgcttggctaggagagaggtcagggacgagaagatagtgacgagaaagttccatgagactctcagaagtcccagcctgaacatcaaacctgaataaccaggagagacgtaacctcggcatactttcagtggtttacctcctgcccacgctgcaggtttttcaggtccttgctcgagtgtgtgctcataggcgtaaataaacgtgctatcagcagcctgcgtcagccagcccagctatttaagcaggctggcatcagcaaacacagcttccaaacccagggcttgcgcttgcctttgcctcttccacactaatgacagactgccccactgagaagggtctagcggagcacaggtcaccagctgggcaacattcagaaagttagtcttcctatgctcattttcctgggctgttacagaagaagactggaagagcgcgcagggaccatgtcggcggagaccgcgagcggccccacagaggaccaggtggaaatcctggagtacaacttcaacaaggtcgacaagcacccggattccaccacgctgtgcctcatcgcggccgaggcaggcctttccgaggaggagacccagaaatggtttaagcagcgcctggcaaagtggcggcgctcagaaggcctgccctcagagtgcagatccgtcacagactaaggagatggcaggcattgacagcttcactccatgaaggccatctctgtttctctcctccgcttaaccaagctgttgtggtttttcagcatagtgttgtatgttccattgctagctgtcctgctgtttaacacagtgttgtattttttttctaaatgtacataattagaaaagaaaataacaataggaagctatgtgtatcttctgtgtaaagcagtggcttcactggaaaaatggtgtggctagcatttccctttgagtcatgatgacagatggtgtgaaaaccatctaagtttgcttttgaccatcacctcccagtagcaatttgctttcataatccatttagcaatccaggcctctgttgaaaagataatatgagggagaagggaacacatttccttctgaacttacttccctaagtcactttccttatgtatcatctaatacaatgatggttgagtgaaaatacagaaggggtgtttgagtattcagatttcataaaacacttccttggaatatagctgcattaacttggaaagaagcctgttgggccagaagacagaaactccaactggcaaaaaagcaagcatctaagaaaaaaaaccaccaaagttcttgaatttactatatttaaatgcattggttaagtttattttgctaaataaagtgaactgctttttgtctctaaaatgatattctaaataaaaccttaactttttgttgaagatgcactga

SEQ ID NO: 141404 - DNA, 904 bp, Homo sapiens
  Payload ID: 7796
  Gene Symbol: HOPX
  Gene Name: HOP homeobox
  Uniprot ID: Q9BPY8
  ENST ID: ENST00000508121
  CDS Start-End: 238-459
agaatcgtttttgagggagacctaaaactgtatcatcctagcccgaatctctcccttttaactgttctttatgtgtacattctgtgcccaaaagaaaacaacctttcattaattgggcaattgtccaggctcttagcttggcatccagctctcagagctgtgaaatcaaccgcaccagatctacgctttgaaatgaggcaacatctaactggaaactcgctcaaacgcgcagggaccatgtcggcggagaccgcgagcggccccacagaggaccaggtggaaatcctggagtacaacttcaacaaggtcgacaagcacccggattccaccacgctgtgcctcatcgcggccgaggcaggcctttccgaggaggagacccagaaatggtttaagcagcgcctggcaaagtggcggcgctcagaaggcctgccctcagagtgcagatccgtcacagactaaggagatggcaggcattgacagcttcactccatgaaggccatctctgtttctctcctccgcttaaccaagctgttgtggtttttcagcatagtgttgtatgttccattgctagctgtcctgctgtttaacacagtgttgtattttttttctaaatgtacataattagaaaagaaaataacaataggaagctatgtgtatcttctgtgtaaagcagtggcttcactggaaaaatggtgtggctagcatttccctttgagtcatgatgacagatggtgtgaaaaccatctaagtttgcttttgaccatcacctcccagtagcaatttgctttcataatccatttagcaatccaggcctctgttgaaaagataatatgagggagaagggaacacatttccttctgaacttacttccctaagtcactttccttatgtatcatctaataca

SEQ ID NO: 141405 - DNA, 1248 bp, Homo sapiens
  Payload ID: 7796
  Gene Symbol: HOPX
  Gene Name: HOP homeobox
  Uniprot ID: Q9BPY8
  ENST ID: ENST00000503639
  CDS Start-End: 305-526
cgcaggcagggatacagttcctgcaaggggtcccggggggcgcgggaggcgcaggacgctaggctctgccgtcagcccgcaacagcgctcagtccagggagggaggcccgggtggggggcagccgtaagcccccgctcagcgtgcagccaccggggacttgcgcggccgtggcaccgctggagggggcggcctggggctggggctgcccggcggcgccgcgaccgccttccttcgctgcgtcccgcccgctccacgcctcgctcaccgccgccgcttctccctgccccgcagcgcgcagggaccatgtcggcggagaccgcgagcggccccacagaggaccaggtggaaatcctggagtacaacttcaacaaggtcgacaagcacccggattccaccacgctgtgcctcatcgcggccgaggcaggcctttccgaggaggagacccagaaatggtttaagcagcgcctggcaaagtggcggcgctcagaaggcctgccctcagagtgcagatccgtcacagactaaggagatggcaggcattgacagcttcactccatgaaggccatctctgtttctctcctccgcttaaccaagctgttgtggtttttcagcatagtgttgtatgttccattgctagctgtcctgctgtttaacacagtgttgtattttttttctaaatgtacataattagaaaagaaaataacaataggaagctatgtgtatcttctgtgtaaagcagtggcttcactggaaaaatggtgtggctagcatttccctttgagtcatgatgacagatggtgtgaaaaccatctaagtttgcttttgaccatcacctcccagtagcaatttgctttcataatccatttagcaatccaggcctctgttgaaaagataatatgagggagaagggaacacatttccttctgaacttacttccctaagtcactttccttatgtatcatctaatacaatgatggttgagtgaaaatacagaaggggtgtttgagtattcagatttcataaaacacttccttggaatatagctgcattaacttggaaagaagcctgttgggccagaagacagaaactccaactggcaaaaaagcaagcatctaagaaaaaaaaccaccaaagttcttgaatttactatatttaaatgcattggttaagtttattttgctaaataaagtgaactgctttttgtctctaaaatgatattctaaataaaaccttaactttttgttgaa

SEQ ID NO: 141406 - DNA, 1672 bp, Homo sapiens
  Payload ID: 7796
  Gene Symbol: HOPX
  Gene Name: HOP homeobox
  Uniprot ID: Q9BPY8
  ENST ID: ENST00000554144
  CDS Start-End: 536-874
gcaccagatctacgctttgaaatgaggcaacatctaactggaaactcgctcaaagtaaggaagtggatgagaagactcagggtcccttttctcttccccgtcttctctcagccacatctctcttatcctatcttggtgaagaagcttgcttggctaggagagaggtcagggacgagaagatagtgacgagaaagttccatgagactctcagaagtcccagcctgaacatcaaacctgaataaccaggagagacgtaacctcggcatactttcagtggtttacctcctgcccacgctgcaggtttttcaggtccttgctcgagtgtgtgctcataggcgtaaataaacgtgctatcagcagcctgcgtcagccagcccagctatttaagcaggctggcatcagcaaacacagcttccaaacccagggcttgcgcttgcctttgcctcttccacactaatgacagactgccccactgagaagggtctagcggagcacaggtcaccagctgggcaacattcagaaagttagtcttcctatgctcattttcctgggctgttacagaagaagactggaagagcgcgcagggaccatgtcggcggagaccgcgagcggccccacagaggaccaggtggaaatcctggagtacaacttcaacaaggtcgacaagcacccggattccaccacgctgtgcctcatcgcggccgaggcaggcctttccgaggaggagacccagggtagtgatttgatctccaggagcaaaatatggcacccagaaagtagcccccaaagagaaggctacccccatgatagtctgccgtgcttggctttcgattacttttctctactgccgccccagtgtaaagaaatggtttaagcagcgcctggcaaagtggcggcgctcagaaggcctgccctcagagtgcagatccgtcacagactaaggagatggcaggcattgacagcttcactccatgaaggccatctctgtttctctcctccgcttaaccaagctgttgtggtttttcagcatagtgttgtatgttccattgctagctgtcctgctgtttaacacagtgttgtattttttttctaaatgtacataattagaaaagaaaataacaataggaagctatgtgtatcttctgtgtaaagcagtggcttcactggaaaaatggtgtggctagcatttccctttgagtcatgatgacagatggtgtgaaaaccatctaagtttgcttttgaccatcacctcccagtagcaatttgctttcataatccatttagcaatccaggcctctgttgaaaagataatatgagggagaagggaacacatttccttctgaacttacttccctaagtcactttccttatgtatcatctaatacaatgatggttgagtgaaaatacagaaggggtgtttgagtattcagatttcataaaacacttccttggaatatagctgcattaacttggaaagaagcctgttgggccagaagacagaaactccaactggcaaaaaagcaagcatctaagaaaaaaaaccaccaaagttcttgaatttactatatttaaatgcattggttaagtttattttgctaaataaagtgaactgctttttgtctctaaaatgatattctaaataaaaccttaactttttgttgaagatgcactg

SEQ ID NO: 141407 - DNA, 1064 bp, Homo sapiens
  Payload ID: 7796
  Gene Symbol: HOPX
  Gene Name: HOP homeobox
  Uniprot ID: Q9BPY8
  ENST ID: ENST00000556376
  CDS Start-End: 121-342
ttccaaacccagggcttgcgcttgcctttgcctcttccacagtttctccaaaataaaaaaaaaaagaaaagaaaaacaaatgacaagtttgcaagactgataaaacagcgcgcagggaccatgtcggcggagaccgcgagcggccccacagaggaccaggtggaaatcctggagtacaacttcaacaaggtcgacaagcacccggattccaccacgctgtgcctcatcgcggccgaggcaggcctttccgaggaggagacccagaaatggtttaagcagcgcctggcaaagtggcggcgctcagaaggcctgccctcagagtgcagatccgtcacagactaaggagatggcaggcattgacagcttcactccatgaaggccatctctgtttctctcctccgcttaaccaagctgttgtggtttttcagcatagtgttgtatgttccattgctagctgtcctgctgtttaacacagtgttgtattttttttctaaatgtacataattagaaaagaaaataacaataggaagctatgtgtatcttctgtgtaaagcagtggcttcactggaaaaatggtgtggctagcatttccctttgagtcatgatgacagatggtgtgaaaaccatctaagtttgcttttgaccatcacctcccagtagcaatttgctttcataatccatttagcaatccaggcctctgttgaaaagataatatgagggagaagggaacacatttccttctgaacttacttccctaagtcactttccttatgtatcatctaatacaatgatggttgagtgaaaatacagaaggggtgtttgagtattcagatttcataaaacacttccttggaatatagctgcattaacttggaaagaagcctgttgggccagaagacagaaactccaactggcaaaaaagcaagcatctaagaaaaaaaaccaccaaagttcttgaatttactatatttaaatgcattggttaagtttattttgctaaataaagtgaactgctttttgtctctaaaatgatattctaaataaaaccttaactttttgttgaa

SEQ ID NO: 141408 - DNA, 1138 bp, Homo sapiens
  Payload ID: 7796
  Gene Symbol: HOPX
  Gene Name: HOP homeobox
  Uniprot ID: Q9BPY8
  ENST ID: ENST00000556614
  CDS Start-End: 195-416
gcggagacagaaggccgcctaccggggaggccggaggccggctagtcgcggactcgggcgaacccaccctcgcgatctgtcaagtctgtccccaggggaggtccccctttcgggaggaagtttttaaggggatttctcaaaatcacccccgcgcttccttcactccttccttagagccggagcgcgcagggaccatgtcggcggagaccgcgagcggccccacagaggaccaggtggaaatcctggagtacaacttcaacaaggtcgacaagcacccggattccaccacgctgtgcctcatcgcggccgaggcaggcctttccgaggaggagacccagaaatggtttaagcagcgcctggcaaagtggcggcgctcagaaggcctgccctcagagtgcagatccgtcacagactaaggagatggcaggcattgacagcttcactccatgaaggccatctctgtttctctcctccgcttaaccaagctgttgtggtttttcagcatagtgttgtatgttccattgctagctgtcctgctgtttaacacagtgttgtattttttttctaaatgtacataattagaaaagaaaataacaataggaagctatgtgtatcttctgtgtaaagcagtggcttcactggaaaaatggtgtggctagcatttccctttgagtcatgatgacagatggtgtgaaaaccatctaagtttgcttttgaccatcacctcccagtagcaatttgctttcataatccatttagcaatccaggcctctgttgaaaagataatatgagggagaagggaacacatttccttctgaacttacttccctaagtcactttccttatgtatcatctaatacaatgatggttgagtgaaaatacagaaggggtgtttgagtattcagatttcataaaacacttccttggaatatagctgcattaacttggaaagaagcctgttgggccagaagacagaaactccaactggcaaaaaagcaagcatctaagaaaaaaaaccaccaaagttcttgaatttactatatttaaatgcattggttaagtttattttgctaaataaagtgaactgctttttgtctctaaaatgatattctaaataaaaccttaactttttgttgaa

SEQ ID NO: 141409 - DNA, 1139 bp, Homo sapiens
  Payload ID: 7796
  Gene Symbol: HOPX
  Gene Name: HOP homeobox
  Uniprot ID: Q9BPY8
  ENST ID: ENST00000555760
  CDS Start-End: 196-417
gagacagaaggccgcctaccggggaggccggaggccggctagtcgcggactcgggcgaacccaccctcgcgatctgtcaagtctgtccccaggggaggtccccctttcgggaggaagtttttaaggggatttctcaaaatcacccccgcgcttccttcactccttccttagagccggaggtcgcgcgcagggaccatgtcggcggagaccgcgagcggccccacagaggaccaggtggaaatcctggagtacaacttcaacaaggtcgacaagcacccggattccaccacgctgtgcctcatcgcggccgaggcaggcctttccgaggaggagacccagaaatggtttaagcagcgcctggcaaagtggcggcgctcagaaggcctgccctcagagtgcagatccgtcacagactaaggagatggcaggcattgacagcttcactccatgaaggccatctctgtttctctcctccgcttaaccaagctgttgtggtttttcagcatagtgttgtatgttccattgctagctgtcctgctgtttaacacagtgttgtattttttttctaaatgtacataattagaaaagaaaataacaataggaagctatgtgtatcttctgtgtaaagcagtggcttcactggaaaaatggtgtggctagcatttccctttgagtcatgatgacagatggtgtgaaaaccatctaagtttgcttttgaccatcacctcccagtagcaatttgctttcataatccatttagcaatccaggcctctgttgaaaagataatatgagggagaagggaacacatttccttctgaacttacttccctaagtcactttccttatgtatcatctaatacaatgatggttgagtgaaaatacagaaggggtgtttgagtattcagatttcataaaacacttccttggaatatagctgcattaacttggaaagaagcctgttgggccagaagacagaaactccaactggcaaaaaagcaagcatctaagaaaaaaaaccaccaaagttcttgaatttactatatttaaatgcattggttaagtttattttgctaaataaagtgaactgctttttgtctctaaaatgatattctaaataaaaccttaactttttgttgaa

SEQ ID NO: 141410 - DNA, 1001 bp, Homo sapiens
  Payload ID: 7796
  Gene Symbol: HOPX
  Gene Name: HOP homeobox
  Uniprot ID: Q9BPY8
  ENST ID: ENST00000553379
  CDS Start-End: 58-279
cggctagtcgcggactcgggcgaacccaccctcgcgatctgtcaacgcgcagggaccatgtcggcggagaccgcgagcggccccacagaggaccaggtggaaatcctggagtacaacttcaacaaggtcgacaagcacccggattccaccacgctgtgcctcatcgcggccgaggcaggcctttccgaggaggagacccagaaatggtttaagcagcgcctggcaaagtggcggcgctcagaaggcctgccctcagagtgcagatccgtcacagactaaggagatggcaggcattgacagcttcactccatgaaggccatctctgtttctctcctccgcttaaccaagctgttgtggtttttcagcatagtgttgtatgttccattgctagctgtcctgctgtttaacacagtgttgtattttttttctaaatgtacataattagaaaagaaaataacaataggaagctatgtgtatcttctgtgtaaagcagtggcttcactggaaaaatggtgtggctagcatttccctttgagtcatgatgacagatggtgtgaaaaccatctaagtttgcttttgaccatcacctcccagtagcaatttgctttcataatccatttagcaatccaggcctctgttgaaaagataatatgagggagaagggaacacatttccttctgaacttacttccctaagtcactttccttatgtatcatctaatacaatgatggttgagtgaaaatacagaaggggtgtttgagtattcagatttcataaaacacttccttggaatatagctgcattaacttggaaagaagcctgttgggccagaagacagaaactccaactggcaaaaaagcaagcatctaagaaaaaaaaccaccaaagttcttgaatttactatatttaaatgcattggttaagtttattttgctaaataaagtgaactgctttttgtctctaaaatgatattctaaataaaaccttaactttttgttgaa

SEQ ID NO: 141411 - DNA, 1771 bp, Homo sapiens
  Payload ID: 7797
  Gene Symbol: HORMAD1
  Gene Name: HORMA domain containing 1
  Uniprot ID: Q86X24
  ENST ID: ENST00000322343
  CDS Start-End: 116-1279
ggaaagcgcatgcgcgtcgggcacagcgcgtgcagcctcgtgcagctcttctggtctccggcgcccgcccctcagacgtaatgttgaattaaagaaaatactttatcagaagaagatggccactgcccagttgcagaggactcccatgagtgcactggtatttcccaataagatatcaactgaacaccagtctttggtgttagtgaagaggcttctagcagtttcagtatcctgtatcacgtatttgaggggaatattcccagaatgcgcttatggaacaagatatctagatgatctttgtgtcaaaatactgagagaagataaaaattgcccaggatctacacagttagtgaaatggatgctaggatgttatgatgctttacagaaaaaatatgtatacacaaacccagaagatcctcagacaatttcagaatgttaccaattcaaattcaaatacaccaataatggaccactcatggacttcataagtaaaaaccaaagcaacgaatctagcatgttgtctactgacaccaagaaagcaagcattctcctcattcgcaagatttatatcctaatgcaaaatctggggcctttacctaatgatgtttgtttgaccatgaaacttttttactatgatgaagttacacccccagattaccagcctcccggttttaaggatggtgattgtgaaggagttatatttgaaggggaacctatgtatttaaatgtgggagaagtctcaacaccttttcacatcttcaaagtaaaagtgaccactgagagagaacgaatggaaaatattgactcaactatactatcaccaaaacaaataaaaacaccatttcaaaaaatcctgagggacaaagatgtagaagatgaacaggagcattatacaagtgatgatttggacattgaaactaaaatggaagaacaggaaaaaaaccctgcatcttctgaacttgaagaaccaagtttagtttgtgaggaagatgaaattatgaggtctaaagaaagtccagatctttctatttctcattctcaggttgagcagttagtcaataaaacatctgaacttgatatgtctgaaagcaaaacaagaagtggaaaagtctttcagaataaaatggcaaatggaaatcaaccagtaaaatcttccaaagaaaatcggaagagaagtcaacatgaatctgggagaatagtcctccatcactttgattcttctagtcaagagtcagtgccaaaaaggagaaagtttagtgaaccaaaggaacatatataaaaattatttttgttctgcaggcttgcagagttcttctcaccatttaaactgaaggaccctatattatatttccctaactctgaagatgtatatgtagtttaaagcagtttgtacactaaaactaagtttttggctgactgtcatattgtggtccttaatcttgagataaatccaatagaacttttgaataaaagcaaaagtacaaatgtcataattgattcggtaataagtaaaatttcaaaattgattttgttcattacctacttaatatttcctttaaatatatactaactgttaaggccctctaatgccatttttctaaacagtaatgtttactttggtattaaaatttggtatggattcactttttacttatgttaaaattataccatttaactggctcttttgtcattgtgctgttattaaaacaatgttcttcaatattttgacataatgtattaacattttaatatataatgtacaatttaagaa

SEQ ID NO: 141412 - DNA, 1692 bp, Homo sapiens
  Payload ID: 7797
  Gene Symbol: HORMAD1
  Gene Name: HORMA domain containing 1
  Uniprot ID: Q86X24
  ENST ID: ENST00000361824
  CDS Start-End: 107-1291
atgcgcgtcgggcacagcgcgtgcagcctcgtgcagctcttctggtctccggcgcccgcccctcagacgtaatgttgaattaaagaaaatactttatcagaagaagatggccactgcccagttgcagaggactcccatgagtgcactggtatttcccaataagatatcaactgaacaccagtctttggtgttagtgaagaggcttctagcagtttcagtatcctgtatcacgtatttgaggggaatattcccagaatgcgcttatggaacaagatatctagatgatctttgtgtcaaaatactgagagaagataaaaattgcccaggatctacacagttagtgaaatggatgctaggatgttatgatgctttacagaaaaaatatctaaggatggttgttctagctgtatacacaaacccagaagatcctcagacaatttcagaatgttaccaattcaaattcaaatacaccaataatggaccactcatggacttcataagtaaaaaccaaagcaacgaatctagcatgttgtctactgacaccaagaaagcaagcattctcctcattcgcaagatttatatcctaatgcaaaatctggggcctttacctaatgatgtttgtttgaccatgaaacttttttactatgatgaagttacacccccagattaccagcctcccggttttaaggatggtgattgtgaaggagttatatttgaaggggaacctatgtatttaaatgtgggagaagtctcaacaccttttcacatcttcaaagtaaaagtgaccactgagagagaacgaatggaaaatattgactcaactatactatcaccaaaacaaataaaaacaccatttcaaaaaatcctgagggacaaagatgtagaagatgaacaggagcattatacaagtgatgatttggacattgaaactaaaatggaagaacaggaaaaaaaccctgcatcttctgaacttgaagaaccaagtttagtttgtgaggaagatgaaattatgaggtctaaagaaagtccagatctttctatttctcattctcaggttgagcagttagtcaataaaacatctgaacttgatatgtctgaaagcaaaacaagaagtggaaaagtctttcagaataaaatggcaaatggaaatcaaccagtaaaatcttccaaagaaaatcggaagagaagtcaacatgaatctgggagaatagtcctccatcactttgattcttctagtcaagagtcagtgccaaaaaggagaaagtttagtgaaccaaaggaacatatataaaaattatttttgttctgcaggcttgcagagttcttctcaccatttaaactgaaggaccctatattatatttccctaactctgaagatgtatatgtagtttaaagcagtttgtacactaaaactaagtttttggctgactgtcatattgtggtccttaatcttgagataaatccaatagaacttttgaataaaagcaaaagtacaaatgtcataattgattcggtaataagtaaaatttcaaaattgattttgttcattacctacttaatatttcctttaaatatatactaactgttaaggccctctaatgccatttttctaaacagtaatgtttactttggtattaaaatttggtatggattcactttttacttatgttaaaattataccatttaactggc

SEQ ID NO: 141413 - DNA, 791 bp, Homo sapiens
  Payload ID: 7797
  Gene Symbol: HORMAD1
  Gene Name: HORMA domain containing 1
  ENST ID: ENST00000368987
  CDS Start-End: 220-791
ctcttctggtctccggcgcccgcccctcagacgtaatgttgaattaaagaaaatactttatcagaagaagatggccactgcccagttgcagaggactcccatgagtgcactggtatttcccaataagatatcaactgaacaccagtctttggtgttagtgaagaggcttctagcagtttcagtatcctgtatcacgtatttgaggggaatattcccagaatgcgcttatggaacaagatatctagatggatgctaggatgttatgatgctttacagaaaaaatatctaaggatggttgttctagctgtatacacaaacccagaagatcctcagacaatttcagaatgttaccaattcaaattcaaatacaccaataatggaccactcatggacttcataagtaaaaaccaaagcaacgaatctagcatgttgtctactgacaccaagaaagcaagcattctcctcattcgcaagatttatatcctaatgcaaaatctggggcctttacctaatgatgtttgtttgaccatgaaacttttttactatgatgaagttacacccccagattaccagcctcccggttttaaggatggtgattgtgaaggagttatatttgaaggggaacctatgtatttaaatgtgggagaagtctcaacaccttttcacatcttcaaagtaaaagtgaccactgagagagaacgaatggaaaatattgactcaactatactatcaccaaaacaaataaaaacaccatttcaaaaaatcctgagggacaaagatgtagaagatga

SEQ ID NO: 141414 - DNA, 1794 bp, Homo sapiens
  Payload ID: 7797
  Gene Symbol: HORMAD1
  Gene Name: HORMA domain containing 1
  Uniprot ID: Q86X24
  ENST ID: ENST00000368995
  CDS Start-End: 256-1200
atgcgcgtcgggcacagcgcgtgcagcctcgtgcagctcttctggtctccggcgcccgcccctcagacgtaatgttgaattaaagaaaatactttatcagaagaagatggccactgcccagttgcagaggactcccatgagtgcactggtatttcccaataagatatcaactgaacaccagtctttggtgttagtgaagaggcttctagcagtttcagtatcctgtatcacgtatttgaggggaatattcccagaatgcgcttatggaacaagatatctagatggatgctaggatgttatgatgctttacagaaaaaatatctaaggatggttgttctagctacaatttcagaatgttaccaattcaaattcaaatacaccaataatggaccactcatggacttcataagtaaaaaccaaagcaacgaatctagcatgttgtctactgacaccaagaaagcaagcattctcctcattcgcaagatttatatcctaatgcaaaatctggggcctttacctaatgatgtttgtttgaccatgaaacttttttactatgatgaagttacacccccagattaccagcctcccggttttaaggatggtgattgtgaaggagttatatttgaaggggaacctatgtatttaaatgtgggagaagtctcaacaccttttcacatcttcaaagtaaaagtgaccactgagagagaacgaatggaaaatattgactcaactatactatcaccaaaacaaataaaaacaccatttcaaaaaatcctgagggacaaagatgtagaagatgaacaggagcattatacaagtgatgatttggacattgaaactaaaatggaagaacaggaaaaaaaccctgcatcttctgaacttgaagaaccaagtttagtttgtgaggaagatgaaattatgaggtctaaagaaagtccagatctttctatttctcattctcaggttgagcagttagtcaataaaacatctgaacttgatatgtctgaaagcaaaacaagaagtggaaaagtctttcagaataaaatggcaaatggaaatcaaccagtaaaatcttccaaagaaaatcggaagagaagtcaacatgaatctgggagaatagtcctccatcactttgattcttctagtcaagagtcagtgccaaaaaggagaaagtttagtgaaccaaaggaacatatataaaaattatttttgttctgcaggcttgcagagttcttctcaccatttaaactgaaggaccctatattatatttccctaactctgaagatgtatatgtagtttaaagcagtttgtacactaaaactaagtttttggctgactgtcatattgtggtccttaatcttgagataaatccaatagaacttttgaataaaagcaaaagtacaaatgtcataattgattcggtaataagtaaaatttcaaaattgattttgttcattacctacttaatatttcctttaaatatatactaactgttaaggccctctaatgccatttttctaaacagtaatgtttactttggtattaaaatttggtatggattcactttttacttatgttaaaattataccatttaactggctcttttgtcattgtgctgttattaaaacaatgttcttcaatattttgacataatgtattaacattttaatatataatgtacaatttaagaattggtgctttacctttactatgcttttttttacaggacaaaaagactgatttttaaagtatggcattttttgcagcataaataaaatattgttcagtacgta

SEQ ID NO: 141415 - DNA, 740 bp, Homo sapiens
  Payload ID: 7797
  Gene Symbol: HORMAD1
  Gene Name: HORMA domain containing 1
  ENST ID: ENST00000442853
  CDS Start-End: 248-740
cgggcacagcgcgtgcagcctcgtgcagctcttctggtctccggcgcccgcccctcagacgtaatgttgaattaaagaaaatactttatcagaagaagatggccactgcccagttgcagaggactcccatgagtgcactggtatttcccaataagatatcaactgaacaccagtctttggtgttagtgaagaggcttctagcagtttcagtatcctgtatcacgtatttgaggggaatattcccagaatgcgcttatggaacaagatatctagatggatgctaggatgttatgatgctttacagaaaaaatatgtatacacaaacccagaagatcctcagacaatttcagaatgttaccaattcaaattcaaatacaccaataatggaccactcatggacttcataagtaaaaaccaaagcaacgaatctagcatgttgtctactgacaccaagaaagcaagcattctcctcattcgcaagatttatatcctaatgcaaaatctggggcctttacctaatgatgtttgtttgaccatgaaacttttttactatgatgaagttacacccccagattaccagcctcccggttttaaggatggtgattgtgaaggagttatatttgaaggggaacctatgtatttaaatgtgggagaagtctcaacaccttttcacatcttcaaagtaaaagtgaccactgagagagaacgaatggaaaatattgactcaactatactatcac

SEQ ID NO: 141416 - DNA, 2187 bp, Homo sapiens
  Payload ID: 7798
  Gene Symbol: HORMAD2
  Gene Name: HORMA domain containing 2
  Uniprot ID: Q8N7B1
  ENST ID: ENST00000336726
  CDS Start-End: 356-1279
gttgtataggtggcccaggctggcggcccctgaccgaaggtcgcgtcgggtcagtgtgcagcccgtggctgagaggcggctgctgaggggccgggcgggctaggggccggctagccgccgttcgcccctgctttgcatattcatgaagtctagcgaggccggtcgcccaggctagccgtggacgggtcatgaattattcatgaggaaacctctggtcccgcccagaaaggcctcgttgactattcatgagccgaggagcgggtttgggccggaaaaggccgttgacccccggtgggagggaagcgtcgacgagctgaggttggacttgttgaaataatcctgatacattcctacaatggccactgctcagctttctcactgcatcacaatacacaaggcttctaaggaaacagttttcccatcccaaatcactaatgagcatgagtcattgaaaatggtgaagaaactttttgctacttccatctcatgtataacatacctaaggggcctgtttccagagagctcttatggagaacgccatttggatgacctcagtttaaaaatcctccgagaagataaaaaatgtcccgggtcactgcatattatcagatggattcaaggttgttttgatgctttggaaaagagatacctacgtatggcagtactgacactttacacagatcccatgggatctgagaaggtgactgagatgtaccagttcaaattcaaatacacgaaagaaggagccactatggattttgacagtcatagcagcagtacaagctttgaaagtggaacaaacaatgaagatattaagaaagccagtgttctactgatccgtaaattgtatatactgatgcaggaccttgagccacttcctaataatgttgtacttactatgaaactccactactataatgcagtgaccccacatgattaccaacccctcggttttaaagaaggggtaaattcacacttcctgctgtttgacaaggagcctatcaacgtgcaagtgggatttgtctccactggctttcatagcatgaaagtaaaagtcatgacagaggctacaaaagtgattgatttggagaacaatctgtttcgggagaacagcactactgagatcgcccatcagggtctagactgtgatgaggaagaagaatgcaatgaccatattcaaagaatgaattttgtgtgcagtcagcaaagttctgagtgctccaggaagaagaggaaggtcagtgaaccagtgaaggtcttcatccctaacagaaaatgaaagctaaatattccttctacatttattttaaaataagtttattttgtaaaaacatgcataaactgtcttagcaggaaagtacattcctgttaccaaaacctttttctaaattttttgctcaattttttttgtcagttgctaagtgctaaattactggccaggtaggacgcgagtccactttgccataaggaaagcgggtcaatagggctgcctctggatagcattacttcaaagctgggttagagatgaggcaccttttatattatatttgtaaaagaaccacagcagctattttggaaagaagctgttgttctcaaaggaaagaaggatttttttgcataattaaactcttcagctatttagactactgtgaaatgttttgacttgttgtaacctgtatactggaatccctctctagctgtattaaaaattcccacagagttgcataggatgtgtggaggtgcttatccaggtgtgatttatgtgttaacctcagtcacgaggttgatcagctaattgtgggaccaaaatgtgccctgcctcaactctggccccaggccctgttctgttatccaatccgaaacacggaacatgctgcaattcaggagtctggctctcttcttaagacctatattaaatatttcccaagaagcacttcagtttatcagtctgtaacctgcaaatgatgctattagttccctccttattctggaagaatttggatagacttaattgatgattagtatgagatgaacaatagatgacttaaagtgttatttctattatttatataacatgagatttagtaacttataaaatgaggtttagtaatttaatttaaatggataggaccaataagttaaatattaagtgtgtgacttatggttaaataaaatgaaaatacaaga

SEQ ID NO: 141417 - DNA, 2115 bp, Homo sapiens
  Payload ID: 7798
  Gene Symbol: HORMAD2
  Gene Name: HORMA domain containing 2
  Uniprot ID: Q8N7B1
  ENST ID: ENST00000403975
  CDS Start-End: 286-1209
actttagtgaggatttgccaattaatccctatggactttagttccctaaacagagggagagagtcttgaacctcaggattagccaatcgccaaaatgtgtccgagtacgcagggcactggacaggctgtgcagtacatcgtgtactcagctggtagaaatgaggggtggttctggcccctaaaggggtttttaatctcagcaggatcataatctaatttctcctccattggaccatcaatctgttgaggttggacttgttgaaataatcctgatacattcctacaatggccactgctcagctttctcactgcatcacaatacacaaggcttctaaggaaacagttttcccatcccaaatcactaatgagcatgagtcattgaaaatggtgaagaaactttttgctacttccatctcatgtataacatacctaaggggcctgtttccagagagctcttatggagaacgccatttggatgacctcagtttaaaaatcctccgagaagataaaaaatgtcccgggtcactgcatattatcagatggattcaaggttgttttgatgctttggaaaagagatacctacgtatggcagtactgacactttacacagatcccatgggatctgagaaggtgactgagatgtaccagttcaaattcaaatacacgaaagaaggagccactatggattttgacagtcatagcagcagtacaagctttgaaagtggaacaaacaatgaagatattaagaaagccagtgttctactgatccgtaaattgtatatactgatgcaggaccttgagccacttcctaataatgttgtacttactatgaaactccactactataatgcagtgaccccacatgattaccaacccctcggttttaaagaaggggtaaattcacacttcctgctgtttgacaaggagcctatcaacgtgcaagtgggatttgtctccactggctttcatagcatgaaagtaaaagtcatgacagaggctacaaaagtgattgatttggagaacaatctgtttcgggagaacagcactactgagatcgcccatcagggtctagactgtgatgaggaagaagaatgcaatgaccatattcaaagaatgaattttgtgtgcagtcagcaaagttctgagtgctccaggaagaagaggaaggtcagtgaaccagtgaaggtcttcatccctaacagaaaatgaaagctaaatattccttctacatttattttaaaataagtttattttgtaaaaacatgcataaactgtcttagcaggaaagtacattcctgttaccaaaacctttttctaaattttttgctcaattttttttgtcagttgctaagtgctaaattactggccaggtaggacgcgagtccactttgccataaggaaagcgggtcaatagggctgcctctggatagcattacttcaaagctgggttagagatgaggcaccttttatattatatttgtaaaagaaccacagcagctattttggaaagaagctgttgttctcaaaggaaagaaggatttttttgcataattaaactcttcagctatttagactactgtgaaatgttttgacttgttgtaacctgtatactggaatccctctctagctgtattaaaaattcccacagagttgcataggatgtgtggaggtgcttatccaggtgtgatttatgtgttaacctcagtcacgaggttgatcagctaattgtgggaccaaaatgtgccctgcctcaactctggccccaggccctgttctgttatccaatccgaaacacggaacatgctgcaattcaggagtctggctctcttcttaagacctatattaaatatttcccaagaagcacttcagtttatcagtctgtaacctgcaaatgatgctattagttccctccttattctggaagaatttggatagacttaattgatgattagtatgagatgaacaatagatgacttaaagtgttatttctattatttatataacatgagatttagtaacttataaaatgaggtttagtaatttaatttaaatggataggaccaataagttaaatattaagtgtgtgacttatggttaaataaaatgaaaatacaa

SEQ ID NO: 141418 - DNA, 658 bp, Homo sapiens
  Payload ID: 7798
  Gene Symbol: HORMAD2
  Gene Name: HORMA domain containing 2
  ENST ID: ENST00000450612
  CDS Start-End: 58-333
ggaagcgtcgacgagctgaggttggacttgttgaaataatcctgatacattcctacaatggccactgctcagctttctcactgcatcacaatacacaaggcttctaaggaaacagttttcccatcccaaatcactaatgagcatgagtcattgaaaatggtgaagaaactttttgctacttccatctcatgtataacatacctaaggggcctgtttccagagagctcttatggagaacgccatttggatgacctcagtttaaaaatcctccgagaagataaaaaatgtcccgggtcactgcatattatcagatgctacgtatggcagtactgacactttacacagatcccatgggatctgagaaggtgactgagatgtaccagttcaaattcaaatacacgaaagaaggagccactatggattttgacagtcatagcagcagtacaagctttgaaagtggaacaaacaatgaagatattaagaaagccagtgttctactgatccgtaaattgtatatactgatgcaggaccttgagccacttcctaataatgttgtacttactatgaaactccactactataatgcagtgaccccacatgattaccaacccctcggttttaaagaaggggtaaattcacacttcctgctgtttgacaa

SEQ ID NO: 141419 - DNA, 7385 bp, Homo sapiens
  Payload ID: 7799
  Gene Symbol: HUNK
  Gene Name: hormonally up-regulated Neu-associated kinase
  Uniprot ID: P57058
  ENST ID: ENST00000270112
  CDS Start-End: 361-2505
ggcgccgccggaccgcgccccaccccgcgcgcccgagcagggcgactgtcattagcttcctggacgggacccggggcgggatcctggtgtcctgaaaggggcccgggcgaccctaagaggaagaacttttgggggcggggtccccggtcccgcgtcccctgggcagccgctattgtctacgcgcctcgctgggcggcgcggggggcgtgatcgcggcggccccgggctctgggtgcggagacccaggcggggctgggcccagggcggcggcgggagaagccggggaagccgaagagcctggggaggaggagctgcgagcgcgggagacgagcaggagccgcgcgggccgcggcgagcgcgatgccggcggcggcgggggacgggctcctgggggagccggcggcgcctgggggcggcggcggcgcggaggacgcggccaggcccgcggcggcctgcgagggaagtttcctgcctgcctgggtgagcggcgtgccccgcgagcggctccgcgacttccagcaccacaagcgcgtgggcaactacctcatcggcagcaggaagctgggcgagggctcctttgccaaggtgcgcgaggggctgcacgtgctgaccggggagaaggtggccataaaagtcattgataagaagagagccaaaaaggacacctatgtcaccaaaaacctgcggcgagagggtcagatccagcagatgatccgccaccccaatatcactcagctccttgatattttagaaacggaaaacagctactacctggtcatggagctgtgccctgggggcaacctgatgcacaagatctatgagaagaagcggctggaggagtccgaagcccgcagatacatccgacagctcatctctgccgtagagcacctgcaccgggccggggtggtccacagagacttgaagatagagaatttgctactagatgaagacaataatatcaagctgattgactttggtttgagcaactgcgcagggatcctgggttactcggatccgttcagcacacagtgtggcagccctgcctacgctgcacctgaactgctcgccaggaagaaatacggccccaaaatcgatgtctggtccataggtgtgaacatgtatgccatgttgaccgggacgctgcctttcacggtggagcctttcagcctgagggctttgtaccagaagatggtagacaaagaaatgaaccccctccccactcagctctccacaggtgccatcagtttcctgcgctctctcctggaaccggatcctgtgaagaggccaaatattcagcaggcactggcgaatcgctggcttaatgagaattacacgggcaaagtgccctgtaatgtcacctatcccaacaggatttctctggaagatctgagcccgagcgtcgtgctgcacatgaccgagaagctgggttacaagaacagcgacgtgatcaacactgtgctctccaaccgcgcctgccacatcctggccatctacttcctcttaaacaagaaactggagcgctatttgtcagggaaatctgacatccaggacagcctctgctacaagacccggctctaccagatagaaaagtacagggcccccaaggagtcctatgaggcctctctggacacctggacacgagatcttgaattccatgccgtgcaggataaaaagcccaaagaacaagaaaaaagaggggattttcttcatcgaccattctccaagaagttggacaagaacctgccctcgcacaaacagccctcaggctcgcttatgacacagattcagaacaccaaagccctcctgaaggaccggaaggcctccaagtccagcttccccgacaaagattcctttggctgccgcaatattttccgcaaaacctcagattccaattgtgtggcttcttcttccatggagttcatccccgtgccaccgcccaggaccccgaggattgtgaagaaaccggagccccatcagccagggcccggaagcactggcatcccccacaaggaagaccccctgatgctggacatggtgcgctccttcgagtctgtggatcgcgacgaccacgtagaagtgctgtctccctctcatcactacaggattctgaactccccggtcagcttggctcgcagaaattccagcgagaggacgctgtccccgggtctgccatccggaagcatgtcgcctctccatactcctttgcatccaactctggtctcttttgctcacgaagataagaacagccccccaaaagaggagggcctgtgttgcccacctccggttcccagcaatggccccatgcagcctctggggagccccaattgtgtgaaaagccgaggccggttccctatgatgggcatcggacagatgttaaggaagcgccatcagagtctgcagccatctgcagataggcccctggaggccagcctgcccccactgcagcccctagcccctgtgaaccttgcctttgacatggccgatggggtcaagacccagtgctaacttgggccagcggggtttggggtatctctagaaaacagcaactgaacagagctccacacatctgtcagggtgtgagcactccaaggcctcgcgtggagcatccttagtcccacctgtagctgaatccacagacccaaagcctgcacaacccaacctcgcttagggacccccagagatgctggaatcgctaggagggttggctccaggggcagccaattcctatcattcagatcttccttcctcccaagtactcaccaaccccttccacttcccacttcccccaggcttggggggaaaacagggcatgagccttctggggcactcagattatggactgttaccagatctttcttcacgctgtgctacatgtgtgcctctcacagcagttggccacagttacagggagagaacaatatcacagtcattcatccaggccacgtttcctctgcggagtgtagcagccctgcctttcatagcagggattacctgaaggccagcaggagccgggggcaggcccaggatcctcagaggaagatggagaggagcttcggaccaagatcaaaccaaacagtggggaccccaacagaagagaaagactgaaggagacactcatttcccaagcaagattttgatagatttttgttgttgttgttgttgaaacatgctaatgattgaattatcttttccaaagattttttttaaatgtgatgtcggtaaattgaaataacataattttttaaaacttggatggagagatgagaagcaattccaccaaactcatgttttcacaggagggttcagtgtggagagcaaaaaagctgactgtggtgatttgctgagtgctgtggcccacaggcagggcaagtctcggtggccctgtgttcatcctgttgtttaaggcatagccctgatccttctggaaggcatagaacacggttacagctggttctgtagaaagagggaaaagatgattgtgacaattcagagcataactcagatggcgagaaggcagcattatctctgtgcgatgctgatttcaagctgcccacagaactggtgcggctcagagctcggcgagtttgctgggagctgggagcaggcttgcctggcagagaacctgttcagatacaggccagtttcttcttcgaggaaagccaagctcctcaaacagggttcagtccacgttgtgttttcacacctttctccaaggatcgaaccaaagatgtgtctccagtattgtgtctgtgcccctgtgtgtgttttgtggacagccgtgttgtctgactgtatccagctggcacttgacagggtgcagtcattggtgagaagaatcagaaaaagaagacccatcagcacaggttggataggggttagtgtaggagaccagttacagaatggcctggagtcttcaacttttgaccggtgcaggtgtgaccagagaccacctctgtggccacctcagatagtcatctcagtccaaggatcccaaaacacaaatctagaattgcaaagccagcctttatttccctggcaggcagccttgccagaaggcagagaggcagttctgaatcattctctcattcaccagtggtgacatccttcagtccctcacatctctgacagagcgggacagaatggatatttggctgaccttggtgagacctggagctgcctgtttcttccctaggggatcaccacggctctagggcattctaggatgaggtcagaccccttggccattggtgttattttttgtatagcttcagactgggttccagaacttaccattgaaaacagagcttttaggccaggtgtggtggctcacacctgtaatcccagcactttgggaggccgaggcaggtggatcgcttgagctcaggagttcgagagcagcctgggcaacatggtgaaagcccgtctctaccgaaaaatacaaaaaaaaatagctgggtgtggtggtacgtgcctgtagtcccagctacttcggggactgaggtgggaggatcacttgaacctaggaggtcgaggctgcagtgagccaagatcatgctactgcactccagcttaggtggcaaagtgagaccctgtctccaaaaaaagaaaatagagctttataagcagagagaagaaaataatcatctaagaccatctctccattcgacatgaagtgtaccttttctaaagacggtttccagctgcaacggctccactttgcaggcttgcagggtgtatacctgcgcattgggaacttgctggaacccctgatgcattttccttgagagcaggggtacttccgccttgccgttagcttgtggagaacgtgcttcttattcctggcaggcttcaagaacagctgcacatgtgccgctaactgaccgcgttgccattggcgacctggactctgaactcaggtttattctaaacccagtgagaggtgagggggagtgatgaaaggggatcagctgtatttgtgtgtgtgtgtgtgtgtgagcacctgacaaatctatgaaaccgagtgaaaggagaaatgttagattctttattattttattatatttatatggaaagctcgactctccctttggtaagtccgaagcatgttgtctgttcgaccgtgactgtcttcctcagtctgtgcctgtgattccagtcaccctgtagttactgacagaaattgactggactgtcattgtgtgaagtctaggaggaaatgtccattttaattgtatgatttggtcataagtaaggactatatttatgtcaccattattagatatatgtacttttgtaatgactgtgaaatacacttttccctcactacgactgcttctttatttgctgataaatcttaaaacaactaagtacgttgcaaataatagtacaggtaccatcttttatgtgaagttctttttctttttttgagacagggtcttgctctgtcacccaggctggagtgcagtggcacaatcacagttcactgcagcctcaacctctccagattcaagtgatcctcccatctcagcctcccaagtagctgggactacagttgtgcaccacaatgcctagctaattttttttgtattttgtagaaatggggtttcgccatgttgctcaggctgatctcaaactcctgggctccaacgatctgcccaccttggcctcccaaagtgctgagattacaggcgtgagccactgtgcctggccttatgtaaagctcttgacctagcatctgactggaaacaagcgggaattgcattggggggcattttctgggccagtttccctgccttattttacctgcaataggtgtgcctacaaaagtctttctgacatacacactgcaggtggcagttcaagaagaatcaacctttttcatttggggatattaggatcttccttggagactctgaaaatggcacacaaagaatggcagttatgaacgtgacttctagattttgtccttgtaggaggccttggtcatggataggggaagagggatgatgggatggaatgggagggtgggatctagatgacctcttgaaattgtcccagttactgcttccttcataactgttcacaaaacgtttttcatatataccaccttgtttcccctgggaagtgaggggacgaagccttagagggtgacatagctagaaagtggagaagctcactgttcactgtgcaaagccccagtagtcggattccggggaaaagaacaagtatctagttttgatgacaatgttttcttgtaagaatcccaacactttagaatagaaaaggacctaagattctctggctcagccccagcctttctgaagaagggaaaactagggacccagatggtttaaggacaccccagagtccccagatgagctggcatttgagctggtctggagcagagtttctccctcaaagaacacagagaaatcagagagtggctgccatggtcagagggggatgtcaacaacagatcaagccgtcatcacaacaggtatttctgaagttcctgcagggactaggtcttgcatttttaagtccttttcaaaactgtgcagcttcctgaaccttatgctgtttgtcccatccactcttgaagctggggaaagacagctttctttgggaactctgtctttctcagttgacttcccaagtaagcagcaaacccctggatagccttgttatctactttaggtattaagaggctattgggttttactagattaaatcaataaaacatttcctatagagccatatcatacactgaagcaaattcagaaagaatgcaaaactgctatcttttgggggagtctggaagcctgttggttagtgtatttattttctttgtggggtcttctgtgagctacaggcacagtaagaataattcagagcggtactgggagttggttcaatttcatgtcatcacttttcaatgaagggagtgcatttcctgagtagtaaatgagtatattatttgtggcagcttttctgttaagggagctttccagacatctggttgcaaagacaaataggatatatatttgtacttcttctctgtggacatgtttttgtgacacacagttatctctaggagttgacgtctgtgggcactaagggactgaggttgggggagaaagctgaggaggctttggaagagaaggtgaggagcatttcaggatttgcagtccccctccacatgtatccacatctgagctggtggtgttccaataatgaggcatttggggcaaccaattttggaaggatagaatagctttatgtggagcaaacttgaggatcaattggagttgagtggtttaaaacttaaagatggcacaggaagctgtatcatttacaggtgaaaaaaataaatgggtctgacttca

SEQ ID NO: 141420 - DNA, 860 bp, Homo sapiens
  Payload ID: 7799
  Gene Symbol: HUNK
  Gene Name: hormonally up-regulated Neu-associated kinase
  ENST ID: ENST00000439107
  CDS Start-End: 1-339
cgctatttgtcagggaaatctgacatccaggacagcctctgctacaagacccggctctaccagatagaaaagtacagggcccccaaggagtcctatgaggcctctctggacacctggacacgagatcttgaattccatgccgtgcaggataaaaagcccaaagaacaagaaaaaagaggggattttcttcatcgaccattctccaagaagttggacaagaacctgccctcgcacaaacagccctcaggctcgcttatgacacagattcagaacaccaaagccctcctgaaggaccggaaggcctccaagtccagcttccccgacaaaggactctcctgaggatggaggcccttgtcaccgggcatcttgaaaggacatcctgccattgttcacaggactcaactacagactgctcttccagatcttgaaataagtaccccctggcctggctcaggagcctgctaggacctgcacaagatggtgtgtggacacagcccaaggcttcccttccacgcggtgggaggccgaggagtgagaaagcggaattccgctgtgcaggggagctgaccgatgcaccccggggggacgccggccaagtgaatggggtcactccaaggccagggactctccacatcttccatggtgtgacctggatccccacacatgtggtgtcaatcaaaacattgctctagcccggggtgttactcccttcctggcccctgcgctttgtgtgcttgggccgcatgccccgcctccccactccacgaagtgtgagacagcaagacatgaacttgcttgatacctggtccccctgacacgcagctggagcacgcagcatccccacgtgtccagagactgcg

SEQ ID NO: 141421 - DNA, 486 bp, Homo sapiens
  Payload ID: 7799
  Gene Symbol: HUNK
  Gene Name: hormonally up-regulated Neu-associated kinase
  ENST ID: ENST00000430354
  CDS Start-End: 1-486
cagatgatccgccaccccaatatcactcagctccttgatattttagaaacggaaaacagctactacctggtcatggagctgtgccctgggggcaacctgatgcacaagatctatgagaagaagcggctggaggagtccgaagcccgcagatacatccgacagctcatctctgccgtagagcacctgcaccgggccggggtggtccacagagacttgaagatagagaatttgctactagatgaagacaataatatcaagctgattgactttggtttgagcaactgcgcagggatcctgggttactcggatccgttcagcacacagtgtggcagccctgcctacgctgcacctgaactgctcgccaggaagaaatacggccccaaaatcgatgtctggtccatgtgccatcagtttcctgcgctctctcctggaaccggatcctgtgaagaggccaaatattcagcaggcactggcgaatcgctggct

SEQ ID NO: 141422 - DNA, 9623 bp, Homo sapiens
  Payload ID: 7800
  Gene Symbol: HRNR
  Gene Name: hornerin
  Uniprot ID: Q86YZ3
  ENST ID: ENST00000368801
  CDS Start-End: 77-8629
accctgaaagctgtttctgtctctaccctacttgttcctctggtgagctaggttactcaaacttgcaaaaaaaaaaatgcctaaactcctacaaggcgtcatcactgtcatcgatgttttctaccaatatgccacccagcatggggagtatgatacgttgaacaaggcagagctgaaagaacttctggaaaatgagtttcatcaaattctgaagaatccaaacgatccagatactgtggatatcatcttgcaaagtctggatcgagaccataacaagaaagtggattttactgagtatcttctgatgatattcaagctggttcaggctcgtaataaaatcattggcaaagattactgccaagtttcagggtcaaagctgagagatgacactcaccagcaccaagaggaacaagaagaaactgaaaaagaggagaacaaacggcaagaatcctcttttagtcattcaagttggagtgcaggagagaatgattcctattccagaaacgtcagaggaagtcttaaacctgggactgaatccatatccagaagactgagttttcaaagagacttttctggccaacataactcctactcaggtcagtcttccagctatggtgagcaaaactccgactcccatcagtcttcaggccgcggccaatgtgggtctgggtcagggcagtctcccaactatggccaacacggctctggctccggacagtcttccagcaatgacacacatgggtctggctcaggccagtcttctggctttagtcaacacaagtctagctcagggcagtcctctggttacagtcagcatggatctggctcaggtcactcctctggctacggacaacacggctctaggtcaggacagtcatctaggggtgaacgacacagatctagctcaggttcgtcttccagctatggtcagcatgggtctggttcccgtcagtctttgggccacggccgacaagggtctggatctcgccagtctcctagccacgtccgacatgggtccggttcggggcactcctccagccacggccaacacgggtctggctcaagttactcttacagccgtggccattatgagtctggctcaggccagacttctggctttgggcaacatgagtctggctcaggacagtcctctggctatagtaagcatggttctggctcaggtcactcctctagccagggacaacatggatctacgtcagggcaggcatcaagctctggccaacatggctccagctcacgtcagtcttccagctatggtcagcatgagtctgcctcccgtcactcttcaggccgcggccaacacagctctggatctggccagtctccaggccacggccagcgtgggtctgggtcagggcagtctcccagctccggccaacatgggactggctttggtcgatcttccagcagtggcccatatgtgtctggttcaggctactcttctggctttggtcaccacgagtctagctcagagcattcctctggttacactcagcatggatctggctcaggtcactcctccggccacggacaacacggctctaggtcaggacagtcatctaggggtgaacgacaaggatctagtgcaggttcatcttccagctatggtcagcatgggtctggctcccgtcaatctttgggacacagccgacatgggtctggatctggccagtctcctagccctagccgtggccgacatgagtctggttccaggcagtcttccagctatggcccacatgggtatggctcagggaggtcttcaagccgtggcccatatgagtctggctccggtcactcttctggcttaggtcaccaagagtctcgctcaggacagtcctctggctacggtcaacacggatctagctcgggtcattcctctacccatgggcaacatggttctacatcaggacagtcatcgagctgtggccaacatggagctacctcaggtcagtcttccagccacggtcagcatggctctggctcaagtcagtcttctcgctatggccaacagggctctggatctggccagtctcctagtcgcggccgacatgggtccgattttgggcactcttccagctacggccaacatgggtctggctccggttggtcttcaagcaatggcccacatgggtctgtctcaggccagtcttccggctttggtcacaagtctggctcagggcagtcctctggttacagtcagcatggatctggctcaagtcactcctccggctacagaaaacacggctctaggtcaggacagtcatctaggagtgaacaacacggatctagctcaggtttgtcttccagctatggtcagcatgggtcgggctcccatcaatcttcgggccacggccgacaagggtctggatctggccactctcctagccgtgtccgacatgggtccagttcagggcactcctccagccacggccaacacgggtctggcacaagttgttcttccagctgtggccattatgagtctggctcaggccaggcttctggttttgggcaacacgagtctggctcaggacagggctatagtcagcatggttctgcctcaggtcacttctctagccagggacgacatggatctacgtcagggcagtcatcaagctccggccaacatgactctagctcaggtcaatcttccagctatggtcagcatgagtctgcctcccatcacgcttcgggccgcggccgacatggctctggatctggccagtctccaggccacggccagcgtgggtctgggtcagggcagtctcccagctatggccgacatgggtctggctccggtcggtcttccagcagtggccgacatgggtctggctcaggccagtcttctggctttggtcacaagtctagctcagggcagtcctctggttacactcagcatggatctggctcaggtcactcctccagctacgaacaacacggctctaggtcaggacagtcatctaggagcgaacaacatggatctagctcaggttcgtcttccagctatggtcagcatgggtctggctcccgtcagtctttgggccacggccaacatgggtctggatctggccagtctcctagccctagccgtggccgacatgggtctggttccgggcagtcttccagctatggcccatataggtctggctcagggtggtcttcaagccgtggcccatatgagtctggctccggtcactcttctggcttaggtcaccgagagtctcgctcaggacagtcctctggctacggtcaacatggatctagctcaggtcattcctctacccatgggcaacacggttctacatcaggacagtcatcgagctgtggccaacatggagctagctcaggtcagtcttccagccacggtcagcatggctctggctcaagtcagtcttctggctatggccgacagggctctggatctggccagtctccaggccacggccagcgtgggtctgggtcaaggcagtctcccagctacggccgacatgggtctggctccggtcggtcttccagcagtggccaacatgggtctggcttaggcgagtcttctggctttggtcaccacgagtctagctcagggcagtcctctagttacagtcagcatgggtctggctcaggtcactcctctggctacggacaacacggctctagatcaggacagtcatctaggggtgaacgacacggatctagctcaggttcgtcttcccactatggtcagcatgggtctggctcccgtcagtcttcgggccacggccgacaagggtctggatctggccattcccctagccgcggccgacatgggtccggtttggggcactcctccagccacggccaacatgggtctggctcaggtcgttcttccagccgtggcccatatgagtctcgctcgggtcactcttctgtctttggtcaacatgagtctggctcaggacattcctctgcttacagtcagcatggtagtggctcagggcacttctgtagccaaggacagcatggttctacatcaggacagtcatcaacctttgaccaggagggatctagcacaggccagtcttccagctatggccaccgtggctctggctccagtcagtcttctggctatggccgacatggggctggatctggccagtctcctagtcgcggccgacatgggtccggttctgggcactcttccagctacggccaacatgggtctggctccggttggtcttccagcagtggccgacatgggtctggctcaggtcagtcttctggatttggtcaccacgagtctagctcatggcagtcctctggttgcactcagcatggatctggctcaggtcactcctccagctacgaacaacacggctctaggtcaggacagtcatctaggggtgaacgacacggatctagctcaggttcatcttccagctatggtcagcatgggtctggctcccgtcagtctttgggccacggccaacatgggtctggatctggccagtctcctagccctagccgtggccgacatgggtctggttctgggcagtcttccagctacagcccatatgggtctggctcagggtggtcttccagccgtggcccatatgagtctggctccagtcactcttctggcttaggtcaccgagagtctcgctcaggacagtcctctggctacggtcaacatggatctagctcaggtcattcctctacccatgggcaacatggttctacatcaggacagtcatcgagctgtggccaacatggagctagctcaggtcagtcttccagccacggtcagcatggctctggctcaagtcagtcttctggctatggccgacagggctctggatctggccagtctccaggccacggccagcgtgggtctgggtcaaggcagtctcccagctacggccgacatgggtctggctccggtcggtcttccagcagtggccaacatgggtctggcttaggcgagtcttctggctttggtcaccacgagtctagctcagggcagtcctctagttacagtcagcatgggtctggctcaggtcactcctctggctacggacaacacggctctagatcaggacagtcatctaggggtgaacgacacggatctagctcacgttcgtcttcccgctatggtcagcatgggtctggctcccgtcagtcttcgggccacggccgacaagggtctggatctggccagtcccctagccgcggccgacatgggtccggtttggggcactcctccagccacggccaacatgggtctggctcaggtcgttcttccagccgtggcccatatgagtctcgctcgggtcactcttctgtctttggtcaacatgagtctggctcaggacattcctctgcttacagtcagcatggtagtggctcagggcacttctgtagccaaggacagcatggttctacatcaggacagtcatcaacctttgaccaggagggatctagcacaggtcagtcttccagccacggtcagcatggctctggctcaagtcagtcttctagctatggccaacagggctctggatctggccagtctcctagtcgcggccgacatgggtccggttccgggcactcttccagctacggccaacatgggtctggctccggttggtcttccagcagtggccgacatgggtctggctcaggtcagtcttctggatttggtcaccatgagtctagctcatggcagtcctctggttacactcagcatggatctggctcaggtcactcctccagctacgaacaacacggctctaggtcaggacagtcatctaggggtgaacaacacggatctagctcaggttcatcttccagctatggtcagcatgggtctggctcccgtcagtctttgggccacggccaacatgggtctggatctggccagtctcctagccctagccgtggccgacatgggtctggttctgggcagtcttccagctacggcccatatgggtctggctcagggtggtcttccagccgtggcccatatgagtctggctccggtcactcttctggcttaggtcaccgagagtctcgctcaggacagtcctctggctacggtcaacatggatctagctcaggtcattcctctacccatgggcaacatggttctgcatcaggacagtcatcgagctgtggccaacatggagctagctcaggtcagtcttccagccacggtcagcatggctctggctcaagtcagtcttctggctatggccgacagggctctggatctggccagtctccaggccacggccagcgtgggtctgggtcaaggcagtctcccagctatggccgacatgggtctggctccggtcggtcttccagcagtggccaacatgggcctggcttaggcgagtcttctggctttggtcaccacgagtctagctcagggcagtcctctagttacagtcagcatgggtctggctcaggtcactcctctggctacggacaacacggctctagatcaggacagtcatctaggggtgaacgacacggatctagctcaggttcgtcttcccgctatggtcagcatgggtctggctcccgtcagtcttcgggccacggccgacaagggtctggatctggccattcccctagccgcggccgacatgggtccggttcggggcactcctccagccacggccaacatgggtctggctcaggtcgttcttccagccgtggcccatatgagtctcgctcgggtcactcttctgtctttggtcaacatgagtctggctcaggacattcctctgcttacagtcagcatggtagtggctcagggcacttctgtagccaaggacagcatggttctacatcaggacagtcatcaacctttgaccaggagggatctagcacaggtcagtcttccagccacggtcagcatggctctggctcaagtcagtcttctagctatggccaacagggctctggatctggccagtctcctagtcgcggccgacatgggtccggttccgggcactcttccagctacggccaacatgggtctggctccggttggtcttccagcagtggccgacatgggtctggctcaggtcagtcttctggatttggtcaccacgagtctagctcatggcagtcctctggttacactcagcatggatctggctcaggtcactcctccagctacgaacaacacggctctaggtcaggacagtcatctaggggtgaacgacacggatctagctcaggttcatcttccagctatggtcagcatgggtctggctcccgtcagtctttgggccacggccaacatgggtctggatctggccagtctcctagccctagccgtggccgacatgggtctggttctgggcagtcttccagctacagcccatatgggtctggctcagggtggtcttccagccgtggcccatatgagtctggctccggtcactcttctggcttaggtcaccgagagtctcgctcaggacagtcctctggctacggtcaacatggatctagctcaggtcattcctctacccatgggcaacatggttctacatcaggacagtcatcgagctgtggccaacatggagctagctcaggtcagtcttccagccacggtcagcatggctctggctcaagtcagtcttctggctatggccgacagggctctggatctggccagtctccaggccacggccagcgtgggtctgggtcaaggcagtctcccagctacggccgacatgggtctggctccggtcggtcttccagcagtggccaacatgggtctggcttaggcgagtcttctggctttggtcaccacgagtctagctcagggcagtcctctagttacagtcagcatgggtctggctcaggtcactcctctggctacggacaacacggctctagatcaggacagtcatctaggggtgaacgacacggatctagctcaggttcgtcttcccactatggtcagcatgggtctggctcccgtcagtcttcgggccacggccgacaagggtctggatctggccagtcccctagccgcggccgacatgggtccggtttggggcactcctccagccacggccaacatgggtctggctcaggtcgttcttccagccgtggcccatatgagtctcgcttgggtcactcttctgtctttggtcaacatgagtctggctcaggacattcctctgcttacagtcagcatggtagtggctcagggcacttctgtagccaaggacagcatggttctacatcaggacagtcatcaacctttgaccaggagggatctagcacaggccagtcttccagctatggccaccgtggctctggctccagtcagtcttctggctatggccgacatggggctggatctggccagtctcttagccacggccgacacgggtctggttcagggcagtcttccagctacggccaacatgggtctggctcaggacagtcctctggttatagtcagcatggaagtggctcagggcaagatgggtattcttattgcaaaggaggaagtaaccatgatgggggaagttctggctcatattttctcagttttcctagtagcacttcaccctatgaatatgtccaagagcagaggtgctacttttatcagtgaataataaacataaatgcaatttactcaagtagcaatttaagaaataggaaagtcatctatgaattcatcatgaaagacaagcaatccatcatgaaattcgttctaaaagtgaatcaatgcatttctgtctctttctttagagcctaaaactgtagcatatatcttgttatggggttccttccaaagactgttaggcatttgtgctactttgttagaaaatactgagtggaataacttgttagaatgagggttaaactttgaggaataatgaaaagcttttaaagagctttgggtttagttggagttgtctttttgagagctcatcattcatttatagatggtgccaaagctaaccttacatttcttagaagcaaaatattacaaatgcattaccagtcctagatacaaagctttgttttacagcaattagtgtaccctaatttttagtgtgccccaagtttggtgtgtcccaatttttggtattgtggcagaaggtgaaggctctgaaagcaaagatgcagcagcggtagtgtctttacttatcaaaaccatcaagtcctttttcttgggtatatatttaatcagtaagttaattagtggcataaaaaagtagcatcagggtcttttcccaagccagtgagcaagagcattatttcataaagaatagggatttatcatttcaggaaaaaaaaaaacattcaaatgtgggctttagcttgttttcagcagaaagatcttgctccctatttctaagaggctgctcaatattgggaaatatattgaggagttattccatggaaatacaatgctttccacctactactgtagttcaataacgtttccacctgaaaaaatatcatccatgcccagatgaaaaggaagagtatctgtcactgctacatagttccttaatttgactgtaacacatttgtttcaagtctttggattcaaacaaccggattgtattaaaattgacaataaataaatgttgatt

SEQ ID NO: 141423 - DNA, 8869 bp, Homo sapiens
  Payload ID: 7801
  Gene Symbol: HCFC1
  Gene Name: host cell factor C1
  Uniprot ID: P51610
  ENST ID: ENST00000310441
  CDS Start-End: 968-7075
cggctcccagggaggaggcatgagcgccctgccgttaccgcttcttctgccgtacagttgccgcttcggggcctaactctagctctttgaagcggctcctgtgggaaggagtcataaggcgggaagtgaggatcggacaccgccttgagtttggtgtgcagtggaagaactgacctaggaggaagagaataggggggaacggggagctagtctcaagatggcggctcccacggcggcaggcgcagcctgagcagcagaggcggactaaggggagaggcgcgagacttcacaagccgtacggcgcgagcccccaaacggccctcgagagctcgagctggttccaccggcctccggcccgcctccattcgttaggtgtgtcgaggctgtttcgggagcggcggctgcactaaggcgctgggcggggaagcgggacggtctcaagatggcggctcccacaattgtggtctgagcgccggcggggctgcgacgaccgcggcgcttgtggctcctttccacccgccccggaagccggccagtgctggggacttgggggtgtgggaaccgggccggggctccgccatttccggcgggggagggctacgactgaggaagggaggagagagaggcggctcaagatggcggctcccagggcctcccgcccgagcttgtaagcgggagcgcccggacaagtagtcggggcgacgggactcagcggcctccagcttcttgagcctaggcgctcgacagtttcgggcggctcttgcggagacggggtgagcgagaagaaagggaagagccaaagggaaggagggcagttaagatggcggcctccatggagtcgtctaccgctgtgtgagaaaccgcttctccgtgagagctgccttagacgaaagggggtgtgtgaaaggaattgaggggctcccttcccgcttgttgacttctccccaccgcaccctttcccggaactatggcttcggccgtgtcgcccgccaacttgccagcggtgcttctgcagccccgctggaagcgagtggtgggctggtcgggtccggtgccacggccccgccacggccaccgcgccgtggccatcaaggagctcatcgtggtgtttggcggcggcaacgagggaatagtggacgaactgcacgtgtacaacacggcaaccaaccagtggttcatcccagccgtgaggggggacattccccctgggtgtgcagcctatggcttcgtgtgtgacgggactcgcctcctggtgtttggtgggatggtggagtatgggaaatacagcaatgacctctacgaactccaggcgagccggtgggagtggaagagactcaaagcaaagacgcccaaaaacgggccccctccgtgtcctcgactcgggcacagcttctcccttgtgggcaacaaatgctacctgtttgggggtctggccaatgatagcgaggacccaaagaacaacattccaaggtacctgaatgacttatatatcctggaattacggccaggctctggagtggtagcctgggacattcccatcacttacggggtcctaccaccaccccgggagtcacatactgccgtggtctacaccgaaaaagacaataagaagtccaagctggtgatctacggcgggatgagtggctgcaggctgggggacctgtggaccctagatattgacaccctgacgtggaataagcccagtctcagcggggtggcgcctcttcctcgcagtctccactcggcaaccaccatcggaaataaaatgtacgtgtttggtggctgggtgcctctcgtcatggatgacgtcaaagtggccacacacgagaaggagtggaagtgtaccaacacgctggcttgtctcaacctggataccatggcctgggagaccatcctgatggatacactggaggacaacatcccccgtgctcgggctggccactgcgcagtcgccatcaacacccgcctgtacatttggagtgggcgtgacggctaccgcaaggcctggaacaaccaggtctgctgcaaggacctctggtacctagagacagaaaagccaccacccccagcccgagtacaactggtacgcgccaacaccaactccctggaggtgagctggggggcagtggcaacagccgacagctaccttctccagctccagaaatatgacattcctgccacggctgctactgccacctcccctacacccaatccggtcccatctgtgcctgccaaccctcccaagagccctgccccagcagcagccgcacctgctgtgcagccgctgacccaagtaggcatcacgctcctgccccaggctgcccccgcacccccgaccaccaccaccatccaggtcttgccaacggtgcctggcagctccatttctgtgcccaccgcagccaggactcaaggtgtccctgctgttctcaaagtgaccggtcctcaggctacaacaggaactccattggtcaccatgcgacctgccagccaggctgggaaagcccctgtcaccgtgacctcccttcccgccggagtgcggatggttgtgccaacacagagtgcccagggaacggtgattggcagtagcccacagatgagtgggatggccgcactggccgctgcggccgctgccacccagaagatccccccttcctcggcacccacggtgctgagtgtcccagcgggtaccaccatcgtgaagaccatggctgtgacacctggcactaccaccctcccagccactgtgaaggtggcctcctcgccagtcatggtgagcaaccctgccactcgcatgctgaagactgcagccgcccaggtggggacatcggtttcctccgccaccaacacgtctacccgccctatcatcacagtgcacaagtcaggcactgtgacagtggcccagcaagcccaggtggtgaccacagttgtgggcggggtcaccaagaccatcaccctggtgaagagccccatctctgtcccaggaggcagtgctctgatttccaatctgggcaaagtgatgtcggtggtccagaccaaaccagttcagacttcagcagtcacaggccaggcgtccacgggtcctgtgactcagatcatccagaccaaagggcccctgccagcgggaacaatcctgaagctggtgacctcagcagatggcaagcccaccaccatcatcactaccacgcaggccagtggggcggggaccaagcccaccatcctgggcatcagcagcgtctcccccagtaccaccaagcccggcacgaccaccatcatcaaaaccatccccatgtcggccatcatcacccaggcgggcgccacgggtgtgaccagcagtcctggcatcaagtcccccatcaccatcatcaccaccaaggtgatgacttcaggaactggagcacctgcgaaaatcatcactgctgtccccaaaattgccactggccacgggcagcagggagtgacccaggtggtgcttaagggggccccgggacagccaggcaccatcctccgcactgtgcccatggggggtgttcgcctggtcacacccgtcaccgtctccgccgtcaagccagccgtcaccacgttggttgtgaaaggcaccacaggtgtcacgaccctaggcacagtgacaggcaccgtctccaccagccttgccggggcggggggccacagcactagtgcttccctggccacgcccatcaccaccttgggcaccattgccaccctctcaagccaggtgatcaaccccactgccatcactgtgtcggccgcacagaccacgctgacagcggcaggcgggctcacaaccccaaccatcaccatgcagcccgtgtcccagcccacccaggtaactctgatcacggcacctagtggggtggaggcccagcctgtgcatgacctccctgtgtccattctggcctccccgactacagaacagcccaccgccacagttaccatcgccgactcaggccagggtgatgtgcagcctggcactgtcaccttggtgtgctccaacccaccctgtgagacccacgagactggcaccaccaacacggccaccactactgttgtggctaaccttgggggacacccccagcccacccaagtgcagttcgtctgtgacagacaggaggcagctgcttctcttgtgacctcgactgtgggccagcagaatggtagcgtggtccgagtctgttcgaacccgccctgcgagacccacgagacgggcaccaccaacaccgccaccaccgccacctccaacatggccgggcagcatggctgctcaaacccaccctgcgagacccacgagacgggcaccaccaacactgccactacagccatgtcgagcgtcggcgccaaccaccagcgagatgcccgtcgggcctgtgcagctggcacccctgccgtgatccggatcagtgtggccactggggcgctggaggcagcccagggctctaagtcccagtgccaaacccgccagaccagcgcgaccagcaccaccatgactgtgatggccaccggggccccgtgctcggccggcccactccttgggccgagcatggcacgggagcccgggggccgcagccctgcttttgtgcagttggcccctctgagcagcaaagtcaggctgagcagcccaagcattaaggaccttcctgcggggcgccacagccatgcggtcagcaccgctgccatgacccgttccagcgtgggtgctggggagccccgcatggcacctgtgtgcgagagcctccagggtggctcgcccagcaccacagtgactgtgacagccctggaggcactgctgtgcccctcggccaccgtgacccaagtctgctccaacccaccatgtgagacccacgagacaggcaccaccaacaccgccactacctcgaatgcaggcagcgcccagagggtgtgctccaacccgccatgcgagacccacgagacgggcaccacccacacggccaccaccgctacttcaaacgggggcacgggccagcccgagggtgggcagcagccccctgctggtcgcccctgtgagacacaccagaccacttccactggcaccaccatgtcggtcagcgtgggtgccctgcttcccgacgccacttcttcccacaggaccgtggagtctggcctagaggtggcggcggcacccagcgtcaccccccaggctggcaccgcgctgctggctcctttcccaacacagagggtgtgctccaaccccccctgtgagacccacgagacgggcaccactcacacggccaccactgtcacttccaacatgagttcaaaccaagaccccccacctgctgccagcgatcagggagaggtggagagcacccagggcgacagcgtgaacatcaccagctccagtgccatcacgacaaccgtgtcctccacactgacgcgggctgtgaccaccgtgacgcagtccacaccggtcccgggcccctctgtgccgcccccagaggaactccaggtgtcgccaggtcctcgccagcagctgccgccacggcagcttctgcagtcggcttccacagccctgatgggggagtccgccgaggtcctgtcagcctcccagacccctgagctcccggccgccgtggatctgagcagcacaggggagccatcttcgggccaggagtctgccggctctgcggtggtggccactgtggtggtccagccacccccacccacacagtccgaagtagaccagttatcacttccccaagagctaatggccgaggcccaagctggcaccaccaccctcatggtaacggggctcacccccgaggagctggcagtgacggctgctgcagaagcagctgcccaggccgcagccacggaggaagcccaggccctggccatccaggcggtgctccaggccgcgcagcaggccgtcatgggcaccggcgagcccatggacacctccgaggcagcagcaaccgtgactcaggcggagctggggcacctgtcggccgagggtcaggagggccaggccaccaccatacccattgtgctgacacagcaggagctggctgccctggtgcagcagcagcagctgcaggaggcccaggcccagcagcagcatcaccacctccccactgaggccctggcccctgccgacagtctcaacgacccagccattgagagcaattgcctcaatgagctggccggcacggtccccagcactgtggcgctgctgccctcaacggccactgagagcctggctccatccaacacatttgtggccccccagccggttgtggtggccagcccagccaagctgcaggctgcagctaccctgaccgaagtggccaatggcatcgagtccctgggtgtgaagccagacctgccgcccccacccagcaaagcccccatgaagaaggaaaaccagtggtttgatgtgggagtcattaagggcaccaatgtaatggtgacacactatttcctgccaccagatgatgctgtcccatcagacgatgatttgggcaccgtccctgactataaccagctgaagaagcaggagctgcagccaggcacagcctataagtttcgtgttgccggaatcaatgcctgtggccgggggcccttcagcgaaatctcagcctttaagacgtgcctgcctggtttcccaggggccccttgtgccattaaaatcagcaaaagtccggatggtgctcacctcacctgggagccaccctctgtgacctccggcaagattatcgagtactccgtgtacctggccatccagagctcacaggctgggggcgagctcaagagctccaccccggcccagctggccttcatgcgggtgtactgcgggcccagcccctcctgcctggtgcagtcctccagcctttccaacgcccacatcgactacaccaccaagcccgccatcatcttccgcatcgccgcccgcaatgagaagggctatggcccggccacacaagtgaggtggctgcaggaaaccagtaaagacagctctggcaccaagccagccaacaagcggcccatgtcctctccagaaatgaaatctgctccaaagaaatctaaggccgatggtcagtgagaggaagctgactagcccctggattcttctccagacccccctgcttcaggaacacccgccagggcccacccctcccaccccgtcccagcattcgcacttcaccctcgcgagccgctgttcactcctctcccctttctctttctctctgtttttaaaataatctaaagaaagcacattttaccattgctgttgggaggaagcagaggcagatgggaaagcagagagaggagcgcgcttcctttcctccccgctgccgcccaccctggggagagacttttgcggggagggaaggcggagctgaggacagccagctccgccctcccaaggctgtgcgttcctgagggccaggtcgggggcaggcatggaggggaggaaaggcgtccctcttggccctccccagagtggctttcctggcaccctggcctgggtgtctggttctgttttcttttcttccccttgtgtttccagtcacctaacttcccttcctcaggctcccccggcccaccctgctcagtgaccccacaggaagcttacacattttctcagaggcctttgtgctcccacctcttctaccctccccctcttctttcccattttaaaaaagaaaagaaggaaaaagaaaaaaggggcaaggagccccgcggcggcctgggcagcgcctgtgcagacctccctgcaggccgcactgccaactgctgcatttgttgtgttttttaggttgcaattggtgaagttcacactttcattgtaattttagcgtgtggggttttgtcccttttttgttgttgttagctgtgtacagaatgtgtaatcttttttcttttctcttttttttgttttgttttgttttgtttttgtttttttacttttttcttcttggctaattcttggcagggatctttctggaggaaaagctggggccagccagggcaggagaggtgtgaaatctgccacgaggggcctgctgtttgccacccagcccaacttcctgttgctggcccctgccctctgcccttttgcctgtcctcaggccgctggaacaaaggaaggacagctcattcctcatgggcgatcactccgcatctatagggtcgagcctaggggagcttgagggagggctggggcctccttgtcctggatttccagctctccccatgccccctccctgagcaccaccggcaccgcctcccaaacagggctgctggtttccgcagccactgctccacctcccccaaatcgtcatggaaagggtggagaatggaggggaaccaggcgtccttggaggcagcttgggagggtgactgtgtagtgtcacccacaagggaggctagggcaatggagcaggccaccagcagcagctgtgcagcatggaactcaggccaggctccgaggctgggggatctgcttggagttttctgccccccaccccaaacttctgtcgaggagcaaggcttgccagcaagtcagaaggatttgaaccgagcagccaatctttccagccctcccctaccgacctctgcctggagacgcagcagcctgtgtcctccagggcctctggtttgttgtattatagtatatttcgctgtggaaaatgtcacgtttagtcaccttggagcccactcacctggtcctgttgttttaccccatcccttctctcgcgcgcctattgatttgtttctgaggagagtacaccgttcactattgtagagtaacccctgtgactcaatattaccatagtgcgatgtcgttttgtgctattttgaacaattaaaagactttttttgaaataaccac

SEQ ID NO: 141424 - DNA, 8375 bp, Homo sapiens
  Payload ID: 7801
  Gene Symbol: HCFC1
  Gene Name: host cell factor C1
  ENST ID: ENST00000369984
  CDS Start-End: 345-6587
aggcggctcaagatggcggctcccagggcctcccgcccgagcttgtaagcgggagcgcccggacaagtagtcggggcgacgggactcagcggcctccagcttcttgagcctaggcgctcgacagtttcgggcggctcttgcggagacggggtgagcgagaagaaagggaagagccaaagggaaggagggcagttaagatggcggcctccatggagtcgtctaccgctgtgtgagaaaccgcttctccgtgagagctgccttagacgaaagggggtgtgtgaaaggaattgaggggctcccttcccgcttgttgacttctccccaccgcaccctttcccggaactatggcttcggccgtgtcgcccgccaacttgccagcggtgcttctgcagccccgctggaagcgagtggtgggctggtcgggtccggtgccacggccccgccacggccaccgcgccgtggccatcaaggagctcatcgtggtgtttggcggcggcaacgagggaatagtggacgaactgcacgtgtacaacacggcaaccaaccagtggttcatcccagccgtgaggggggacattccccctgggtgtgcagcctatggcttcgtgtgtgacgggactcgcctcctggtgtttggtgggatggtggagtatgggaaatacagcaatgacctctacgaactccaggcgagccggtgggagtggaagagactcaaagcaaagacgcccaaaaacgggccccctccgtgtcctcgactcgggcacagcttctcccttgtgggcaacaaatgctacctgtttgggggtctggccaatgatagcgaggacccaaagaacaacattccaaggtacctgaatgacttatatatcctggaattacggccaggctctggagtggtagcctgggacattcccatcacttacggggtcctaccaccaccccgggagtcacatactgccgtggtctacaccgaaaaagacaataagaagtccaagctggtgatctacggcgggatgagtggctgcaggctgggggacctgtggaccctagatattgacaccctgacgtggaataagcccagtctcagcggggtggcgcctcttcctcgcagtctccactcggcaaccaccatcggaaataaaatgtacgtgtttggtggctgggtgcctctcgtcatggatgacgtcaaagtggccacacacgagaaggagtggaagtgtaccaacacgctggcttgtctcaacctggataccatggcctgggagaccatcctgatggatacactggaggacaacatcccccgtgctcgggctggccactgcgcagtcgccatcaacacccgcctgtacatttggagtgggcgtgacggctaccgcaaggcctggaacaaccaggtctgctgcaaggacctctggtacctagagacagaaaagccaccacccccagcccgagtacaactggtacgcgccaacaccaactccctggaggtgagctggggggcagtggcaacagccgacagctaccttctccagctccagaaatatgacattcctgccacggctgctactgccacctcccctacacccaatccggtcccatctgtgcctgccaaccctcccaagagccctgccccagcagcagccgcacctgctgtgcagccgctgacccaagtaggcatcacgctcctgccccaggctgcccccgcacccccgaccaccaccaccatccaggtcttgccaacggtgcctggcagctccatttctgtgcccaccgcagccaggactcaaggtgtccctgctgttctcaaagtgaccggtcctcaggctacaacaggaactccattggtcaccatgcgacctgccagccaggctgggaaagcccctgtcaccgtgacctcccttcccgccggagtgcggatggttgtgccaacacagagtgcccagggaacggtgattggcagtagcccacagatgagtgggatggccgcactggccgctgcggccgctgccacccagaagatccccccttcctcggcacccacggtgctgagtgtcccagcgggtaccaccatcgtgaagaccatggctgtgacacctggcactaccaccctcccagccactgtgaaggtggcctcctcgccagtcatggtgagcaaccctgccactcgcatgctgaagactgcagccgcccaggtggggacatcggtttcctccgccaccaacacgtctacccgccctatcatcacagtgcacaagtcaggcactgtgacagtggcccagcaagcccaggtggtgaccacagttgtgggcggggtcaccaagaccatcaccctggtgaagagccccatctctgtcccaggaggcagtgctctgatttccaatctgggcaaagtgatgtcggtggtccagaccaaaccagttcagacttcagcagtcacaggccaggcgtccacgggtcctgtgactcagatcatccagaccaaagggcccctgccagcgggaacaatcctgaagctggtgacctcagcagatggcaagcccaccaccatcatcactaccacgcaggccagtggggcggggaccaagcccaccatcctgggcatcagcagcgtctcccccagtaccaccaagcccggcacgaccaccatcatcaaaaccatccccatgtcggccatcatcacccaggcgggcgccacgggtgtgaccagcagtcctggcatcaagtcccccatcaccatcatcaccaccaaggtgatgacttcaggaactggagcacctgcgaaaatcatcactgctgtccccaaaattgccactggccacgggcagcagggagtgacccaggtggtgcttaagggggccccgggacagccaggcaccatcctccgcactgtgcccatggggggtgttcgcctggtcacacccgtcaccgtctccgccgtcaagccagccgtcaccacgttggttgtgaaaggcaccacaggtgtcacgaccctaggcacagtgacaggcaccgtctccaccagccttgccggggcggggggccacagcactagtgcttccctggccacgcccatcaccaccttgggcaccattgccaccctctcaagccaggtgatcaaccccactgccatcactgtgtcggccgcacagaccacgctgacagcggcaggcgggctcacaaccccaaccatcaccatgcagcccgtgtcccagcccacccaggtaactctgatcacggcacctagtggggtggaggcccagcctgtgcatgacctccctgtgtccattctggcctccccgactacagaacagcccaccgccacagttaccatcgccgactcaggccagggtgatgtgcagcctggcactgtcaccttggtgtgctccaacccaccctgtgagacccacgagactggcaccaccaacacggccaccactactgttgtggctaaccttgggggacacccccagcccacccaagtgcagttcgtctgtgacagacaggaggcagctgcttctcttgtgacctcgactgtgggccagcagaatggtagcgtggtccgagtctgttcgaacccgccctgcgagacccacgagacgggcaccaccaacaccgccaccaccgccacctccaacatggccgggcagcatggctgctcaaacccaccctgcgagacccacgagacgggcaccaccaacactgccactacagccatgtcgagcgtcggcgccaaccaccagcgagatgcccgtcgggcctgtgcagctggcacccctgccgtgatccggatcagtgtggccactggggcgctggaggcagcccagggctctaagtcccagtgccaaacccgccagaccagcgcgaccagcaccaccatgactgtgatggccaccggggccccgtgctcggccggcccactccttgggccgagcatggcacgggagcccgggggccgcagccctgcttttgtgcagttggcccctctgagcagcaaagtcaggctgagcagcccaagcattaaggaccttcctgcggggcgccacagccatgcggtcagcaccgctgccatgacccgttccagcgtgggtgctggggagccccgcatggcacctgtgtgcgagagcctccagggtggctcgcccagcaccacagtgactgtgacagccctggaggcactgctgtgcccctcggccaccgtgacccaagtctgctccaacccaccatgtgagacccacgagacaggcaccaccaacaccgccactacctcgaatgcaggcagcgcccagagggtgtgctccaacccgccatgcgagacccacgagacgggcaccacccacacggccaccaccgctacttcaaacgggggcacgggccagcccgagggtgggcagcagccccctgctggtcgcccctgtgagacacaccagaccacttccactggcaccaccatgtcggtcagcgtgggtgccctgcttcccgacgccacttcttcccacaggaccgtggagtctggcctagaggtggcggcggcacccagcgtcaccccccaggctggcaccgcgctgctggctcctttcccaacacagagggtgtgctccaaccccccctgtgagacccacgagacgggcaccactcacacggccaccactgtcacttccaacatgagttcaaaccaagaccccccacctgctgccagcgatcagggagaggtggagagcacccagggcgacagcgtgaacatcaccagctccagtgccatcacgacaaccgtgtcctccacactgacgcgggctgtgaccaccgtgacgcagtccacaccggtcccgggcccctctgtgccgaagatctcatcaatgactgagactgccccaagggctctgactactgaagtccccatcccggccaaaataacagtgaccatagccaacacagaaacttctgacatgcccttctctgctgttgacatcctgcagcccccagaggaactccaggtgtcgccaggtcctcgccagcagctgccgccacggcagcttctgcagtcggcttccacagccctgatgggggagtccgccgaggtcctgtcagcctcccagacccctgagctcccggccgccgtggatctgagcagcacaggggagccatcttcgggccaggagtctgccggctctgcggtggtggccactgtggtggtccagccacccccacccacacagtccgaagtagaccagttatcacttccccaagagctaatggccgaggcccaagctggcaccaccaccctcatggtaacggggctcacccccgaggagctggcagtgacggctgctgcagaagcagctgcccaggccgcagccacggaggaagcccaggccctggccatccaggcggtgctccaggccgcgcagcaggccgtcatggcaggcaccggcgagcccatggacacctccgaggcagcagcaaccgtgactcaggcggagctggggcacctgtcggccgagggtcaggagggccaggccaccaccatacccattgtgctgacacagcaggagctggctgccctggtgcagcagcagcagctgcaggaggcccaggcccagcagcagcatcaccacctccccactgaggccctggcccctgccgacagtctcaacgacccagccattgagagcaattgcctcaatgagctggccggcacggtccccagcactgtggcgctgctgccctcaacggccactgagagcctggctccatccaacacatttgtggccccccagccggttgtggtggccagcccagccaagctgcaggctgcagctaccctgaccgaagtggccaatggcatcgagtccctgggtgtgaagccagacctgccgcccccacccagcaaagcccccatgaagaaggaaaaccagtggtttgatgtgggagtcattaagggcaccaatgtaatggtgacacactatttcctgccaccagatgatgctgtcccatcagacgatgatttgggcaccgtccctgactataaccagctgaagaagcaggagctgcagccaggcacagcctataagtttcgtgttgccggaatcaatgcctgtggccgggggcccttcagcgaaatctcagcctttaagacgtgcctgcctggtttcccaggggccccttgtgccattaaaatcagcaaaagtccggatggtgctcacctcacctgggagccaccctctgtgacctccggcaagattatcgagtactccgtgtacctggccatccagagctcacaggctgggggcgagctcaagagctccaccccggcccagctggccttcatgcgggtgtactgcgggcccagcccctcctgcctggtgcagtcctccagcctttccaacgcccacatcgactacaccaccaagcccgccatcatcttccgcatcgccgcccgcaatgagaagggctatggcccggccacacaagtgaggtggctgcaggaaaccagtaaagacagctctggcaccaagccagccaacaagcggcccatgtcctctccagaaatgaaatctgctccaaagaaatctaaggccgatggtcagtgagaggaagctgactagcccctggattcttctccagacccccctgcttcaggaacacccgccagggcccacccctcccaccccgtcccagcattcgcacttcaccctcgcgagccgctgttcactcctctcccctttctctttctctctgtttttaaaataatctaaagaaagcacattttaccattgctgttgggaggaagcagaggcagatgggaaagcagagagaggagcgcgcttcctttcctccccgctgccgcccaccctggggagagacttttgcggggagggaaggcggagctgaggacagccagctccgccctcccaaggctgtgcgttcctgagggccaggtcgggggcaggcatggaggggaggaaaggcgtccctcttggccctccccagagtggctttcctggcaccctggcctgggtgtctggttctgttttcttttcttccccttgtgtttccagtcacctaacttcccttcctcaggctcccccggcccaccctgctcagtgaccccacaggaagcttacacattttctcagaggcctttgtgctcccacctcttctaccctccccctcttctttcccattttaaaaaagaaaagaaggaaaaagaaaaaaggggcaaggagccccgcggcggcctgggcagcgcctgtgcagacctccctgcaggccgcactgccaactgctgcatttgttgtgttttttaggttgcaattggtgaagttcacactttcattgtaattttagcgtgtggggttttgtcccttttttgttgttgttagctgtgtacagaatgtgtaatcttttttcttttctcttttttttgttttgttttgttttgtttttgtttttttacttttttcttcttggctaattcttggcagggatctttctggaggaaaagctggggccagccagggcaggagaggtgtgaaatctgccacgaggggcctgctgtttgccacccagcccaacttcctgttgctggcccctgccctctgcccttttgcctgtcctcaggccgctggaacaaaggaaggacagctcattcctcatgggcgatcactccgcatctatagggtcgagcctaggggagcttgagggagggctggggcctccttgtcctggatttccagctctccccatgccccctccctgagcaccaccggcaccgcctcccaaacagggctgctggtttccgcagccactgctccacctcccccaaatcgtcatggaaagggtggagaatggaggggaaccaggcgtccttggaggcagcttgggagggtgactgtgtagtgtcacccacaagggaggctagggcaatggagcaggccaccagcagcagctgtgcagcatggaactcaggccaggctccgaggctgggggatctgcttggagttttctgccccccaccccaaacttctgtcgaggagcaaggcttgccagcaagtcagaaggatttgaaccgagcagccaatctttccagccctcccctaccgacctctgcctggagacgcagcagcctgtgtcctccagggcctctggtttgttgtattatagtatatttcgctgtggaaaatgtcacgtttagtcaccttggagcccactcacctggtcctgttgttttaccccatcccttctctcgcgcgcctattgatttgtttctgaggagagtacaccgttcactattgtagagtaacccctgtgactcaatattaccatagtgcgatgtcgttttgtgctattttgaacaattaaaagactttttttgaaat

SEQ ID NO: 141425 - DNA, 3624 bp, Homo sapiens
  Payload ID: 7801
  Gene Symbol: HCFC1
  Gene Name: host cell factor C1
  ENST ID: ENST00000444191
  CDS Start-End: 1-1834
gacgggcaccactcacacggccaccactgtcacttccaacatgagttcaaaccaagaccccccacctgctgccagcgatcagggagaggtggagagcacccagggcgacagcgtgaacatcaccagctccagtgccatcacgacaaccgtgtcctccacactgacgcgggctgtgaccaccgtgacgcagtccacaccggtcccgggcccctctgtgccgcccccagaggaactccaggtgtcgccaggtcctcgccagcagctgccgccacggcagcttctgcagtcggcttccacagccctgatgggggagtccgccgaggtcctgtcagcctcccagacccctgagctcccggccgccgtggatctgagcagcacaggggagccatcttcgggccaggagtctgccggctctgcggtggtggccactgtggtggtccagccacccccacccacacagtccgaagtagaccagttatcacttccccaagagctaatggccgaggcccaagctggcaccaccaccctcatggtaacggggctcacccccgaggagctggcagtgacggctgctgcagaagcagctgcccaggccgcagccacggaggaagcccaggccctggccatccaggcggtgctccaggccgcgcagcaggccgtcatggcaggcaccggcgagcccatggacacctccgaggcagcagcaaccgtgactcaggcggagctggggcacctgtcggccgagggtcaggagggccaggccaccaccatacccattgtgctgacacagcaggagctggctgccctggtgcagcagcagcagctgcaggaggcccaggcccagcagcagcatcaccacctccccactgaggccctggcccctgccgacagtctcaacgacccagccattgagagcaattgcctcaatgagctggccggcacggtccccagcactgtggcgctgctgccctcaacggccactgagagcctggctccatccaacacatttgtggccccccagccggttgtggtggccagcccagccaagctgcaggctgcagctaccctgaccgaagtggccaatggcatcgagtccctgggtgtgaagccagacctgccgcccccacccagcaaagcccccatgaagaaggaaaaccagtggtttgatgtgggagtcattaagggcaccaatgtaatggtgacacactatttcctgccaccagatgatgctgtcccatcagacgatgatttgggcaccgtccctgactataaccagctgaagaagcaggagctgcagccaggcacagcctataagtttcgtgttgccggaatcaatgcctgtggccgggggcccttcagcgaaatctcagcctttaagacgtgcctgcctggtttcccaggggccccttgtgccattaaaatcagcaaaagtccggatggtgctcacctcacctgggagccaccctctgtgacctccggcaagattatcgagtactccgtgtacctggccatccagagctcacaggctgggggcgagctcaagagctccaccccggcccagctggccttcatgcgggtgtactgcgggcccagcccctcctgcctggtgcagtcctccagcctttccaacgcccacatcgactacaccaccaagcccgccatcatcttccgcatcgccgcccgcaatgagaagggctatggcccggccacacaagtgaggtggctgcaggaaaccagtaaagacagctctggcaccaagccagccaacaagcggcccatgtcctctccagaaatgaaatctgctccaaagaaatctaaggccgatggtcagtgagaggaagctgactagcccctggattcttctccagacccccctgcttcaggaacacccgccagggcccacccctcccaccccgtcccagcattcgcacttcaccctcgcgagccgctgttcactcctctcccctttctctttctctctgtttttaaaataatctaaagaaagcacattttaccattgctgttgggaggaagcagaggcagatgggaaagcagagagaggagcgcgcttcctttcctccccgctgccgcccaccctggggagagacttttgcggggagggaaggcggagctgaggacagccagctccgccctcccaaggctgtgcgttcctgagggccaggtcgggggcaggcatggaggggaggaaaggcgtccctcttggccctccccagagtggctttcctggcaccctggcctgggtgtctggttctgttttcttttcttccccttgtgtttccagtcacctaacttcccttcctcaggctcccccggcccaccctgctcagtgaccccacaggaagcttacacattttctcagaggcctttgtgctcccacctcttctaccctccccctcttctttcccattttaaaaaagaaaagaaggaaaaagaaaaaaggggcaaggagccccgcggcggcctgggcagcgcctgtgcagacctccctgcaggccgcactgccaactgctgcatttgttgtgttttttaggttgcaattggtgaagttcacactttcattgtaattttagcgtgtggggttttgtcccttttttgttgttgttagctgtgtacagaatgtgtaatcttttttcttttctcttttttttgttttgttttgttttgtttttgtttttttacttttttcttcttggctaattcttggcagggatctttctggaggaaaagctggggccagccagggcaggagaggtgtgaaatctgccacgaggggcctgctgtttgccacccagcccaacttcctgttgctggcccctgccctctgcccttttgcctgtcctcaggccgctggaacaaaggaaggacagctcattcctcatgggcgatcactccgcatctatagggtcgagcctaggggagcttgagggagggctggggcctccttgtcctggatttccagctctccccatgccccctccctgagcaccaccggcaccgcctcccaaacagggctgctggtttccgcagccactgctccacctcccccaaatcgtcatggaaagggtggagaatggaggggaaccaggcgtccttggaggcagcttgggagggtgactgtgtagtgtcacccacaagggaggctagggcaatggagcaggccaccagcagcagctgtgcagcatggaactcaggccaggctccgaggctgggggatctgcttggagttttctgccccccaccccaaacttctgtcgaggagcaaggcttgccagcaagtcagaaggatttgaaccgagcagccaatctttccagccctcccctaccgacctctgcctggagacgcagcagcctgtgtcctccagggcctctggtttgttgtattatagtatatttcgctgtggaaaatgtcacgtttagtcaccttggagcccactcacctggtcctgttgttttaccccatcccttctctcgcgcgcctattgatttgtttctgaggagagtacaccgttcactattgtagagtaacccctgtgactcaatattaccatagtgcgatgtcgttttgtgctattttgaacaattaaaagactttttttgaaataa

SEQ ID NO: 141426 - DNA, 965 bp, Homo sapiens
  Payload ID: 7802
  Gene Symbol: HCFC1R1
  Gene Name: host cell factor C1 regulator 1 (XPO1 dependent)
  Uniprot ID: Q9NWW0
  ENST ID: ENST00000248089
  CDS Start-End: 306-722
gtggcgccctaccgccttcggcgcgaaggtggctggtgcgtaccgtcccgaaccctaggagccgaggtgagcgccgcgaagacccccgacattaagaagtggtgtccaccgcagcccccttaagccggataccctcccccaccccgaggagcaagcctgccttccgccacgcgccgcccgtcttccgcgcccgcgcagaacctcgcggctgtgcccgcctaaagccacgcccatcctctcttggccacgccctcagagactcctcccctgtcgcccagatcccacccgcaggaccccaaaacccaatgatcctgcagcagcccttgcagcgaggcccccagggaggggcccagcgcctcccgcgggccgccttgggggtgacttggggcctggacgccagctcccctctccgaggagctgtgcccatgagcaccaagcggcgcctggaggaggagcaggagcctctgcgcaagcagtttctgtctgaggagaacatggccacccacttctctcaactcagcctgcacaatgaccacccctactgcagcccccccatgaccttctccccagccctgcccccactcaggagcccttgctctgagctgcttctctggcgctatcctggcagcctcatccctgaggccctccgtctgctgaggctgggggacacccccagtcccccctaccctgcaaccccagctggggacataatggagctctgagtgctggtggacagtgcccctcccaccttccttcttccccacaacagaagagaccagcgactcccgcaaagggacaaggttcctccctctcctgcagagtaggcatctgggcaccaagaccttccctcaacagaggacactgagcccaacggagttctgggatgggaggggtgggagcatgggaagggaggcatcccacccccaagaagaactgaataaagattgctgagcaaaggaaggctt

SEQ ID NO: 141427 - DNA, 765 bp, Homo sapiens
  Payload ID: 7802
  Gene Symbol: HCFC1R1
  Gene Name: host cell factor C1 regulator 1 (XPO1 dependent)
  ENST ID: ENST00000354679
  CDS Start-End: 333-743
cttacgtgcctagagcggttcctctccgtggcgccctaccgccttcggcgcgaaggtggctggtgcgtaccgtcccgaaccctaggagccgaggtgagcgccgcgaagacccccgacattaagaagtggtgtccaccgcagcccccttaagccggataccctcccccaccccgaggagcaagcctgccttccgccacgcgccgcccgtcttccgcgcccgcgcagaacctcgcggctgtgcccgcctaaagccacgcccatcctctcttggccacgccctcagagactcctcccctgtcgcccagatcccacccgcaggaccccaaaacccaatgatcctgcagcagcccttgcagcgaggcccccagggaggggcccagcgcctcccgcgggccgccttgggggtgacttggggcctggacgccaggctgcctcctgtgtcagtatcccagcctgcctctctgccatctctccccagggagcctctgcgcaagcagtttctgtctgaggagaacatggccacccacttctctcaactcagcctgcacaatgaccacccctactgcagcccccccatgaccttctccccagccctgcccccactcaggagcccttgctctgagctgcttctctggcgctatcctggcagcctcatccctgaggccctccgtctgctgaggctgggggacacccccagtcccccctaccctgcaaccccagctggggacataatggagctctgagtgctggtggacagtgcccctc

SEQ ID NO: 141428 - DNA, 495 bp, Homo sapiens
  Payload ID: 7802
  Gene Symbol: HCFC1R1
  Gene Name: host cell factor C1 regulator 1 (XPO1 dependent)
  ENST ID: ENST00000573842
  CDS Start-End: 134-495
aacctcacgaggccttacgtgcctagagcggttcctctccgtggcgccctaccgccttcggcgcgaaggtggctggtgcgtaccgtcccgaaccctaggagccgagatcccacccgcaggaccccaaaacccaatgatcctgcagcagcccttgcagcgaggcccccagggaggggcccagcgcctcccgcgggccgccttgggggtgacttggggcctggacgccagctcccctctccgaggagctgtgcccatgagcaccaagcggcgcctggaggaggagcaggagcctctgcgcaagcagtttctgtctgaggagaacatggccacccacttctctcaactcagcctgcacaatgaccacccctactgcagcccccccatgaccttctccccagccctgcccccactcaggagcccttgctctgagctgcttctctggcgctatcctggcagcctcatccctgaggccctccgtctgctgaggctggggga

SEQ ID NO: 141429 - DNA, 610 bp, Homo sapiens
  Payload ID: 7802
  Gene Symbol: HCFC1R1
  Gene Name: host cell factor C1 regulator 1 (XPO1 dependent)
  ENST ID: ENST00000572355
  CDS Start-End: 80-376
cgccttcggcgcgaaggtggctggtgcgtaccgtcccgaaccctaggagccgagctcccctctccgaggagctgtgcccatgagcaccaagcggcgcctggaggaggagcaggagcctctgcgcaagcagtttctgtctgaggagaacatggccacccacttctctcaactcagcctgcacaatgaccacccctactgcagcccccccatgaccttctccccagccctgcccccactcaggagcccttgctctgagctgcttctctggcgctatcctggcagcctcatccctgaggccctccgtctgctgaggctgggggacacccccagtcccccctaccctgcaaccccagctggggacataatggagctctgagtgctggtggacagtgcccctcccaccttccttcttccccacaacagaagagaccagcgactcccgcaaagggacaaggttcctccctctcctgcagagtaggcatctgggcaccaagaccttccctcaacagaggacactgagcccaacggagttctgggatgggaggggtgggagcatgggaagggaggcatcccacccccaagaagaactgaataaagattgctgagcaaa

SEQ ID NO: 141430 - DNA, 618 bp, Homo sapiens
  Payload ID: 7802
  Gene Symbol: HCFC1R1
  Gene Name: host cell factor C1 regulator 1 (XPO1 dependent)
  Uniprot ID: Q9NWW0
  ENST ID: ENST00000574151
  CDS Start-End: 21-380
ccgcaggaccccaaaacccaatgatcctgcagcagcccttgcagcgaggcccccagggaggggcccagcgcctcccgcgggccgccttgggggtgacttggggcctggacgccagggagcctctgcgcaagcagtttctgtctgaggagaacatggccacccacttctctcaactcagcctgcacaatgaccacccctactgcagcccccccatgaccttctccccagccctgcccccactcaggagcccttgctctgagctgcttctctggcgctatcctggcagcctcatccctgaggccctccgtctgctgaggctgggggacacccccagtcccccctaccctgcaaccccagctggggacataatggagctctgagtgctggtggacagtgcccctcccaccttccttcttccccacaacagaagagaccagcgactcccgcaaagggacaaggttcctccctctcctgcagagtaggcatctgggcaccaagaccttccctcaacagaggacactgagcccaacggagttctgggatgggaggggtgggagcatgggaagggaggcatcccacccccaagaagaactgaataaagattgctgagcaaaggaa

SEQ ID NO: 141431 - DNA, 845 bp, Homo sapiens
  Payload ID: 7802
  Gene Symbol: HCFC1R1
  Gene Name: host cell factor C1 regulator 1 (XPO1 dependent)
  Uniprot ID: Q9NWW0
  ENST ID: ENST00000574980
  CDS Start-End: 242-658
gagcggttcctctccgtggcgccctaccgccttcggcgcgaaggtggctgcccccttaagccggataccctcccccaccccgaggagcaagcctgccttccgccacgcgccgcccgtcttccgcgcccgcgcagaacctcgcggctgtgcccgcctaaagccacgcccatcctctcttggccacgccctcagagactcctcccctgtcgcccagatcccacccgcaggaccccaaaacccaatgatcctgcagcagcccttgcagcgaggcccccagggaggggcccagcgcctcccgcgggccgccttgggggtgacttggggcctggacgccagctcccctctccgaggagctgtgcccatgagcaccaagcggcgcctggaggaggagcaggagcctctgcgcaagcagtttctgtctgaggagaacatggccacccacttctctcaactcagcctgcacaatgaccacccctactgcagcccccccatgaccttctccccagccctgcccccactcaggagcccttgctctgagctgcttctctggcgctatcctggcagcctcatccctgaggccctccgtctgctgaggctgggggacacccccagtcccccctaccctgcaaccccagctggggacataatggagctctgagtgctggtggacagtgcccctcccaccttccttcttccccacaacagaagagaccagcgactcccgcaaagggacaaggttcctccctctcctgcagagtaggcatctgggcaccaagaccttccctcaacagaggacactgagcccaacggagttctgggatgggaggggtgggagcatgggaagg

SEQ ID NO: 141432 - DNA, 5734 bp, Homo sapiens
  Payload ID: 7803
  Gene Symbol: HCFC2
  Gene Name: host cell factor C2
  Uniprot ID: Q9Y5Z7
  ENST ID: ENST00000229330
  CDS Start-End: 105-2483
cacgtgaccccagcacagctggaggcgggtccccgccctccccagggagcagccggttgaggcgggagcggtgcattgtgggcagaggggcgggggttgggaagatggcggctcccagcctcctcaactggaggcgagtttcttccttcacggggccggtcccccgcgcccggcacggacaccgagcggtggccatccgggagctgatgatcatctttggagggggaaatgagggcatcgcggatgagctgcacgtctacaacacggctacgaatcagtggtttctgccagctgttagaggagatatccctccaggctgtgctgcccatggatttgtctgtgatggtaccagaatattagtatttgggggaatggttgaatatggaagatacagcaatgagttatatgagttacaagcaagtcgttggttatggaaaaaagtgaaaccccatccccctccttctggtttacctccttgtcctcggcttggacatagcttctctttatatggtaacaaatgctatttgtttggtggcctggcaaacgaaagcgaagattcaaacaataatgttcccagatatttaaatgatttttatgagttggagctacagcatggctctggtgttgtgggttggagcattccagtgactaaaggggttgtgccttctccaagagaatcccacacagctgttatatattgcaaaaaagattctggaagtcctaaaatgtatgtttttggtggaatgtgtggtgctcgcctggatgacctatggcagcttgacttagaaactatgtcatggtcaaaaccagaaactaaagggacagtgccacttccacgaagccttcatacagccagtgttataggaaacaagatgtacatttttggtggatgggtcccacataagggggaaaatactgagacttcacctcatgattgtgaatggagatgtaccagttcattttcttacctaaatctggatacaacagagtggaccaccctagtatcagattctcaggaagataaaaaaaattcaagaccaagaccaagagctggccactgtgctgttgcaatcggcactcgattgtatttttggagtggaagagatggctacaaaaaagcactgaatagtcaagtttgctgcaaggatctttggtatcttgatactgagaaaccaccggcaccatctcaagtacagctgatcaaagccactaccaactcctttcatgtcaagtgggatgaagtgtctacagttgagggctatcttttgcagttgagtacagacttgccataccaagctgcatcatcagattcttcagcagcaccaaatatgcaaggagtcaggatggaccctcacagacaaggcagtaataacatcgttcctaacagtatcaatgatacaataaacagcacaaaaactgaacagccagccacaaaagaaacttcaatgaaaaacaaaccagactttaaagcactgacggattctaatgccattttatatccatctttggcatcaaatgcttctaatcataatagtcatgtggtggatatgctaaggaaaaatgaaggtcctcacacttcagcaaatgtaggtgttctaagtagttgcctggatgtaagaacagtaattcctgaaacatctgtatccagtactgtttccagcacacaaactatggtaacccagcagaccattaaaactgaatcatccagtacaaatggggcagttgttaaagatgaaacttcactaacaacattcagtaccaaatctgaagttgatgaaacatatgcactgcctgcaacgaagatcagccgtgtagagacacatgctacagcaacgccgttttctaaagagactccttcaaatccagtggccacagtgaaagcgggagaacgacaatggtgtgatgtgggaatttttaaaaataatacagctttggtgagccagttttatttgctgccaaaagggaagcaaagcatctcaaaggtaggaaatgcagatgtacctgactacagcttgcttaagaaacaagatcttgttccaggcacaggatacagattcagggttgctgcaatcaatggttgtgggataggtcctttcagcaaaatcagtgaatttaaaacttgtattcctggttttcctggagctccttctgcagtcagaatttcaaagaatgttgaaggtatccacctttcctgggaacctccaacctcaccttctggaaatattttggaatattcagcctacttggctatccgcacagcacagatacaagataatccaagtcaacttgtgttcatgaggatttattgtggtcttaagacatcatgtatagtaactgctgggcaacttgcaaatgcacatattgattatacatccaggcctgccattgtgttcaggatatcagcaaagaatgaaaagggatatggaccagctacacaagttcggtggcttcaaggtaacaataagaaagcacctttaaattgaattggtttttttactgaagctattgtgatgatgattatttattagtaactggttatgaagatttgtcatttaaaagagtattctctggctgtatttccagcagttatgaacttgagtttgtaaattgttcttaaaatgtatttgctgaattatagatccaaataaaagaaaagaagcaaagactctctgaaaattagtatatgagttcttccttacagatatagctcttttataaagaaaaacagtgaaattaagataaaagctagaaagctttattaccccaatatcttttataagggctgtgtaacccagtcatcctagagttattgagatgattctggtaactggctgttgtatactatgctgtcttatatagtaaatgttctctacattgtaaatgtcctacctttgagtactccttctatctttattctatatgagcagtgttcctctaacaactgtcttctattggataatatgtgtgatactataataattctaatagttatttgattcctttctttgtttacagttagcacagagcttaagaaattaaaaaagaggcaagtttagaaactgcttttgaacttttattattttccaagaatcatggtaaaatacaacaagaacaatgagttttcttgattcttaccaggccaatatatttgaatatatttttggccaaagcacttaacttatctggccctcattttcctcataacagatgagggagttaaagcagtttatcttttaggtccctttcagcactaaggttttgtgtttttagtagaagtgaagtatgtccctgaacattttcatctgtcttaatggctctaattttgcttttgctaaaattaaaatcttcataattgaattcaaaattaaagtatatgtcctcctattggagaaaaaaacaagcaccttaacaggacacaagttttaaaatagtgttttaaacatttgtaagatttttgtaaatgctctaaatgttttatttttgcattgtttttaccttgaaattgtataaacttttttactatgaaaatataagcattagacagctaactcaggttccattacaaccttaaagatacagataggcattataaacactctgctacaggtaacttgttttaaaccttttaggaatttcatggttccactgcctatttaaatctggaattaatatacagagcaataattgcagaaaagatatttcaaactaagagcttcaataactgcaggggcacaggtctatctttttttataccacataaccttatgccagtttaggttgactgagtagctatgtcctcaaatttcatgtatgataccccccagcaaagatggatttaattgtgcagaattgatatatatgtgtgttccagttactaatttaaagtgtatagaatattttaatatataatttttgtaaagaactgggatttttatactacagtatttgtaattaatgtgtctcactaattaagtttctcttgaagaaaatatgcaaattgttagacacataatgagtggtttccaaactctaaagataaaataaatgcactactatggtgttgttagaataccttttttgtggctgtatgaatctttactctttaaatgtgtactttacaatgtttacaaggagcttctctggtttgttatcccagcaatgcccttggtgagagcttcattctgcatttgtttaattcatatgctttgcttttggcatatgcttgctttttgcactagtagaattttaacttacctcattattatgtttgtaatcatttgtctagcttctgtaatgtatctgatataggctaaacaaatacttaaccaaagttaaaatacatggtaagcaattttgcacatattaaatattagggtttgttgtgtatatgtgtatacttaattataaaagaatatgaatggaaagttatactaaaagtatatgtttcaagcccagttattttaaagatctattgctttaatagaaaaagtttggcttttaaccctttcttctctgcattaattaacaacgtgcatcttgaagcccttctcctgataacaaggaataagttgattttaagcaaaggatagaatatttgtttgagtgtgcacatttatacctgtttagtatttgattcagttaagcctccactcttctggatcaggaggtgattctgaacctgtggttctaacatatgacttaactgtttagagggaagagaagtctttctatactgagggatttgttaaaatcataaatgtttttgccctgagacttagcccagattctattttttttttttttttggcatttgtacattaagcaccagtcatatttatctctgtgataagggattgctgactaaaaaatgccattaagaaatctctgtggctttgacattagtagttaataagagatcttagagctgtgtgctgatgaatagaatgaattggagcaaatagcaagagaagtgcatttagcttcttatgatttgcacattttctaaatgaagatccctttgtgtagcagtaggctgtatcatgcagatatttttcataggatttgcactgagttaaatgactttctttactcttcccagtcaggtaagcagttcaaatataacaagactttgtgccagtcctcttctgtgttctgcaactctggctctcataagtagtaaaaatatttttgatgttgcatgctctcagaattatgttttctaaaatatcatattggcttcattttagtttaataaacttctttggcaacttaattagacatagggtatatataaactcaattttatctgcattttttaaaaaattgaaataatctgattgcatgtatgaaggactcctgcctcattacccaattacataaatacaattatctataggaaggtgaaattgttgatctattatttcaaagacttgtagactagcaaagattcattctgattagaaataaggtctatagctaaagatatttttattttaaaaaattacagcccttgtaacaaaaatcatttgtaacattggatatgaagacattattagtatttaaaattattgtagtcatttgatcataaatgaagtagcttgcaaaatagacttggtctttgaccctttaaggtgtaactgactgactgttgtgtttttcaagactgattttaggcagttttatgtatcgtgtaccaatgatatgtaaaataaagcaccttttctactataaacaa

SEQ ID NO: 141433 - DNA, 2538 bp, Homo sapiens
  Payload ID: 7803
  Gene Symbol: HCFC2
  Gene Name: host cell factor C2
  Uniprot ID: Q9Y5Z7
  ENST ID: ENST00000544223
  CDS Start-End: 20-1258
aggggcgggggttgggaagatggcggctcccagcctcctcaactggaggcgagtttcttccttcacggggccggtcccccgcgcccggcacggacaccgagcggtggccatccgggagctgatgatcatctttggagggggaaatgagggcatcgcggatgagctgcacgtctacaacacggctacgaatcagtggtttctgccagctgttagaggagatatccctccaggctgtgctgcccatggatttgtctgtgatggtaccagaatattagtatttgggggaatggttgaatatggaagatacagcaatgagttatatgagttacaagcaagtcgttggttatggaaaaaagtgaaaccccatccccctccttctggtttacctccttgtcctcggcttggacatagcttctctttatatggtaacaaatgctatttgtttggtggcctggcaaacgaaagcgaagattcaaacaataatgttcccagatatttaaatgatttttatgagttggagctacagcatggctctggtgttgtgggttggagcattccagtgactaaaggggttgtgccttctccaagagaatcccacacagctgttatatattgcaaaaaagattctggaagtcctaaaatgtatgtttttggtggaatgtgtggtgctcgcctggatgacctatggcagcttgacttagaaactatgtcatggtcaaaaccagaaactaaagggacagtgccacttccacgaagccttcatacagccagtgttataggaaacaagatgtacatttttggtggatgggtcccacataagggggaaaatactgagacttcacctcatgattgtgaatggagatgtaccagttcattttcttacctaaatctggatacaacagagtggaccaccctagtatcagattctcaggaagataaaaaaaattcaagaccaagaccaagagctggccactgtgctgttgcaatcggcactcgattgtatttttggagtggaagagatggctacaaaaaagcactgaatagtcaagtttgctgcaaggatctttggtatcttgatactgagaaaccaccggcaccatctcaagtacagctgatcaaagccactaccaactcctttcatgtcaagtgggatgaagtgtctacagttgagggctatcttttgcagttgagtacagacttgccataccaagctgcatcatcagattcttcagcagcaccaaatatgcaagatcaatgatacaataaacagcacaaaaactgaacagccagccacaaaagaaacttcaatgaaaaacaaaccagactttaaagcactgacggattctaatgccattttatatccatctttggcatcaaatgcttctaatcataatagtcatgtggtggatatgctaaggaaaaatgaaggtcctcacacttcagcaaatgtaggtgttctaagtagttgcctggatgtaagaacagtaattcctgaaacatctgtatccagtactgtttccagcacacaaactatggtaacccagcagaccattaaaactgaatcatccagtacaaatggggcagttgttaaagatgaaacttcactaacaacattcagtaccaaatctgaagttgatgaaacatatgcactgcctgcaacgaagatcagccgtgtagagacacatgctacagcaacgccgttttctaaagagactccttcaaatccagtggccacagtgaaagcgggagaacgacaatggtgtgatgtgggaatttttaaaaataatacagctttggtgagccagttttatttgctgccaaaagggaagcaaagcatctcaaaggtaggaaatgcagatgtacctgactacagcttgcttaagaaacaagatcttgttccaggcacaggatacagattcagggttgctgcaatcaatggttgtgggataggtcctttcagcaaaatcagtgaatttaaaacttgtattcctggttttcctggagctccttctgcagtcagaatttcaaagaatgttgaaggtatccacctttcctgggaacctccaacctcaccttctggaaatattttggaatattcagcctacttggctatccgcacagcacagatacaagataatccaagtcaacttgtgttcatgaggatttattgtggtcttaagacatcatgtatagtaactgctgggcaacttgcaaatgcacatattgattatacatccaggcctgccattgtgttcaggatatcagcaaagaatgaaaagggatatggaccagctacacaagttcggtggcttcaaggtaacaataagaaagcacctttaaattgaattggtttttttactgaagctattgtgatgatgattatttattagtaactggttatgaagatttgtcatttaaaagagtattctctggctgtatttccagcagttatgaacttgagtttgtaaattgttcttaaaatgtatttgctgaattatagatccaaataaaagaaaagaagcaaagactctctgaaaa

SEQ ID NO: 141434 - DNA, 746 bp, Homo sapiens
  Payload ID: 7803
  Gene Symbol: HCFC2
  Gene Name: host cell factor C2
  ENST ID: ENST00000550444
  CDS Start-End: 512-746
accgcccggtcactgcttccttgggcgggcggcggggagcgcggctcagccgggcagcccgggtccggcagctctgtcccggaccgcagctcaggatctccggggcccttggggcgcaacggaccccgagcggggcgcaccggccttcaggcgggggatcccggacgcccccaccccagcccgacaggcggacgcaggcgacagaagaccatgtccaaccgcctgggccactccccgaaatctcgcctctgtcaaaaaacaaaacccactccaaaccaaagttccttagggcctttcccgtctttgcctgccttccttccttaggaggaagaccatctagggggtgaggagggaaaacgagaggccttctggcactctcgcctcaaatacaacccggtgtttggcagctacgaatcagtggtttctgccagctgttagaggagatatccctccaggctgtgctgcccatggatttgtctgtgatggtaccagaatattagtatttgggggaatggttgaatatggaagatacagcaatgagttatatgagttacaagcaagtcgttggttatggaaaaaagtgaaaccccatccccctccttctggtttacctccttgtcctcggcttggacatagcttctctttatatggtaacaaatgctatttgtttggtggcctggcaaacgaaagcgaagattcaaacaataatgttcccagatatttaaatgatttttatgagttggagc

SEQ ID NO: 141435 - DNA, 765 bp, Homo sapiens
  Payload ID: 7804
  Gene Symbol:
  Gene Name: HOXA10-HOXA9
  ENST ID: ENST00000470747
  CDS Start-End: 359-697
gcacatcctctcctctctccttctctctctgcccggagctggtttccgtctctcggctcggggctggaactccggcccaacctaggcgcgcagccgccacgagatggcgcacttccgatcaatgtcaaagccgccggggagccgggaaccccagcatgattcttggcctttgttcgcttctgatactaagagcagcacggtacattatttcacttgtcccgctccccttcataacagaaaaaggggactcaccctcaagaagtgattggtatggtaatttaaagcaacgcgcattcgctaggcctcgcgagcgtcgccgcgcggagaagccagctgtcccttggcagtgatttcggaaatgtgtcaagttgatagagaaaaacaacccagcgaaggcgccttctctgaaaacaatgctgagaatgagagcggcggagacaagccccccatcgatcccaataacccagcagccaactggcttcatgcgcgctccactcggaaaaagcggtgcccctatacaaaacaccagaccctggaactggagaaagagtttctgttcaacatgtacctcaccagggaccgcaggtacgaggtggctcgactgctcaacctcaccgagaggcaggtcaagatctggttccagaaccgcaggatgaaaatgaagaaaatcaacaaagaccgagcaaaagacgagtgatgccatttgggcttatttagaaaaaagggtaagctagagagaaaaagaaagaactgtccgtccccctt

SEQ ID NO: 141436 - DNA, 1066 bp, Homo sapiens
  Payload ID: 7805
  Gene Symbol: HRASLS
  Gene Name: HRAS-like suppressor
  ENST ID: ENST00000264735
  CDS Start-End: 95-916
cgggcgggcgggcgggcgaagctgggctcggggccaagcgaggtctagccggagcgactgtgccccgcctcctgggcggagcgggcggctccccatggtcagagcctcgtgccggctcggcagcgcccggacgccgagcccagcgcgtcggccccccggcgtgcgggcgtctcagagccgcggaggggccgccgggaccgtttcagcgtggcggcgctggtgctggcgttggccctggaggacggccccgagtgatggctggcgcctgcctcccgggtgtctcccgggtacagatggagtcgtcccgcggccgccggcggcaaggtcggcagctgcgaggccaagagagaccccaggacacacacagctgcctcccggtgcgagaagaagaccccggcttgagagtgagatggcgtttaatgattgcttcagtttgaactaccctggcaacccctgcccaggggacttgatcgaagtgttccgtcctggctatcagcactgggccctgtacttgggtgatggttacgttatcaacatagcacctgtagatggcattcctgcgtcctttacaagcgccaagtctgtattcagcagtaaggccctggtgaaaatgcagctcttgaaggatgttgtgggaaatgacacatacagaataaacaataaatacgatgaaacgtacccccctctccctgtggaagaaatcataaagcggtcagagtttgtaattggacaggaggtggcctataacttacttgtcaacaactgtgaacattttgtgacattgcttcgctatggagaaggagtttcagagcaggccaaccgagcgataagtaccgttgagtttgtgacagctgctgttggtgtcttctcattcctgggcttgtttccaaaaggacaaagagcaaaatactattaacaatttaccaaagagatattgatattgaaggaatttgggaggaggaaaagaaacctggggtgaatacttattttcagtgcatcattactgttccagattcctatgatggatggcagactctttaataaattgcttactgatattatctta

SEQ ID NO: 141437 - DNA, 498 bp, Homo sapiens
  Payload ID: 7805
  Gene Symbol: HRASLS
  Gene Name: HRAS-like suppressor
  ENST ID: ENST00000416012
  CDS Start-End: 1-336
tctgtattcagcagtaaggccctggtgaaaatgcagctcttgaaggatgttgtgggaaatgacacatacagaataaacaataaatacgatgaaacgtacccccctctccctgtggaagaaatcataaagcggtcagagtttgtaattggacaggaggtggcctataacttacttgtcaacaactgtgaacattttgtgacattgcttcgctatggagaaggagtttcagagcaggccaaccgagcgataagtaccgttgagtttgtgacagctgctgttggtgtcttctcattcctgggcttgtttccaaaaggacaaagagcaaaatactattaacaatttaccaaagagatattgatattgaaggaatttgggaggaggaaaagaaacctggggtggagacagtcttaatcaagttgtgaaatacagcaaattgtaaagggttgtttggattaaagggttgtttggaaaagctgggtcagattctagcagagaacc

SEQ ID NO: 141438 - DNA, 742 bp, Homo sapiens
  Payload ID: 7806
  Gene Symbol: HRASLS2
  Gene Name: HRAS-like suppressor 2
  Uniprot ID: Q9NWW9
  ENST ID: ENST00000255695
  CDS Start-End: 60-548
agctaatttaaggctggacacagagtcagcaacacacaagacatcatcttgaaggaaggatggctttggccagaccaagaccgagacttggagacctgattgagatttctcgctttggctatgcacactgggccatctacgtgggagatggctatgtggtccatctggctccggcaagtgaaattgctggagctggtgcggccagtgtcctgtctgccctgaccaacaaagccatagtgaagaaggaactgctgtctgtggtggctgggggagacaactacagggtcaataacaagcacgatgacagatacacaccactgccttccaacaaaatcgtcaagcgggcagaggagttggtggggcaggagttgccttattcgctgaccagtgacaactgcgagcacttcgtgaaccatctgcgctatggcgtctcccgcagtgaccaggtcactggtgcagtcacgacagtaggtgtggcagcaggcctgctggctgccgcaagccttgtggggatcctgctggccagaagcaagcgggaaaggcaataaatccaagaaattgtcccaacaaccaccaattcttacggaggaatattatttagccagcaggagtggagtttggtttactgattttactgttttgtgttcatgaatctttattttaatggagttaaaagcacaggaaaatgtatttggaaatgcagcttagtatgaattctattaaagacacaattgggctctgc

SEQ ID NO: 141439 - DNA, 1166 bp, Homo sapiens
  Payload ID: 7807
  Gene Symbol: HRASLS5
  Gene Name: HRAS-like suppressor family, member 5
  Uniprot ID: Q96KN8
  ENST ID: ENST00000301790
  CDS Start-End: 161-1000
tttgcagcccgcggcgctttcccctccgcggttcctccccgagccgcccccagtgcccaagcttccgcggctccgccgaccaggggccgcgccgactgggaactcgccaggggcgtagtcccctgcaaggcctgggggccggcgaggccgcagaggcgggatgggcctgagcccgggcgccgagggggagtacgcgctccgcctccctaggattcccccacccctccccaaacccgcctcgcgaaccgccagtaccgggcccaaggaccagccgcctgcgctcagacgttcagctgtgccccactcaggtctaaatagcatttccccccttgaattagaagaatccgtgggattcgcagcgttggtccagctcccagccaagcagcctccgccgggcacattagaacagggcagaagcatccagcaaggggagaaggctgtagttagcttggagaccacacccagccagaaagcagactggagttcaattccaaagcctgagaatgaaggcaagttaataaagcaagcagctgagggaaaaccaagacccagacctggagacctgattgagatttttcgaattggctatgagcactgggccatctatgtagaagatgattgcgtggtccatctggctcccccaagtgaggagtttgaggtgggcagcattacttccatctttagcaatcgggccgtggtgaaatacagtcgtctggaggatgtgctgcatggctgctcctggaaggtcaataacaagctagatgggacgtacctgcccttgccggtggacaagatcatccagcgtacaaaaaagatggtcaacaagatcgtgcagtacagcctgattgaagggaactgtgagcactttgtcaatggcctcagatatggcgtaccccggagccagcaggtagagcacgccctgatggaaggagcgaaggctgctggagcagttatttcagctgtagtggatagcataaagcccaaaccaataactgcctgaaggtgatgaaaactccagctagaggaagagttactgacacaagcaaaaagaacatgcttccttcccttgccttctctcaatggctccgattaagaaaattgtgaacttctggaagaatctacaatgtatccaattacccttccagaaatacatccaatatatacga

SEQ ID NO: 141440 - DNA, 571 bp, Homo sapiens
  Payload ID: 7807
  Gene Symbol: HRASLS5
  Gene Name: HRAS-like suppressor family, member 5
  ENST ID: ENST00000394615
  CDS Start-End: 1-114
aaacccgcctcgcgaaccgccagtaccgggcccaaggaccagccgcctgcgctcagacgttcagctgtgccccactcagggaaaaccaagacccagacctggagacctgattgagatttttcgaattggctatgagcactgggccatctatgtagaagatgattgcgtggtccatctggctcccccaagtgaggagtttgaggtgggcagcattacttccatctttagcaatcgggccgtggtgaaatacagtcgtctggaggatgtgctgcatggctgctcctggaaggtcaataacaagctagatgggacgtacctgcccttgccggtggacaagatcatccagcgtacaaaaaagatggtcaacaagatcgtgcagtacagcctgattgaagggaactgtgagcactttgtcaatggcctcagatatggcgtaccccggagccagcaggtagagcacgccctgatggaaggagcgaaggctgctggagcagttatttcagctgtagtggatagcataaagcccaaaccaataactgcctgaaggtgatgaaaactccagctagaggaa

SEQ ID NO: 141441 - DNA, 1167 bp, Homo sapiens
  Payload ID: 7807
  Gene Symbol: HRASLS5
  Gene Name: HRAS-like suppressor family, member 5
  Uniprot ID: Q96KN8
  ENST ID: ENST00000539221
  CDS Start-End: 135-896
cgcggttcctccccgagccgcccccagtgcccaagcttccgcggctccgccgaccaggggccgcgccgactgggaactcgccaggggcgtagtcccctgcaaggcctgggggccggcgaggccgcagaggcgggatgggcctgagcccgggcgccgagggggagtacgcgctccgcctccctaggattcccccacccctccccaaacccgcctcgcgaaccgccagtaccgggcccaaggaccagccgcctgcgctcagacgttcagctgtgccccactcaggtctaaatagcatttccccccttgaattagaagaatccgtgggattcgcagcgttggtccagctcccagccaagcagcctccgccgggcacattagaacagggcagaagcatccagcaaggggagaaggctgtagttagcttggagaccacacccagccagaaagcagactggagttcaattccaaagcctgagaatgaaggcaagttaataaagcaagcagctgagggaaaaccaagacccagacctggagacctgattgagatttttcgaattggctatgagcactgggccatctatgtagaagatgattgcgtggtccatctggctcccccaagtgaggagtttgaggtgggcagcattacttccatctttagcaatcgggccgtggtgaaatacagtcgtctggaggatgtgctgcatggctgctcctggaaggtcaataacaagctagatgggacgtacctgcccttgccggtggacaagatcatccagcgtacaaaaaagatggtcaacaagatcgtgcagtacagcctgattgaagggaactgtagagcacgccctgatggaaggagcgaaggctgctggagcagttatttcagctgtagtggatagcataaagcccaaaccaataactgcctgaaggtgatgaaaactccagctagaggaagagttactgacacaagcaaaaagaacatgcttccttcccttgccttctctcaatggctccgattaagaaaattgtgaacttctggaagaatctacaatgtatccaattacccttccagaaatacatccaatatatacgagcatagacccacagactctcaggatgggaaggatctggtatctagtgtgtatctcttatgcgccaggcactgtgcta

SEQ ID NO: 141442 - DNA, 2599 bp, Homo sapiens
  Payload ID: 7807
  Gene Symbol: HRASLS5
  Gene Name: HRAS-like suppressor family, member 5
  ENST ID: ENST00000536887
  CDS Start-End: 1-148
cgggcccaaggaccagccgcctgcgctcagacgttcagctgtgccccactcagaagaatccgtgggattcgcagcgttggtccagctcccagccaagcagcctccgccgggcacattagaacagggcagaagcatccagcaagggtgaggagtttgaggtgggcagcattacttccatctttagcaatcgggccgtggtgaaatacagtcgtctggaggatgtgctgcatggctgctcctggaaggtcaataacaagctagatgggacgtacctgcccttgccggtggacaagatcatccagcgtacaaaaaagatggtcaacaagatcgtgcagtacagcctgattgaagggaactgtgagcactttgtcaatggcctcagatatggcgtaccccggagccagcaggtagagcacgccctgatggaaggagcgaaggctgctggagcagttatttcagctgtagtggatagcataaagcccaaaccaataactgcctgaaggtgatgaaaactccagctagaggaagagttactgacacaagcaaaaagaacatgcttccttcccttgccttctctcaatggctccgattaagaaaattgtgaacttctggaagaatctacaatgtatccaattacccttccagaaatacatccaatatatacgagcatagacccacagactctcaggatgggaaggatctggtatctagtgtgtatctcttatgcgccaggcactgtgctaggcatttcatatacggatctaatttcactctctttgtaggatgggaccttgcttgtgtcttaggctgaccttggtctccgatgcttgagtgccatcagaaacatcccagaaacctctgcttgaatatttccagtaacgaagatgtctttttccagatgttctttttatttaactaaaatgtctctagcttctttccatttatgataatcctgcccttttcgacccacagtgtagctcagaggaggaggaccttaagaaaaactgagattcgttattcagggcccatggtaccttaatctagaaacacatatcccaagaaatattttctttttaaaattatacatcaactttatgccttattgtttaaaaatcttctatcaaaagtatcatcgataagacaatttatcttgcttttgtacctcataattaccctaaaatgtgaagtttctagtctcactgatttcagatgaatatttaaaataatttgataagtttaatcaattgaactctactgtgtgagtgagggagagaaaggagttatttttgtgttttgaagaaagttgacaggatggaagatctgaaattatggctggggattgtagtgatagctggtagctgaaaccacccaaaaaagctagaaaagtgttctcttatgcctccagagatacctagaaaatatgaagaatgtggaaaagagcaagatggaaccctcagagtgtttcagataaggtctgttggtatctccataagcttttctcctatttggagaaaatagactctcactgaaactcttcaatgtttttaccctccatccttttcttagcaatctaaactcaatggcctcctgttccccaacactgcagtctgggcatctgactttgtcttccctctgcactcatttctgtgaatcatgaccaggatgaaactgatatccctagttcctcttccccatttcttctcacactcccctgcctgagaatcagttgagttcccaatacctcttccttcagtctctattcattatatggtctaggttgagacttccttggaagcagaacctgagtaccaggaactcatattttataaagtatatttattccttttagctgcaaactaacccagccatgttttagtgaatgctttaatctgaagatgactttgagctcattgaccatattaatctttcatcaaacaaactggatgttgtttcattaacaaaaaactcctccacaccaaggagtgtttagtaacttctgcacagaggactcatccatctcttgcttatgtttgggacagaaagacacttctctggctttttactggcttgaacccaatgggacagagactctctagaaagtttcagggctcacattcacttgtttgtccaaaaaatatttttgagtgtctcccaagtgccaaaccctggctactcccacctttgcctgagcccatgagcggtagtctgggggctggatgtgaggagttctgagttggctaggaagacacaaggcacaatggacatggggcaaagtccacttgctggacattggtcccttccacttccaagctgtccatcaggctgagagatctggaatgcataccccacactttgaagatgaggaagggcgagtttctcaaagtgtgtgtgtgtgtttctcttttaatctgtaatggtttctgcattttgaggtagaaacagaaatctcttttttgagtgggaccactcgggtgcggcttcttagtcttgttgatataataaagcacatgcccactcctcatggagtggagaggagaaaattctaagggaacgtactctgaatgcaaatgtttctgagattaaacactagtcacttgtt

SEQ ID NO: 141443 - DNA, 3032 bp, Homo sapiens
  Payload ID: 7807
  Gene Symbol: HRASLS5
  Gene Name: HRAS-like suppressor family, member 5
  Uniprot ID: Q96KN8
  ENST ID: ENST00000540857
  CDS Start-End: 134-943
gcggttcctccccgagccgcccccagtgcccaagcttccgcggctccgccgaccaggggccgcgccgactgggaactcgccaggggcgtagtcccctgcaaggcctgggggccggcgaggccgcagaggcgggatgggcctgagcccgggcgccgagggggagtacgcgctccgcctccctaggattcccccacccctccccaaacccgcctcgcgaaccgccagtaccgggcccaaggaccagccgcctgcgctcagacgttcagctgtgccccactcagaagaatccgtgggattcgcagcgttggtccagctcccagccaagcagcctccgccgggcacattagaacagggcagaagcatccagcaaggggagaaggctgtagttagcttggagaccacacccagccagaaagcagactggagttcaattccaaagcctgagaatgaaggcaagttaataaagcaagcagctgagggaaaaccaagacccagacctggagacctgattgagatttttcgaattggctatgagcactgggccatctatgtagaagatgattgcgtggtccatctggctcccccaagtgaggagtttgaggtgggcagcattacttccatctttagcaatcgggccgtggtgaaatacagtcgtctggaggatgtgctgcatggctgctcctggaaggtcaataacaagctagatgggacgtacctgcccttgccggtggacaagatcatccagcgtacaaaaaagatggtcaacaagatcgtgcagtacagcctgattgaagggaactgtgagcactttgtcaatggcctcagatatggcgtaccccggagccagcaggtagagcacgccctgatggaaggagcgaaggctgctggagcagttatttcagctgtagtggatagcataaagcccaaaccaataactgcctgaaggtgatgaaaactccagctagaggaagagttactgacacaagcaaaaagaacatgcttccttcccttgccttctctcaatggctccgattaagaaaattgtgaacttctggaagaatctacaatgtatccaattacccttccagaaatacatccaatatatacgagcatagacccacagactctcaggatgggaaggatctggtatctagtgtgtatctcttatgcgccaggcactgtgctaggcatttcatatacggatctaatttcactctctttgtaggatgggaccttgcttgtgtcttaggctgaccttggtctccgatgcttgagtgccatcagaaacatcccagaaacctctgcttgaatatttccagtaacgaagatgtctttttccagatgttctttttatttaactaaaatgtctctagcttctttccatttatgataatcctgcccttttcgacccacagtgtagctcagaggaggaggaccttaagaaaaactgagattcgttattcagggcccatggtaccttaatctagaaacacatatcccaagaaatattttctttttaaaattatacatcaactttatgccttattgtttaaaaatcttctatcaaaagtatcatcgataagacaatttatcttgcttttgtacctcataattaccctaaaatgtgaagtttctagtctcactgatttcagatgaatatttaaaataatttgataagtttaatcaattgaactctactgtgtgagtgagggagagaaaggagttatttttgtgttttgaagaaagttgacaggatggaagatctgaaattatggctggggattgtagtgatagctggtagctgaaaccacccaaaaaagctagaaaagtgttctcttatgcctccagagatacctagaaaatatgaagaatgtggaaaagagcaagatggaaccctcagagtgtttcagataaggtctgttggtatctccataagcttttctcctatttggagaaaatagactctcactgaaactcttcaatgtttttaccctccatccttttcttagcaatctaaactcaatggcctcctgttccccaacactgcagtctgggcatctgactttgtcttccctctgcactcatttctgtgaatcatgaccaggatgaaactgatatccctagttcctcttccccatttcttctcacactcccctgcctgagaatcagttgagttcccaatacctcttccttcagtctctattcattatatggtctaggttgagacttccttggaagcagaacctgagtaccaggaactcatattttataaagtatatttattccttttagctgcaaactaacccagccatgttttagtgaatgctttaatctgaagatgactttgagctcattgaccatattaatctttcatcaaacaaactggatgttgtttcattaacaaaaaactcctccacaccaaggagtgtttagtaacttctgcacagaggactcatccatctcttgcttatgtttgggacagaaagacacttctctggctttttactggcttgaacccaatgggacagagactctctagaaagtttcagggctcacattcacttgtttgtccaaaaaatatttttgagtgtctcccaagtgccaaaccctggctactcccacctttgcctgagcccatgagcggtagtctgggggctggatgtgaggagttctgagttggctaggaagacacaaggcacaatggacatggggcaaagtccacttgctggacattggtcccttccacttccaagctgtccatcaggctgagagatctggaatgcataccccacactttgaagatgaggaagggcgagtttctcaaagtgtgtgtgtgtgtttctcttttaatctgtaatggtttctgcattttgaggtagaaacagaaatctcttttttgagtgggaccactcgggtgcggcttcttagtcttgttgatataataaagcacatgcccactcctcatggagtggagaggagaaaattctaagggaacgtactctgaatgcaaatgtttctgagattaaacacta

SEQ ID NO: 141444 - DNA, 732 bp, Homo sapiens
  Payload ID: 7807
  Gene Symbol: HRASLS5
  Gene Name: HRAS-like suppressor family, member 5
  ENST ID: ENST00000538712
  CDS Start-End: 676-732
tctctttggcagaggaactgaacccgctccagcacctagttccacaaccctctccattcatcccaagattttctgaggcctaaccaggggccaggcacgatgctagactagagctctgagcccactctccgtagcggtcaaggtgcttgctcgaactctcctttcacaggtctaaatagcatttccccccttgaattagaagaatccgtgggattcgcagcgttggtccagctcccagccaagcagcctccgccgggcacattagaacagggcagaagcatccagcaaggggagaaggctgtagttagcttggagaccacacccagccagaaagcagactggagttcaattccaaagcctgagaatgaaggcaagttaataaagcaagcagctgagggaaaaccaagacccagacctggagacctgattgagatttttcgaattggctatgagcactgggccatctatgtagaagatgattgcgtggtccatctggctcccccaagtgaggagtttgaggtgggcagcattacttccatctttagcaatcgggccgtggtgaaatacagtcgtctggaggatgtgctgcatggctgctcctggaaggtcaataacaagctagatgggacgtacctgcccttgccggtggacaagatcatccagcgtacaaaaaagatggtcaacaagatcgtgcagtacagcctgattgaagggaactgtgagcactttgtc

SEQ ID NO: 141445 - DNA, 1114 bp, Homo sapiens
  Payload ID: 7808
  Gene Symbol: HSCB
  Gene Name: HscB mitochondrial iron-sulfur cluster co-chaperone
  Uniprot ID: Q8IWL3
  ENST ID: ENST00000216027
  CDS Start-End: 66-773
gtctggttagacgctctctttgcttttccccacgagtgaccacggctagataggccgccggccagatgtggcgggggagagccggggctttgctccgggtgtgggggttttggccgacaggggttcccagaaggagaccgctaagctgcgatgctgcgtcgcaggcgggaagcaattatccccgctgttggaactgcggcggcccatggggccccgggcgggaggacaggttcttctgcccacagtgccgagcgctgcaggcacctgaccccactcgagactacttcagccttatggactgcaaccgttccttcagagttgatacagcgaagctccagcacaggtaccagcaactgcagcgtcttgtccacccagatttcttcagccagaggtctcagactgaaaaggacttctcagagaagcattcgaccctggtgaatgatgcctataagaccctcctggcccccctgagcagaggactgtaccttctaaagctccatggaatagagattcctgaaaggacagattatgaaatggacaggcaattcctcatagaaataatggaaatcaatgaaaaactcgcagaagctgaaagtgaagctgccatgaaagagattgaatccattgtcaaagctaaacagaaagaatttactgacaatgtgagcagtgcttttgaacaagatgactttgaagaagccaaggaaattttgacaaagatgagatacttttcaaatatagaagaaaagatcaagttaaagaagattcccctttaattgtggatagtttaaagtttaaaaaataaagttcttgctgggcacagtggctcacacctgtaatcccagcactttgggaggctgaggtgggtggatgacaaggtcaggagttcaagaccagcttggccaacatagtgaaaccccgtctctgctgaaaatacaaaaattagccgggcatggtggcgcgtgcctgtaatcccagctacttggtaggccgaggcaggagaatcgcttaaacccgtgaggtggaggttgcagtgagcagagatcacgcaactgcactccagcttgggcaacagagtgagacttaatcttgaaaaataaataaatgaaaaataaaa

SEQ ID NO: 141446 - DNA, 955 bp, Homo sapiens
  Payload ID: 7808
  Gene Symbol: HSCB
  Gene Name: HscB mitochondrial iron-sulfur cluster co-chaperone
  ENST ID: ENST00000398941
  CDS Start-End: 42-473
tttccccacgagtgaccacggctagataggccgccggccagatgtggcgggggagagccggggctttgctccgggtgtgggggttttggccgacaggggttcccagaaggagaccgctaagctgcgatgctgcgtcgcaggcgggaagcaattatccccgctgttggaactgcggcggcccatggggccccgggcgggaggacaggttcttctgcccacagtgccgagcgctgcaggcacctgaccccactcgagactacttcagccttatggactgcaaccgttccttcagagttgatacagcgaagctccagcacaggtaccagcaactgcagcgtcttgtccacccagatttcttcagccagaggtctcagactgaaaaggacttctcagagaagcattcgaccctggtgaatgatgcctataagaccctcctggcccccctgagcagaggactgtaccttgtaagctaaacagaaagaatttactgacaatgtgagcagtgcttttgaacaagatgactttgaagaagccaaggaaattttgacaaagatgagatacttttcaaatatagaagaaaagatcaagttaaagaagattcccctttaattgtggatagtttaaagtttaaaaaataaagttcttgctgggcacagtggctcacacctgtaatcccagcactttgggaggctgaggtgggtggatgacaaggtcaggagttcaagaccagcttggccaacatagtgaaaccccgtctctgctgaaaatacaaaaattagccgggcatggtggcgcgtgcctgtaatcccagctacttggtaggccgaggcaggagaatcgcttaaacccgtgaggtggaggttgcagtgagcagagatcacgcaactgcactccagcttgggcaacagagtgagacttaatcttgaaaaataaataaatgaaaaataaaattctt

SEQ ID NO: 141447 - DNA, 1048 bp, Homo sapiens
  Payload ID: 7808
  Gene Symbol: HSCB
  Gene Name: HscB mitochondrial iron-sulfur cluster co-chaperone
  ENST ID: ENST00000450178
  CDS Start-End: 55-372
cgctctctttgcttttccccacgagtgaccacggctagataggccgccggccagatgtggcgggggagagccggggctttgctccgggtgtgggggttttggccgacaggggttcccagaaggagaccgctaagctgcgatgctgcgtcgcaggcgggaagcaattatccccgctgttggaactgcggcggcccatggggccccgggcgggaggacaggttcttctgcccacagtgccgagcgctgcaggcacctgaccccactcgagactacttcagccttatggactgcaaccgttccttcagagttgatacagcgaagctccagcacagactgaaaaggacttctcagagaagcattcgaccctggtgaatgatgcctataagaccctcctggcccccctgagcagaggactgtaccttctaaagctccatggaatagagattcctgaaaggacagattatgaaatggacaggcaattcctcatagaaataatggaaatcaatgaaaaactcgcagaagctgaaagtgaagctgccatgaaagagattgaatccattgtcaaagctaaacagaaagaatttactgacaatgtgagcagtgcttttgaacaagatgactttgaagaagccaaggaaattttgacaaagatgagatacttttcaaatatagaagaaaagatcaagttaaagaagattcccctttaattgtggatagtttaaagtttaaaaaataaagttcttgctgggcacagtggctcacacctgtaatcccagcactttgggaggctgaggtgggtggatgacaaggtcaggagttcaagaccagcttggccaacatagtgaaaccccgtctctgctgaaaatacaaaaattagccgggcatggtggcgcgtgcctgtaatcccagctacttggtaggccgaggcaggagaatcgcttaaacccgtgaggtggaggttgcagtgagcagagatcacgcaactgcactccagcttgggcaacagagtgagacttaatcttgaaaaataaataaatgaaaaataaaa

SEQ ID NO: 141448 - DNA, 792 bp, Homo sapiens
  Payload ID: 7808
  Gene Symbol: HSCB
  Gene Name: HscB mitochondrial iron-sulfur cluster co-chaperone
  ENST ID: ENST00000420442
  CDS Start-End: 36-467
cacgagtgaccacggctagataggccgccggccagatgtggcgggggagagccggggctttgctccgggtgtgggggttttggccgacaggggttcccagaaggagaccgctaagctgcgatgctgcgtcgcaggcgggaagcaattatccccgctgttggaactgcggcggcccatggggccccgggcgggaggacaggttcttctgcccacagtgccgagcgctgcaggcacctgaccccactcgagactacttcagccttatggactgcaaccgttccttcagagttgatacagcgaagctccagcacaggtaccagcaactgcagcgtcttgtccacccagatttcttcagccagaggtctcagactgaaaaggacttctcagagaagcattcgaccctggtgaatgatgcctataagaccctcctggcccccctgagcagaggactgtaccttgtaagctaaagctccatggaatagagattcctgaaaggacagattatgaaatggacaggcaattcctcatagaaataatggaaatcaatgaaaaactcgcagaagctgaaagtgaagctgccatgaaagagattgaatccattgtcaaagctaaacagaaagaatttactgacaatgtgagcagtgcttttgaacaagatgactttgaagaagccaaggaaattttgacaaagatgagatacttttcaaatatagaagaaaagatcaagttaaagaagattcccctttaattgtggatagtttaaagtttaaaaaataaagttcttgctgggca

SEQ ID NO: 141449 - DNA, 1768 bp, Homo sapiens
  Payload ID: 7809
  Gene Symbol: HSPBP1
  Gene Name: HSPA (heat shock 70kDa) binding protein, cytoplasmic cochaperone 1
  Uniprot ID: Q9NZL4
  ENST ID: ENST00000255631
  CDS Start-End: 312-1391
cgctgaggtgcgaaaactgggccaggggcagggctttgaccagctacttgagcgtgaaggggcggcgcccgcacgaaggggcgtcccagcttggaggcggggcccggatgggaggggcggggccgagtgcagtatcccgccagatggcggcgcccagcagagtcaggtgcggacgactttgtctgtaggagcagcggcggcttgaggacccggggagaccctcaagaatcgacccatcaggacgccagagctgcttcagcggtgaccaccttctccctctaacacattcttcccttcttcacaaacggcccatgtcagacgaaggctcaagggggagccgcctgcccctggcgctgcccccggcctcccagggttgctcttcagggggcggcggcggcggctcctcggctgggggctcgggcaattcccggcccccacgcaacctccaaggcttgctgcagatggccatcaccgcgggctctgaagagccagaccctcctccagaaccgatgagtgaggagaggcgtcagtggctgcaggaggccatgtcggctgccttccgaggccagcgggaggaggtggagcagatgaagagctgcctccgagtgctgtcacagcccatgccccccactgctggggaggccgagcaggcggccgaccagcaagagcgagagggggccctggagctgctggccgacctgtgtgagaacatggacaatgccgcagacttctgccagctgtctggcatgcacctgctggtgggccggtacctggaggcgggggctgcgggactgcggtggcgggcggcacagctcatcggcacgtgcagtcagaacgtggcagccatccaggagcaggtgctgggcctgggtgccctgcgtaagctgctgcggctgctggaccgcgacgcctgcgacacggtgcgcgtcaaggccctcttcgccatctcctgtctggtccgagagcaggaggctgggctgctgcagttcctccgcctggacggcttctctgtgttgatgagggccatgcagcagcaggtgcagaagctcaaggtcaaatcagcattcctgctgcagaacctgctggtgggccaccctgaacacaaagggaccctgtgctccatggggatggtccagcagctggtggccctggtgcggacagagcacagccccttccacgagcacgtgcttggagccctgtgcagcctggtgacagactttccgcagggtgtgcgcgagtgtcgggagccggaactgggcctggaggagctcctccgccaccgctgtcagctgctgcagcagcatgaggagtaccaggaggagctggagttctgtgaaaagctgctacagacctgtttctccagcccagcggacgacagcatggatcggtgaaaccaggtggcttcttgcccccttctccgtgggaaccccaggcctcttgcctccctccccacctacaaggccctctcccaagggatcgcagggcctaggtgcctggacccagggtgtgccagcccgtctctgtgcagtccctggaaggggcgctgagaaaggcaccagctccttggaccccacctcccatgctctcactctcatccccgttctcttgtccacacagctcttccaataaaggtgtttctcttcctccttctcctccttcactgccgcctttgtcatctcctttggagggtgcatgggggacgggaggaggggcacgggtttaagggacttggggagccactggaagaataataaaagtgttgctcttt

SEQ ID NO: 141450 - DNA, 1572 bp, Homo sapiens
  Payload ID: 7809
  Gene Symbol: HSPBP1
  Gene Name: HSPA (heat shock 70kDa) binding protein, cytoplasmic cochaperone 1
  Uniprot ID: Q9NZL4
  ENST ID: ENST00000433386
  CDS Start-End: 238-1317
aaccacggcacgaagttgggtgggtacgcctggcacttccgggtgaaaccgtgcgtatttccggttaagatggcggcgcccagcagagtcaggtgcggacgactttgtctgtaggagcagcggcggcttgaggacccggggagaccctcaagaatcgacccatcaggacgccagagctgcttcagcggtgaccaccttctccctctaacacattcttcccttcttcacaaacggcccatgtcagacgaaggctcaagggggagccgcctgcccctggcgctgcccccggcctcccagggttgctcttcagggggcggcggcggcggctcctcggctgggggctcgggcaattcccggcccccacgcaacctccaaggcttgctgcagatggccatcaccgcgggctctgaagagccagaccctcctccagaaccgatgagtgaggagaggcgtcagtggctgcaggaggccatgtcggctgccttccgaggccagcgggaggaggtggagcagatgaagagctgcctccgagtgctgtcacagcccatgccccccactgctggggaggccgagcaggcggccgaccagcaagagcgagagggggccctggagctgctggccgacctgtgtgagaacatggacaatgccgcagacttctgccagctgtctggcatgcacctgctggtgggccggtacctggaggcgggggctgcgggactgcggtggcgggcggcacagctcatcggcacgtgcagtcagaacgtggcagccatccaggagcaggtgctgggcctgggtgccctgcgtaagctgctgcggctgctggaccgcgacgcctgcgacacggtgcgcgtcaaggccctcttcgccatctcctgtctggtccgagagcaggaggctgggctgctgcagttcctccgcctggacggcttctctgtgttgatgagggccatgcagcagcaggtgcagaagctcaaggtcaaatcagcattcctgctgcagaacctgctggtgggccaccctgaacacaaagggaccctgtgctccatggggatggtccagcagctggtggccctggtgcggacagagcacagccccttccacgagcacgtgcttggagccctgtgcagcctggtgacagactttccgcagggtgtgcgcgagtgtcgggagccggaactgggcctggaggagctcctccgccaccgctgtcagctgctgcagcagcatgaggagtaccaggaggagctggagttctgtgaaaagctgctacagacctgtttctccagcccagcggacgacagcatggatcggtgaaaccaggtggcttcttgcccccttctccgtgggaaccccaggcctcttgcctccctccccacctacaaggccctctcccaagggatcgcagggcctaggtgcctggacccagggtgtgccagcccgtctctgtgcagtccctggaaggggcgctgagaaaggcaccagctccttggaccccacctcccatgctctcactctcatccccgttctcttgtccacacagctcttccaataaaggtgtttctcttcctc

SEQ ID NO: 141451 - DNA, 557 bp, Homo sapiens
  Payload ID: 7809
  Gene Symbol: HSPBP1
  Gene Name: HSPA (heat shock 70kDa) binding protein, cytoplasmic cochaperone 1
  ENST ID: ENST00000585698
  CDS Start-End: 145-557
gttgctagggagaaaggagaggcttatgactttggggaagggtcctgtggaccctcaagaatcgacccatcaggacgccagagctgcttcagcggtgaccaccttctccctctaacacattcttcccttcttcacaaacggcccatgtcagacgaaggctcaagggggagccgcctgcccctggcgctgcccccggcctcccagggttgctcttcagggggcggcggcggcggctcctcggctgggggctcgggcaattcccggcccccacgcaacctccaaggcttgctgcagatggccatcaccgcgggctctgaagagccagaccctcctccagaaccgatgagtgaggagaggcgtcagtggctgcaggaggccatgtcggctgccttccgaggccagcgggaggaggtggagcagatgaagagctgcctccgagtgctgtcacagcccatgccccccactgctggggaggccgagcaggcggccgaccagcaagagcgagagggggccctggagctgctggccgacctgtgtgagaacatggacaatgccgc

SEQ ID NO: 141452 - DNA, 884 bp, Homo sapiens
  Payload ID: 7809
  Gene Symbol: HSPBP1
  Gene Name: HSPA (heat shock 70kDa) binding protein, cytoplasmic cochaperone 1
  ENST ID: ENST00000593263
  CDS Start-End: 243-884
gactttgtctgtaggagcagcggcggcttgaggacccggggaggtgagatccgccttattccggcgcccctcttcggagaggagggagaagacttgttgctaaggagaccaaagggcgggcttgttgctacggaggcggagcagtgagaccctcaagaatcgacccatcaggacgccagagctgcttcagcggtgaccaccttctccctctaacacattcttcccttcttcacaaacggcccatgtcagacgaaggctcaagggggagccgcctgcccctggcgctgcccccggcctcccagggttgctcttcagggggcggcggcggcggctcctcggctgggggctcgggcaattcccggcccccacgcaacctccaaggcttgctgcagatggccatcaccgcgggctctgaagagccagaccctcctccagaaccgatgagtgaggagaggcgtcagtggctgcaggaggccatgtcggctgccttccgaggccagcgggaggaggtggagcagatgaagagctgcctccgagtgctgtcacagcccatgccccccactgctggggaggccgagcaggcggccgaccagcaagagcgagagggggccctggagctgctggccgacctgtgtgagaacatggacaatgccgcagacttctgccagctgtctggcatgcacctgctggtgggccggtacctggaggcgggggctgcgggactgcggtggcgggcggcacagctcatcggcacgtgcagtcagaacgtggcagccatccaggagcaggtgctgggcctgggtgccctgcgtaagctgctgcggctgctggaccgcgacgcctgcgacacggtgcgcgtcaaggccctcttcgccatctcctgt

SEQ ID NO: 141453 - DNA, 666 bp, Homo sapiens
  Payload ID: 7809
  Gene Symbol: HSPBP1
  Gene Name: HSPA (heat shock 70kDa) binding protein, cytoplasmic cochaperone 1
  ENST ID: ENST00000585927
  CDS Start-End: 97-666
agaccctcaagaatcgacccatcaggacgccagagctgcttcagcggtgaccaccttctccctctaacacattcttcccttcttcacaaacggcccatgtcagacgaaggctcaagggggagccgcctgcccctggcgctgcccccggcctcccagggttgctcttcagggggcggcggcggcggctcctcggctgggggctcgggcaattcccggcccccacgcaacctccaaggcttgctgcagatggccatcaccgcgggctctgaagagccagaccctcctccagaaccgatgagtgaggagatgaagagctgcctccgagtgctgtcacagcccatgccccccactgctggggaggccgagcaggcggccgaccagcaagagcgagagggggccctggagctgctggccgacctgtgtgagaacatggacaatgccgcagacttctgccagctgtctggcatgcacctgctggtgggccggtacctggaggcgggggctgcgggactgcggtggcgggcggcacagctcatcggcacgtgcagtcagaacgtggcagccatccaggagcaggtgctgggcctgggtgccctctgctgcagcagcatgaggagtaccaggaggagctggagttctgtgaaaagctgctacagacctgtttct

SEQ ID NO: 141454 - DNA, 424 bp, Homo sapiens
  Payload ID: 7809
  Gene Symbol: HSPBP1
  Gene Name: HSPA (heat shock 70kDa) binding protein, cytoplasmic cochaperone 1
  ENST ID: ENST00000587959
  CDS Start-End: 133-424
cgacccatcaggacgccagagctgcttcagcggtgaccaccttctccctctaacacattcttcccttcttcacaaacggcccatcaagagcgagagggggccctggagctgctggccgacctgtgtgagaacatggacaatgccgcagacttctgccagctgtctggcatgcacctgctggtgggccggtacctggaggcgggggctgcgggactgcggtggcgggcggcacagctcatcggcacgtgcagtcagaacgtggcagccatccaggagcaggtgctgggcctgggtgccctgcgtaagctgctgcggctgctggaccgcgacgcctgcgacacggtgcgcgtcaaggccctcttcgccatctcctgtctggtccgagagcaggaggctgggctgctgcagttcctccgcctggacg

SEQ ID NO: 141455 - DNA, 1449 bp, Homo sapiens
  Payload ID: 7809
  Gene Symbol: HSPBP1
  Gene Name: HSPA (heat shock 70kDa) binding protein, cytoplasmic cochaperone 1
  Uniprot ID: Q9NZL4
  ENST ID: ENST00000587922
  CDS Start-End: 249-1328
gttgctagggagaaaggagaggcttatgactttggggaagggtcctgtgggtatgaaggaaggaaaaggggctgtggttaagtgggctgggggcagagtggtttggggtcatggggggtcgccgagctcccctgaaacgccgccttctcagcagaccctcaagaatcgacccatcaggacgccagagctgcttcagcggtgaccaccttctccctctaacacattcttcccttcttcacaaacggcccatgtcagacgaaggctcaagggggagccgcctgcccctggcgctgcccccggcctcccagggttgctcttcagggggcggcggcggcggctcctcggctgggggctcgggcaattcccggcccccacgcaacctccaaggcttgctgcagatggccatcaccgcgggctctgaagagccagaccctcctccagaaccgatgagtgaggagaggcgtcagtggctgcaggaggccatgtcggctgccttccgaggccagcgggaggaggtggagcagatgaagagctgcctccgagtgctgtcacagcccatgccccccactgctggggaggccgagcaggcggccgaccagcaagagcgagagggggccctggagctgctggccgacctgtgtgagaacatggacaatgccgcagacttctgccagctgtctggcatgcacctgctggtgggccggtacctggaggcgggggctgcgggactgcggtggcgggcggcacagctcatcggcacgtgcagtcagaacgtggcagccatccaggagcaggtgctgggcctgggtgccctgcgtaagctgctgcggctgctggaccgcgacgcctgcgacacggtgcgcgtcaaggccctcttcgccatctcctgtctggtccgagagcaggaggctgggctgctgcagttcctccgcctggacggcttctctgtgttgatgagggccatgcagcagcaggtgcagaagctcaaggtcaaatcagcattcctgctgcagaacctgctggtgggccaccctgaacacaaagggaccctgtgctccatggggatggtccagcagctggtggccctggtgcggacagagcacagccccttccacgagcacgtgcttggagccctgtgcagcctggtgacagactttccgcagggtgtgcgcgagtgtcgggagccggaactgggcctggaggagctcctccgccaccgctgtcagctgctgcagcagcatgaggagtaccaggaggagctggagttctgtgaaaagctgctacagacctgtttctccagcccagcggacgacagcatggatcggtgaaaccaggtggcttcttgcccccttctccgtgggaaccccaggcctcttgcctccctccccacctacaaggccctctcccaagggatcgcagggcctaggtgcctggacccagggtgtgcca

SEQ ID NO: 141456 - DNA, 536 bp, Homo sapiens
  Payload ID: 7809
  Gene Symbol: HSPBP1
  Gene Name: HSPA (heat shock 70kDa) binding protein, cytoplasmic cochaperone 1
  ENST ID: ENST00000587551
  CDS Start-End: 442-536
aaaagtatcgggggcgggactcgctgaggtgcgaaaactgggccaggggcagggctttgaccagctacttgagcgtgaaggggcggcgcccgcacgaaggggcgtcccagcttggaggcggggcccggatgggaggggcggggccgagtgcagtatcccgccaggtgagaaggggataagagtcgggcaagcagcttcagccgcaaccacggcacgaagttgggtgggtacgcctggcacttccgggtgaaaccgtgcgtatttccggttaagatggcggcgcccagcagagtcaggtgcggacgactttgtctgtaggagcagcggcggcttgaggacccggggagaccctcaagaatcgacccatcaggacgccagagctgcttcagcggtgaccaccttctccctctaacacattcttcccttcttcacaaacggcccatgtcagacgaaggctcaagggggagccgcctgcccctggcgctgcccccggcctcccagggttgctcttcagggggcggcggcggcggctcctc

SEQ ID NO: 141457 - DNA, 696 bp, Homo sapiens
  Payload ID: 7809
  Gene Symbol: HSPBP1
  Gene Name: HSPA (heat shock 70kDa) binding protein, cytoplasmic cochaperone 1
  ENST ID: ENST00000588971
  CDS Start-End: 287-696
cagggctttgaccagctacttgagcgtgaaggggcggcgcccgcacgaaggggcgtcccagcttggaggcggggcccggatgggaggggcggggccgagtgcagtatcccgccagatggcggcgcccagcagagtcaggtgcggacgactttgtctgtaggagcagcggcggcttgaggacccggggagcagaccctcaagaatcgacccatcaggacgccagagctgcttcagcggtgaccaccttctccctctaacacattcttcccttcttcacaaacggcccatgtcagacgaaggctcaagggggagccgcctgcccctggcgctgcccccggcctcccagggttgctcttcagggggcggcggcggcggctcctcggctgggggctcgggcaattcccggcccccacgcaacctccaaggcttgctgcagatggccatcaccgcgggctctgaagagccagaccctcctccagaaccgatgagtgaggagaggcgtcagtggctgcaggaggccatgtcggctgccttccgaggccagcgggaggaggtggagcagatgaagagctgcctccgagtgctgtcacagcccatgccccccactgctggggaggccgagcaggcggccgaccagcaagagcgagagggggccctggagctgctggccgacctgtgtgagaacatggacaatgc

SEQ ID NO: 141458 - DNA, 1953 bp, Homo sapiens
  Payload ID: 7810
  Gene Symbol: HSPBAP1
  Gene Name: HSPB (heat shock 27kDa) associated protein 1
  Uniprot ID: Q96EW2
  ENST ID: ENST00000306103
  CDS Start-End: 145-1611
ccggcgtttccgtaggagccgggcgggagtcgccggggctccttcctgtggtgcagcttcgggtctcggagtttggcccctactctgaccccaccccagctccgctccgccttgggttccggcagaacccgccttgcggtagccatggcagcaggctccgaggcgaccactcctgtgatcgttgcggctggggctggaggggaggaaggtgaacatgtcaaaccttttaagccagagaaagcaaaagaaattatcatgtctttacaacaacctgcaatcttctgtaacatggtgtttgattggccagcacgacactggaatgctaaatacctttcgcaggtccttcatggcaagcagatacgattcagaatggggatgaaaagcatgagcacagttcctcagtttgaaactacatgtaattacgtagaagctacactcgaagagtttctgacctggaactgtgaccagtctagtatttctggaccatttagagattatgaccattccaagttctgggcttatgctgactataaatattttgtcagtctatttgaagacaagacagatcttttccaggatgtgaaatggtctgacttcgggtttcctggaagaaatggacaggaaagtacattgtggattggctccttgggagcccacacaccctgtcatctggactcctatggttgtaacttggtattccaggtacaaggaaggaaacgatggcatctctttcctcctgaagatactcctttcctttatccaactagaatcccttatgaagaatctagtgtgttcagtaaaatcaatgttgtcaatcctgatttaaagcgttttcctcagttccggaaagctcaaagacatgcggttacactgagcccaggacaggttctctttgttcccagacactggtggcattacgtagaatccattgatcctgtcactgtcagtataaactcatggattgaactggaagaggatcacctagcccgggtagaagaggcaatcacccgtatgcttgtgtgtgccctgaaaactgcagagaatccacaaaataccagagcctggttaaaccccactgaggttgaggaaacgtcccatgcagtcaactgttgctacttaaatgcagctgtttctgcattttttgatcgctgcagaacatctgaggtagtagaaatccaagcactgagaacagatggagagcacatgaaaaaggaagaattaaatgtgtgcaaccacatggaggtgggccaaacaggtagccagaacttgaccacaggaacagacaaaccggaggcagcaagtccctttggccctgatctggtccctgtagcacagaggtccgaagaaccgccttcagaaagaggaggcatatttggaagtgatgggaaagactttgtggacaaggatggagaacactttggaaaattgcattgtgccaagagacaacaaataatgagcaacagtgaaaatgcaattgaggaacagattgcctcaaatactactacgactcctcaaacattcatttctacggatgacttgctggactgcttggtgaatccacaagtaaccaggatagtggcacaacttttgatacaaggaagaagtttatgattcaagtggaagatgacttttaaaataatattttttaaatatatatttttaagtagtatgactaaaataaagatgaaccagcaaaaggtcagtttgcacatttgtaaatgtatttatccttaccgaattacatgtcagtctgttgccaccttctttcatgcacattcctctttggccaaactggctgctctttgtttgtaagcttttgttcctctctcatcccatacttttagcctgtgtcaaatgtaagtcccaagtatttccagcaggaagtaatgtcttcctcagcctcaaccagggaccaaccggctgcttacttttgcaaataaaattttactagaa

SEQ ID NO: 141459 - DNA, 1521 bp, Homo sapiens
  Payload ID: 7811
  Gene Symbol: HSPB2-C11orf52
  Gene Name: HSPB2-C11orf52 readthrough (NMD candidate)
  ENST ID: ENST00000534100
  CDS Start-End: 89-247
gagccctggctctccgggcagctggaggggtcgcgctgcgcctgttggggctgcacctcggaccagggcttctgctgcatctgcagccatgtcgggccgctcagtgccacatgcccacccggccaccgccgagtacgaatttgccaacccgagccgcctgggtgagcagcgcttcggagaaggtttctttttattgaagcttgaagctcaagttcatggcttcatcaaaagacgcttcaaatcctgaagttgagatagctctcacctggagcccgtgtgttgttctaccctttggctgggaacacagtcacctgggaatcattccagcaggtggcttcaaaagtccaacctgctaggttgaaatctgacactgacacagactccgggagctgccgcggaaagctcaaccaggaacccggaaatgcacaagcctcttgatgcataaaaacagctgggctcccttggagacagagcgccatgggaaaccgggtctgctgcggaggaagctggagctgcccatcaactttccagaagaaaaagaaaacaggaagccaaacaagacggacactgaagccgcagccacaacagctgcagcagaatctcccaaagggccatgaaacaacaggacatacgtatgaacgggtgttacagcagcaagggtctcaagagaggagtccaggcctcatgtcggaagacagcaacttacattatgctgacattcaagtgtgcagccgtccccatgcccgggaagtgaaacacgtgcatttagaaaacgctacagagtatgcgacccttcgcttcccccaggccacacctcgctatgacagcaagaacgggaccctggtgtgagcgcttgggaggaaggcccagtccatcgttaaccactacacctgtgggggagaacctactgctttggggaattgggtggcaacccagggatgttgtccacgttttaagcttaaagaactccaaagcccctggaattgtgggcgtcccattttctcccctggcctcttacttgccactgttaggttggagttaatagttggtttagctatgggtggatagctaaacttagctatccacatgaggttaggtggagtgtgcagggaggtaggtcttcgaccccaccattgttgctcctgctcttgcaaagtgcagaaagagcaggtaaaaagttagcccataagcacgtgggctgatcttgttggactttaattaatggtatcctttttcacacaccttaaactccaaagctgaaggggaggtgctccggaaaagcattctgagcttttacattcagacactagggctggcttgggccatttcctcagtggctgagtcaggttccagaccttaacagacaaatgggggaagggggctgaggcgtggaggaaacgctttcaggacctcaagtcagtgataaccgacagcacagtgaggcctggaaacttccctcggagggactgttggctctcgcaggtgcggggccgctaggatcaataaacggcctgagaaaca

SEQ ID NO: 141460 - DNA, 892 bp, Homo sapiens
  Payload ID: 7811
  Gene Symbol: HSPB2-C11orf52
  Gene Name: HSPB2-C11orf52 readthrough (NMD candidate)
  ENST ID: ENST00000527616
  CDS Start-End: 95-643
cctatcgagccctggctctccgggcagctggaggggtcgcgctgcgcctgttggggctgcacctcggaccagggcttctgctgcatctgcagccatgtcgggccgctcagtgccacatgcccacccggccaccgccgagtacgaatttgccaacccgagccgcctgggtgagcagcgcttcggagaaggcctcctgccagaagagatcctgacccccacactctaccatggctactatgtccggcctcgggccgccccagctggggagggcagcagggcaggggcctccgagcttaggctcagtgagggcaagttccaggcatttctggatgtgagccactttaccccagacgaggtgactgtgaggactgtggataacctgctggaggtgtctgcccggcacccccagcgcctggaccgccacggcttcgtgtcccgagagttctgccgcacctatgtcctgcctgctgatgtcgacccctggcgagtccgagctgctctctcccatgatggcatcttaaacctggaagcacctcggggtggccgacatttggacacagaggtcaatgaggtctacatctccctgctccctgcgcctcctgatccagaggaagaggaggaggcagccatagttgagccctgattgccacagacccagcacccagcaaatccctctctacctcccaaggtgatatgggcagctgcccaccactccagaggtttctttttattgaagcttgaagctcaagttcatggcttcatcaaaagacgcttcaaatcctgaagttgagatagctctcacctggagcccgtgtgttgttctaccctttggctgggaacacagtcacctgggaatcattccagcaggtggcttcaaaagtccaacctgcta

SEQ ID NO: 141461 - DNA, 890 bp, Homo sapiens
  Payload ID: 7812
  Gene Symbol: HSPE1-MOB4
  Gene Name: HSPE1-MOB4 readthrough
  ENST ID: ENST00000604458
  CDS Start-End: 25-810
tacgagtctgaggcggagggagtaatggcaggacaagcgtttagaaagtttcttccactctttgaccgagtattggttgaaaggagtgctgctgaaactgtaaccaaaggaggcattatgcttccagaaaaatctcaaggaaaagtattgcaagcaacagtagtcgctgttggatcgggttctaaaggaaaggatttctataattggcctgatgaatcctttgatgaaatggacagtacactagctgttcaacagtatattcaacagaacataagagcagattgctccaatattgacaaaattcttgaaccacctgaaggccaagatgaaggtgtgtggaagtatgaacatttaaggcagttctgccttgagctaaatggacttgctgtcaaacttcagagtgaatgccatccagatacttgcactcaaatgacagcaactgaacaatggatttttctttgtgcagctcataaaactccaaaagagtgtcctgctatagactatactagacacacacttgatggtgctgcatgtcttctgaatagcaataaatattttcccagcagggttagcataaaggaatcatctgtagcgaaactaggatcagtatgccgtaggatttacagaatattttcacatgcttattttcatcatcggcagatatttgatgaatatgaaaatgaaacatttttgtgtcatcggtttactaagtttgtgatgaaatacaatttgatgtccaaggataacctgattgtaccaattttagaagaggaagtacagaattcagtttctggggaaagtgaagcatgaagggaatcataggaaaaatgtactgatcatataattaacattatgtactgtatatatcattttagacacatcaatcatgt

SEQ ID NO: 141462 - DNA, 2120 bp, Homo sapiens
  Payload ID: 7813
  Gene Symbol: HTRA1
  Gene Name: HtrA serine peptidase 1
  Uniprot ID: Q92743
  ENST ID: ENST00000368984
  CDS Start-End: 129-1571
caatgggctgggccgcgcggccgcgcgcactcgcacccgctgcccccgaggccctcctgcactctccccggcgccgctctccggccctcgccctgtccgccgccaccgccgccgccgccagagtcgccatgcagatcccgcgcgccgctcttctcccgctgctgctgctgctgctggcggcgcccgcctcggcgcagctgtcccgggccggccgctcggcgcctttggccgccgggtgcccagaccgctgcgagccggcgcgctgcccgccgcagccggagcactgcgagggcggccgggcccgggacgcgtgcggctgctgcgaggtgtgcggcgcgcccgagggcgccgcgtgcggcctgcaggagggcccgtgcggcgaggggctgcagtgcgtggtgcccttcggggtgccagcctcggccacggtgcggcggcgcgcgcaggccggcctctgtgtgtgcgccagcagcgagccggtgtgcggcagcgacgccaacacctacgccaacctgtgccagctgcgcgccgccagccgccgctccgagaggctgcaccggccgccggtcatcgtcctgcagcgcggagcctgcggccaagggcaggaagatcccaacagtttgcgccataaatataactttatcgcggacgtggtggagaagatcgcccctgccgtggttcatatcgaattgtttcgcaagcttccgttttctaaacgagaggtgccggtggctagtgggtctgggtttattgtgtcggaagatggactgatcgtgacaaatgcccacgtggtgaccaacaagcaccgggtcaaagttgagctgaagaacggtgccacttacgaagccaaaatcaaggatgtggatgagaaagcagacatcgcactcatcaaaattgaccaccagggcaagctgcctgtcctgctgcttggccgctcctcagagctgcggccgggagagttcgtggtcgccatcggaagcccgttttcccttcaaaacacagtcaccaccgggatcgtgagcaccacccagcgaggcggcaaagagctggggctccgcaactcagacatggactacatccagaccgacgccatcatcaactatggaaactcgggaggcccgttagtaaacctggacggtgaagtgattggaattaacactttgaaagtgacagctggaatctcctttgcaatcccatctgataagattaaaaagttcctcacggagtcccatgaccgacaggccaaaggaaaagccatcaccaagaagaagtatattggtatccgaatgatgtcactcacgtccagcaaagccaaagagctgaaggaccggcaccgggacttcccagacgtgatctcaggagcgtatataattgaagtaattcctgataccccagcagaagctggtggtctcaaggaaaacgacgtcataatcagcatcaatggacagtccgtggtctccgccaatgatgtcagcgacgtcattaaaagggaaagcaccctgaacatggtggtccgcaggggtaatgaagatatcatgatcacagtgattcccgaagaaattgacccataggcagaggcatgagctggacttcatgtttccctcaaagactctcccgtggatgacggatgaggactctgggctgctggaataggacactcaagacttttgactgccattttgtttgttcagtggagactccctggccaacagaatccttcttgatagtttgcaggcaaaacaaatgtaatgttgcagatccgcaggcagaagctctgcccttctgtatcctatgtatgcagtgtgctttttcttgccagcttgggccattcttgcttagacagtcagcatttgtctcctcctttaactgagtcatcatcttagtccaactaatgcagtcgatacaatgcgtagatagaagaagccccacgggagccaggatgggactggtcgtgtttgtgcttttctccaagtcagcacccaaaggtcaatgcacagagaccccgggtgggtgagcgctggcttctcaaacggccgaagttgcctcttttaggaatctctttggaattgggagcacgatgactctgagtttgagctattaaagtacttcttacacattgc

SEQ ID NO: 141463 - DNA, 1214 bp, Homo sapiens
  Payload ID: 7813
  Gene Symbol: HTRA1
  Gene Name: HtrA serine peptidase 1
  ENST ID: ENST00000420892
  CDS Start-End: 1-666
ggcaagctgcctgtcctgctgcttggccgctcctcagagctgcggccgggagagttcgtggtcgccatcggaagcccgttttcccttcaaaacacagtcaccaccgggatcgtgagcaccacccagcgaggcggcaaagagctggggctccgcaactcagacatggactacatccagaccgacgccatcatcaactatggaaactcgggaggcccgttagtaaacctggacggtgaagtgattggaattaacactttgaaagtgacagctggaatctcctttgcaatcccatctgataagattaaaaagttcctcacggagtcccatgaccgacaggccaaaggaaaagccatcaccaagaagaagtatattggtatccgaatgatgtcactcacgtccagcaaagccaaagagctgaaggaccggcaccgggacttcccagacgtgatctcaggagcgtatataattgaagtaattcctgataccccagcagaagctggtggtctcaaggaaaacgacgtcataatcagcatcaatggacagtccgtggtctccgccaatgatgtcagcgacgtcattaaaagggaaagcaccctgaacatggtggtccgcaggggtaatgaagatatcatgatcacagtgattcccgaagaaattgacccataggcagaggcatgagctggacttcatgtttccctcaaagactctcccgtggatgacggatgaggactctgggctgctggaataggacactcaagacttttgactgccattttgtttgttcagtggagactccctggccaacagaatccttcttgatagtttgcaggcaaaacaaatgtaatgttgcagatccgcaggcagaagctctgcccttctgtatcctatgtatgcagtgtgctttttcttgccagcttgggccattcttgcttagacagtcagcatttgtctcctcctttaactgagtcatcatcttagtccaactaatgcagtcgatacaatgcgtagatagaagaagccccacgggagccaggatgggactggtcgtgtttgtgcttttctccaagtcagcacccaaaggtcaatgcacagagaccccgggtgggtgagcgctggcttctcaaacggccgaagttgcctcttttaggaatctctttggaattgggagcacgatgactctgagtttgagctattaaagtacttcttacacattg

SEQ ID NO: 141464 - DNA, 2370 bp, Homo sapiens
  Payload ID: 7814
  Gene Symbol: HTRA2
  Gene Name: HtrA serine peptidase 2
  Uniprot ID: O43464
  ENST ID: ENST00000258080
  CDS Start-End: 631-2007
tctggcagcgcgcagctgaccaggaagacgtggatcccgagaaagaggcgcaggacgaggaggcagaacccgactggcgcgtagagcagcagcacgagcagtaggaagcagtcacccggaagcctgggggcgagaggcgaagtggtcaggcgccgaaggccgagagcacgcggggatcggtctcttcccgccgggtctcttaccggtgcgagtcaaagagccgctccggccccggccctgagggaagctccataactgctgcttcaggagcgcccggccgtcgccgccgccgccattttcgcgcccggccgcaggggctcttgggaaggcggagtctttgggcatccgcccggggtgaggggacccgaagtcctgaggcgcgccggaagggctagcggtcccagcataccccgcggccccttgggccgtctcacaactcgcgtccggcggagaccacaattcccggcattcgtggggcagggaggagtcggcctcccggaatcctggtcccggcgtgcacttctgaaggacttcaggtaccggcgtgccccgcgtcctactgtccgcctgctcgcgtcctgggtgccgcctctgagtagggcgggcgaggaggcagccaaggcggagctgatggctgcgccgagggcggggcggggtgcaggctggagccttcgggcatggcgggctttggggggcattcgctgggggaggagaccccgtttgacccctgacctccgggccctgctgacgtcaggaacttctgacccccgggcccgagtgacttatgggacccccagtctctgggcccggttgtctgttggggtcactgaaccccgagcatgcctgacgtctgggaccccgggtccccgggcacaactgactgcggtgaccccagataccaggacccgggaggcctcagagaactctggaacccgttcgcgcgcgtggctggcggtggcgctgggcgctgggggggcagtgctgttgttgttgtggggcgggggtcggggtcctccggccgtcctcgccgccgtccctagcccgccgcccgcttctccccggagtcagtacaacttcatcgcagatgtggtggagaagacagcacctgccgtggtctatatcgagatcctggaccggcaccctttcttgggccgcgaggtccctatctcgaacggctcaggattcgtggtggctgccgatgggctcattgtcaccaacgcccatgtggtggctgatcggcgcagagtccgtgtgagactgctaagcggcgacacgtatgaggccgtggtcacagctgtggatcccgtggcagacatcgcaacgctgaggattcagactaaggagcctctccccacgctgcctctgggacgctcagctgatgtccggcaaggggagtttgttgttgccatgggaagtccctttgcactgcagaacacgatcacatccggcattgttagctctgctcagcgtccagccagagacctgggactcccccaaaccaatgtggaatacattcaaactgatgcagctattgattttggaaactctggaggtcccctggttaacctggatggggaggtgattggagtgaacaccatgaaggtcacagctggaatctcctttgccatcccttctgatcgtcttcgagagtttctgcatcgtggggaaaagaagaattcctcctccggaatcagtgggtcccagcggcgctacattggggtgatgatgctgaccctgagtcccagcatccttgctgaactacagcttcgagaaccaagctttcccgatgttcagcatggtgtactcatccataaagtcatcctgggctcccctgcacaccgggctggtctgcggcctggtgatgtgattttggccattggggagcagatggtacaaaatgctgaagatgtttatgaagctgttcgaacccaatcccagttggcagtgcagatccggcggggacgagaaacactgaccttatatgtgacccctgaggtcacagaatgaatagatcaccaagagtatgaggctcctgctctgatttcctccttgcctttctggctgaggttctgagggcaccgagacagagggttaaatgaaccagtgggggcaggtccctccaaccaccagcactgactcctgggctctgaagaatcacagaaacactttttatataaaataaaattatacctagcaacatattatagtaaaaaatgaggtgggagggctggatcttttcccccaccaaaaggctagaggtaaagctgtatccccctaaacttaggggagatactggagctgaccatcctgacctcctattaaagaaaatgagctgctgccatcttttgtgggcagttagtcaggtgctgc

SEQ ID NO: 141465 - DNA, 1450 bp, Homo sapiens
  Payload ID: 7814
  Gene Symbol: HTRA2
  Gene Name: HtrA serine peptidase 2
  Uniprot ID: O43464
  ENST ID: ENST00000352222
  CDS Start-End: 18-1103
cagccaaggcggagctgatggctgcgccgagggcggggcggggtgcaggctggagccttcgggcatggcgggctttggggggcattcgctgggggaggagaccccgtttgacccctgacctccgggccctgctgacgtcaggaacttctgacccccgggcccgagtgacttatgggacccccagtctctgggcccggttgtctgttggggtcactgaaccccgagcatgcctgacgtctgggaccccgggtccccgggcacaactgactgcggtgaccccagataccaggacccgggaggcctcagagaactctggaacccgttcgcgcgcgtggctggcggtggcgctgggcgctgggggggcagtgctgttgttgttgtggggcgggggtcggggtcctccggccgtcctcgccgccgtccctagcccgccgcccgcttctccccggagtcagtacaacttcatcgcagatgtggtggagaagacagcacctgccgtggtctatatcgagatcctggaccggcaccctttcttgggccgcgaggtccctatctcgaacggctcaggattcgtggtggctgccgatgggctcattgtcaccaacgcccatgtggtggctgatcggcgcagagtccgtgtgagactgctaagcggcgacacgtatgaggccgtggtcacagctgtggatcccgtggcagacatcgcaacgctgaggattcagactaagtttggaaactctggaggtcccctggttaacctggatggggaggtgattggagtgaacaccatgaaggtcacagctggaatctcctttgccatcccttctgatcgtcttcgagagtttctgcatcgtggggaaaagaagaattcctcctccggaatcagtgggtcccagcggcgctacattggggtgatgatgctgaccctgagtcccagggctggtctgcggcctggtgatgtgattttggccattggggagcagatggtacaaaatgctgaagatgtttatgaagctgttcgaacccaatcccagttggcagtgcagatccggcggggacgagaaacactgaccttatatgtgacccctgaggtcacagaatgaatagatcaccaagagtatgaggctcctgctctgatttcctccttgcctttctggctgaggttctgagggcaccgagacagagggttaaatgaaccagtgggggcaggtccctccaaccaccagcactgactcctgggctctgaagaatcacagaaacactttttatataaaataaaattatacctagcaacatattatagtaaaaaatgaggtgggagggctggatcttttcccccaccaaaaggctagaggtaaagctgtatccccctaaacttaggggagatactggagctgaccatcctgacctcctattaaagaaaatgagctgctgccatcttttgtgggca

SEQ ID NO: 141466 - DNA, 1479 bp, Homo sapiens
  Payload ID: 7814
  Gene Symbol: HTRA2
  Gene Name: HtrA serine peptidase 2
  ENST ID: ENST00000437202
  CDS Start-End: 1-1272
cttcgggcatggcgggctttggggggcattcgctgggggaggagaccccgtttgacccctgacctccgggccctgctgacgtcaggaacttctgacccccgggcccgagtgacttatgggacccccagtctctgggcccggttgtctgttggggtcactgaaccccgagcatgcctgacgtctgggaccccgggtccccgggcacaactgactgcggtgaccccagataccaggacccgggaggcctcagagaactctggaacccgttcgcgcgcgtggctggcggtggcgctgggcgctgggggggcagtgctgttgttgttgtggggcgggggtcggggtcctccggccgtcctcgccgccgtccctagcccgccgcccgcttctccccggagtcagtacaacttcatcgcagatgtggtggagaagacagcacctgccgtggtctatatcgagatcctggaccggcaccctttcttgggccgcgaggtccctatctcgaacggctcaggattcgtggtggctgccgatgggctcattgtcaccaacgcccatgtggtggctgatcggcgcagagtccgtgtgagactgctaagcggcgacacgtatgaggccgtggtcacagctgtggatcccgtggcagacatcgcaacgctgaggattcagactaaggagcctctccccacgctgcctctgggacgctcagctgatgtccggcaaggggagtttgttgttgccatgggaagtccctttgcactgcagaacacgatcacatccggcattgttagctctgctcagcgtccagccagagacctgggactcccccaaaccaatgtggaatacattcaaactgatgcagctattgattttggaaactctggaggtcccctggttaacctggctagggaactgggggctgtatccctgcaggatggggaggtgattggagtgaacaccatgaaggtcacagctggaatctcctttgccatcccttctgatcgtcttcgagagtttctgcatcgtggggaaaagaagaattcctcctccggaatcagtgggtcccagcggcgctacattggggtgatgatgctgaccctgagtcccagggctggtctgcggcctggtgatgtgattttggccattggggagcagatggtacaaaatgctgaagatgtttatgaagctgttcgaacccaatcccagttggcagtgcagatccggcggggacgagaaacactgaccttatatgtgacccctgaggtcacagaatgaatagatcaccaagagtatgaggctcctgctctgatttcctccttgcctttctggctgaggttctgagggcaccgagacagagggttaaatgaaccagtgggggcaggtccctccaaccaccagcactgactcctgggctctgaagaatcacagaaacactttttatataaaataaaattatacctagcaacatattatagtaaaaaa

SEQ ID NO: 141467 - DNA, 2541 bp, Homo sapiens
  Payload ID: 7815
  Gene Symbol: HTRA3
  Gene Name: HtrA serine peptidase 3
  Uniprot ID: P83110
  ENST ID: ENST00000307358
  CDS Start-End: 205-1566
gggagctggtccctgcgctccctgcgccctggggatgcccctgccgccctgacgcccgccagcctgagccaccggcgcatgtgaccgcgcgtccgccccagtcccatccgtaggcgcccggcgcccggccccgcagcggcctcgttgtccccgccggcccccgcccggtctcccgcgctgccacccgccgccggccctgccgccatgcaggcgcgagcgctgctcctggccgcgttggccgcgctggcgctggcccgggagccccctgcggcgccgtgtcccgcgcgctgcgacgtgtcgcggtgtcccagcccccgctgccccggcggctacgtgcccgacctctgcaactgctgcctggtgtgcgccgccagcgagggcgagccctgtggcggccctctggactcgccttgcggcgagagcctggagtgcgtgcgcggcctatgccgctgccgctggtcgcacgccgtgtgtggcaccgacgggcacacctatgccaacgtgtgcgcgctgcaggcggccagccgccgcgcgctgcagctctccgggacgcccgtgcgccagctgcagaagggcgcctgcccgttgggtctccaccagctgagcagcccgcgctacaagttcaacttcattgctgacgtggtggagaagatcgcaccagccgtggtccacatagagctcttcctgagacacccgctgtttggccgcaacgtgcccctgtccagcggttctggcttcatcatgtcagaggccggcctgatcatcaccaatgcccacgtggtgtccagcaacagtgctgccccgggcaggcagcagctcaaggtgcagctacagaatggggactcctatgaggccaccatcaaagacatcgacaagaagtcggacattgccaccatcaagatccatcccaagaaaaagctccctgtgttgttgctgggtcactcggccgacctgcggcctggggagtttgtggtggccatcggcagtcccttcgccctacagaacacagtgacaacgggcatcgtcagcactgcccagcgggagggcagggagctgggcctccgggactccgacatggactacatccagacggatgccatcatcaactacgggaactccgggggaccactggtgaacctggatggcgaggtcattggcatcaacacgctcaaggtcacggctggcatctcctttgccatcccctcagaccgcatcacacggttcctcacagagttccaagacaagcagatcaaagactggaagaagcgcttcatcggcatacggatgcggacgatcacaccaagcctggtggatgagctgaaggccagcaacccggacttcccagaggtcagcagtggaatttatgtgcaagaggttgcgccgaattcaccttctcagagaggcggcatccaagatggtgacatcatcgtcaaggtcaacgggcgtcctctagtggactcgagtgagctgcaggaggccgtgctgaccgagtctcctctcctactggaggtgcggcgggggaacgacgacctcctcttcagcatcgcacctgaggtggtcatgtgaggggcgcattcctccagcgccaagcgtcagagcctgcagacaacggagggcagcgcccccccgagatcaggacgaaggaccaccgtcggtcctcagcagggcggcagcctcctcctggctgtccggggcagagcggaggctgggcttggccaggggcccgaatttccgcctggggagtgttggatccacatcccggtgccggggagggaagcccaacatccccttgtacagatgatcctgaaagtcacttccaagttctccggatattcacaaaactgccttccatggaggtcccctcctctcctagcttcccgcctctgcccctgtgaacacccatctgcagtatcccctgctcctgcccctcctactgcaggtctgggctgccaagcttcttcccccctgacaaacgcccacctgacctgaggccccagcttccctctgccctaggacttaccaagctgtagggccagggctgctgcctgccagcctggggtccctggaggacaggtcacatctgatccctttggggtgcgggggtggggtccagcccagagcaggcactgagtgaatgccccctggctgcggagctgagccccgccctgccatgaggttttcctccccaggcaggcaggaggccgcggggagcacgtggaaagttggctgctgcctggggaagcttctcctccccaaggcggccatggggcagcctgcagaggacagtggacgtggagctgcggggtgtgaggactgagccggcttccccttcccacgcagctctgggatgcagcagccgctcgcatggaagtgccgcccagaggcatgcaggctgctgggcaccaccccctcatccagggaacgagtgtgtctcaaggggcatttgtgagctttgctgtaaatggattcccagtgttgcttgtactgtatgtttctctactgtatggaaaataaagtttacaagcacacggttctcagcca

SEQ ID NO: 141468 - DNA, 2023 bp, Homo sapiens
  Payload ID: 7815
  Gene Symbol: HTRA3
  Gene Name: HtrA serine peptidase 3
  Uniprot ID: P83110
  ENST ID: ENST00000382512
  CDS Start-End: 193-1266
ctgcgctccctgcgccctggggatgcccctgccgccctgacgcccgccagcctgagccaccggcgcatgtgaccgcgcgtccgccccagtcccatccgtaggcgcccggcgcccggccccgcagcggcctcgttgtccccgccggcccccgcccggtctcccgcgctgccacccgccgccggccctgccgccatgcaggcgcgagcgctgctcctggccgcgttggccgcgctggcgctggcccgggagccccctgcggcgccgtgtcccgcgcgctgcgacgtgtcgcggtgtcccagcccccgctgccccggcggctacgtgcccgacctctgcaactgctgcctggtgtgcgccgccagcgagggcgagccctgtggcggccctctggactcgccttgcggcgagagcctggagtgcgtgcgcggcctatgccgctgccgctggtcgcacgccgtgtgtggcaccgacgggcacacctatgccaacgtgtgcgcgctgcaggcggccagccgccgcgcgctgcagctctccgggacgcccgtgcgccagctgcagaagggcgcctgcccgttgggtctccaccagctgagcagcccgcgctacaagttcaacttcattgctgacgtggtggagaagatcgcaccagccgtggtccacatagagctcttcctgagacacccgctgtttggccgcaacgtgcccctgtccagcggttctggcttcatcatgtcagaggccggcctgatcatcaccaatgcccacgtggtgtccagcaacagtgctgccccgggcaggcagcagctcaaggtgcagctacagaatggggactcctatgaggccaccatcaaagacatcgacaagaagtcggacattgccaccatcaagatccatcccaagaaaaagctccctgtgttgttgctgggtcactcggccgacctgcggcctggggagtttgtggtggccatcggcagtcccttcgccctacagaacacagtgacaacgggcatcgtcagcactgcccagcgggagggcagggagctgggcctccgggactccgacatggactacatccagacggatgccatcatcaactacgggaactccgggggaccactggtgaacctggatggcgaggtcattggcatcaacacgctcaaggtcacggctggcatctcctttgccatcccctcagaccgcatcacacggttcctcacagagttccaagacaagcagatcaaagccccctcactggcagttcattgagagcagggggcttcctcacgtttccccctcctccatgaccccgtcagccaagcacatggaccccagtgcagccaaggctggtgccatgagggctggtcacatgaagagctgctgttgaggatgccgccattgttcttctgtgtccattatgggaagacaatctggagccaggcagagcctgtctttcccaaagaagctgaagtcttcttctcttgaacagtggggaccatctaatctcttgagcccttttcctgttggcttctaggaagctcagagctagattcaggggtgcacccagacctgtcctagcatgctcctttccctaatgaccgagtctttcctgttgaattatcccattctccatgggtgcctttgactttggcctccttactggaaattagcggagctgctgtttgcacacactgagctgtgaggtggctttccttggaagtggatgatagtgtcctcttcccttcttgcctctctctttctcctgagacaggatccccctggggcctaggtttgctcctttgttgtacaggggctgtcccagttagtgctgacctcatcccagaaccccctgggaaatatcccctgtcctcagagctgtgtcccctccccaaggacagtgcagactaactgaggagcctgataaaccttagctgcatggcacacttgcaattttaaaatccttctgaagttgactggtgtttgtacttgcttctcttttttatttaataaaatccaatgatccaaa

SEQ ID NO: 141469 - DNA, 2095 bp, Homo sapiens
  Payload ID: 7816
  Gene Symbol: HTRA4
  Gene Name: HtrA serine peptidase 4
  Uniprot ID: P83105
  ENST ID: ENST00000302495
  CDS Start-End: 101-1531
gcggaggcggcgccgtggccgggagaaagtgtctctcatttaggagggtttgcaggtccagagtaaagtcactgaagagtggaagcgaggaaggaacaggatgattagacctcagctgcggaccgcggggctgggacgatgcctcctgccggggctgctgctgctcctggtgcccgtcctctgggccggggctgaaaagctacatacccagccctcctgccccgcggtctgccagcccacgcgctgccccgcgctgcccacctgcgcgctggggaccacgccggtgttcgacctgtgccgctgttgccgcgtctgccccgcggccgagcgtgaagtctgcggcggggcgcagggccaaccgtgcgccccggggctgcagtgcctccagccgctgcgccccgggttccccagcacctgcggttgcccgacgctgggaggggccgtgtgcggcagcgacaggcgcacctaccccagcatgtgcgcgctccgggccgaaaaccgcgccgcgcgccgcctgggcaaggtcccggccgtgcctgtgcagtgggggaactgcggggatacagggaccagaagcgcaggcccgctcaggaggaattacaacttcatcgccgcggtggtggagaaggtggcgccatcggtggttcacgtgcagctgtggggcaggttacttcacggcagcaggcttgttcctgtgtacagtggctctgggttcatagtgtctgaggacgggctcattattaccaatgcccatgttgtcaggaaccagcagtggattgaggtggtgctccagaatggggcccgttatgaagctgttgtcaaggatattgaccttaaattggatcttgcggtgattaagattgaatcaaatgctgaacttcctgtactgatgctgggaagatcatctgaccttcgggctggagagtttgtggtggctttgggcagcccattttctctgcagaacacagctactgcaggaattgtcagcaccaaacagcgagggggcaaagaactggggatgaaggattcagatatggactacgtccagattgatgccacaattaattatgggaattctggtggtcctctggtgaacttggatggtgatgtgattggcgtcaattcattgagggtgactgatggaatctcctttgcaattccttcagatcgagttaggcagttcttggcagaataccatgagcaccagatgaaaggaaaggcgttttcaaataagaaatatctgggtctgcaaatgctgtccctcactgtgccccttagtgaagaattgaaaatgcattatccagatttccctgatgtgagttctggggtttatgtatgtaaagtggttgaaggaacagctgctcaaagctctggattgagagatcacgatgtaattgtcaacataaatgggaaacctattactactacaactgatgttgttaaagctcttgacagtgattccctttccatggctgttcttcggggaaaagataatttgctcctgacagtcatacctgaaacaatcaattaaatatcttgttttaaagtgggattatctaaaaaaaaaaaaaccagttatatcacgtggtttgtattggagatgtgccaaacatggcaagaagtttttggatctttttcttacaaagaaaaatggatggttatcaacccaaatgcccatcaatgacagactggataaagcaaatgtggtacatatacaccatggaatactatgcagccataaaaagcaacagtcctctgcagggacatggatggagctggaaaccattatcctcagcaaactaacgcaggaacagaaaaccaaatactgcatgttctcacttataagtgggagctgaacaatgagaacacatgaacatagggaggggaacaacacacactggggcctggcagtgggtagggtagagggagggagagcattagcaaaaatagctaatgcatgctgggcttaacacccaggtgatgggttgattgataggtgcagcaaaccatcatggcacacatttacctatgaaacaaacctgcacatcctgcatatgtacctcagaacttaaaaataaaaataaaaagaaaaatg

SEQ ID NO: 141470 - DNA, 9027 bp, Homo sapiens
  Payload ID: 7817
  Gene Symbol: HIVEP1
  Gene Name: human immunodeficiency virus type I enhancer binding protein 1
  Uniprot ID: P15822
  ENST ID: ENST00000379388
  CDS Start-End: 333-8489
gctgctgggcggcggcagggtggcggacggagcgggggaccggggagcggcggccgccggaggaggttatgtttgtgtttggggttgtcaagtgaaggagggatcccaggcgccgccgccgccgccgcgcgggggtcgcggagatcccgagccgcggccgccgccatcagcagcgcagctccagggccggctgcagcggcagcggctccgccgggcgtcctggcagcagcacatggattaattgatgtatgttgagtttatggagctgccttttggtggcttgctttatctgcagtttttaagaagaaaaagaaggccctgagtcaaagaagatgcctcgaactaaacaaattcatcccagaaatctaagagacaaaattgaagaagcacaaaaagaacttaatggggcagaagtttcaaaaaaagaaatcttacaggctggtgttaaaggaacttcggaatcccttaaaggtgtgaaacgcaaaaagatcgtagctgagaatcacctgaaaaaaataccaaaatccccactgagaaatcctcttcaggcaaaacataaacaaaatacagaagagtcatctttcgccgttcttcatagtgcttcggagtctcacaagaaacagaattatattcctgtaaaaaatgggaagcagtttaccaaacaaaatggagaaacacctggaataattgctgaagcctcaaaatctgaagaatctgtctccccaaagaagcccttgtttctgcagcaaccatctgaactgcgtagatggagatccgaaggcgctgatcctgccaaattcagtgacctcgatgaacaatgtgactcaagttccttgtcaagtaaaaccaggactgacaatagcgaatgcatctcttctcattgtggcactacgtccccctcctatacaaacactgcattcgatgtcttactgaaagcaatggagccagaactgagcaccttgtcacaaaagggctcaccttgtgcaattaagacagaaaaactgaggccaaataaaactgcacgttcccctcccaaattaaaaaacagttcaatggatgccccaaatcagacttcacaggaattggttgctgaatcacagtcttcttgtacctcatacacagtccatatgtctgctgctcagaagaatgagcaaggggcaatgcagtcagcttctcatttgtatcatcaacatgaacactttgttcccaaatccaaccaacataatcaacagcttccggggtgttcaggtttcacaggatcactgacaaatctgcaaaatcaagagaatgccaaacttgaacaggtttataatatagcagtgacatcatctgtaggcctaacttcaccttccagtagatctcaggttactcctcaaaaccagcaaatggattctgcttcacctttgtcaataagtccggctaattctacacagtcgccccccatgccaatctataattcaactcatgttgcctctgttgttaatcaaagcgtagagcaaatgtgcaatcttcttctgaaagatcagaagccaaaaaaacaaggaaaatatatttgtgagtattgcaatagagcatgtgcaaagcctagtgtgcttttaaagcatatccgctcccacactggagagcgaccctatccctgtgtgacttgtggattttcatttaagactaaaagtaatctgtataagcacaagaaatcccacgcacatactatcaaactgggtcttgtcttgcaaccagatgctggtggcttgttcttgtcccacgagtcccccaaagcacttagtattcattcagacgtagaagacagtggggagagcgaggaggaaggcgccactgatgagagacagcatgacctgggcgccatggagctgcagcctgtgcacataataaagaggatgtcaaatgctgaaactttactaaaatcaagcttcactccaagcagtccagaaaatgtgataggtgactttttgctacaggacagatctgcagaatcacaagctgtgacagagttaccgaaagttgtggtccaccatgtcactgtgtcccccttaagaactgacagtccaaaggccatggatcccaagcctgaactttctagtgcacaaaagcagaaggaccttcaggtgacaaacgtacagccactttcagccaacatgtcccagggtggagtctccaggttggagactaatgagaattcccaccagaaaggcgacatgaatccactggaaggaaagcaagactctcacgtaggaacggtacacgcccagctacaaaggcagcaggctaccgattactcccaagagcagcaaggaaagctcctgagtcctcgaagtttaggaagtacggattctggttacttttcacgttctgaaagtgccgatcaaacagtgagtccaccaactccctttgccagaaggttacccagcacagaacaagactctggaaggagtaacggaccctctgcagctcttgtcaccacgtcaacaccctctgctttgcccacaggggaaaaggcattgcttttaccaggtcagatgcgcccacctttggccacaaaaacacttgaggagcggatatcgaagcttatctcagacaatgaagctttggtagatgacaagcaactggatagtgtgaagccgcggagaacctcactgtcaagacgaggaagcattgattcccccaaatcatacatatttaaagattctttccagtttgatttaaaaccagtgggacggagaacaagttcaagctctgatataccgaagtcacctttcacccctactgaaaaatcaaagcaagtgtttcttctgtctgtaccttcacttgactgtttacctatcacaagaagtaattccatgccgaccacaggttattcagcagtacctgcaaatataatacctcctcctcatccactaagaggaagtcagtcatttgatgacaaaattggcgctttctatgatgatgtctttgtatcgggacctaacgctcctgtgccccagagtgggcatccccgtacacttgtgagacaagcagccatagaagactcttcagcaaatgaaagtcatgttcttggtactggacagtccctggatgagagccaccaaggatgccatgctgctggtgaagccatgtcagtgaggagcaaggcactggcacaaggcccacatatagaaaaaaagaagtctcatcaagggcgagggacaatgtttgagtgtgaaacttgtagaaacaggtataggaaactggaaaattttgaaaatcataagaaattttactgttctgagttacatggaccaaaaacaaaggtagccatgagagaacctgagcacagccctgtgcccggcggtctgcagcctcagattctacactacagagtcgctgggtcctccggcatctgggaacagacgccccagataagaaaaaggaggaaaatgaaaagtgttggggatgatgaagaacttcagcaaaatgaaagtggaacatctccaaaaagttctgaaggccttcagtttcagaatgctctgggctgtaatcccagtttgcctaaacataatgttaccataagaagtgaccagcagcataaaaatatacagttgcaaaactcccatattcaccttgttgccaggggccctgagcagaccatggatcccaagctgtcgaccatcatggaacaacagataagttcagcagcccaggacaagatagaactgcagagacacggaactggaatctctgtcatccagcacaccaactccctgagcaggcccaactcatttgacaagcctgagccttttgaaagagcctccccagtttctttccaggagctgaatagaacggggaagtccgggtctctaaaagtgataggaatctcccaagaggaaagtcacccttctcgggacgggtctcatcctcaccagcttgcactatcagacgctctcagaggagaacttcaggaaagctccagaaagagtccaagtgaacgacatgtgttaggacagccctcaagacttgtccggcagcacaacatccaagttccagagattttggtcacagaagaaccagatcgagacctggaagctcaatgccatgatcaagaaaagtcagagaagttcagttggccccagcgtagtgaaaccttgtcaaaattgccaacagagaaactgccacccaaaaagaaaaggctccgtctggctgagatagaacattcctcaacagaatcgagctttgattccactctctccaggagtctaagtagggagagcagtttatctcacacttcaagtttctcagcctctttagacatagaggacgtttctaaaacggaggcttcccccaaaatcgattttctaaataaagccgagtttcttatgattccagctggcttgaatactctgaatgttcctggatgtcaccgggaaatgaggcgtactgcatcagaacagattaattgcacgcaaacgtcaatggaggtctctgatctcagaagcaaatcattcgattgtggaagcatcaccccaccccagacaacaccacttactgaattgcagcctccatcttcaccttctcgagtgggagtgactgggcatgtgcctctcttagaaagaaggagaggcccactggtacggcaaatatctttaaacatagccccagatagtcatctgtctcctgtacacccaacatctttccaaaatactgctcttcccagtgtgaatgcagtgccatatcaggggcctcagctcactagtacatctttagctgagttttctgcaaatactttgcactctcagactcaggttaaggatctgcaggcagaaacatcaaactccagctctaccaacgtttttcctgttcaacagctctgtgatatcaatttgttaaatcaaatccatgcaccgcctagccaccagagcacacagctatctctgcaagtgtctacgcagggtagcaagccagataaaaattctgttttatctgggtcttctaaaagtgaggattgctttgctcccaaataccaattgcattgtcaggttttcacttcaggcccatcttgctcttctaatcctgtgcattctttgccaaatcaagttatttcagatccagttggaacagatcattgtgtgacatcagcaacattaccaaccaaattaattgacagcatgtctaattcgcatcctctgctaccaccagagctcaggccccttggaagtcaggtgcagaaggtgccatcatcattcatgctgcccatacgcctgcagagtagtgttcctgcttactgttttgctacactcacatccctgccacaaatactagtgacccaagatctgcccaatcagccaatttgccagactaatcatagtgtagtgccaatcagtgaagaacaaaattctgtgccaacattacaaaaaggtcatcagaatgctttgccaaacccagagaaggaatttctatgtgaaaatgttttttcagagatgagccaaaattcttctctatcagaatccttgcccataactcagaaaatatctgttggtcgactttcccctcaacaagaatcttcagcttcgagtaaaaggatgctttccccagcaaatagtttagacattgccatggaaaagcaccagaagcgggccaaagatgaaaatggagctgtttgtgcaacagacgtgagacctttagaggctttgagttcgagagttaatgaagctagtaaacagaagaagcctattttagtgagacaggtttgtactacagagcccctggacggtgtgatgttggaaaaggatgttttttctcaacctgaaattagtaatgaggctgttaatttgacaaatgttttaccagctgataattcatcaacaggatgctctaaatttgtcgttatagaacctataagtgaattgcaggaatttgaaaacatcaagtcatccacatcattaactcttacagttcgaagttcacctgctccttcagaaaatactcatatttctcctttgaaatgtacagacaataaccaagaaaggaagtctccaggggttaaaaatcaaggtgacaaagtgaacatccaagagcaaagtcaacagccagtcacttctctttcattgtttaacatcaaggacacccagcagctggctttccctagcctgaaaactacaaccaactttacatggtgttatctcttaaggcagaagtcgttgcatttgcctcagaaggaccagaaaacttcagcctatactgattggacagtaagcgccagtaatccaaatccactcggtttgcccacaaaagttgcacttgctctccttaattcaaaacagaacactggaaaatcactatactgtcaagcaataactacccattccaagtcagacttattggtctattcaagcaagtggaaaagcagcttaagcaagagagcattaggtaatcaaaagtccacagtagttgaattcagcaataaagatgcctctgaaattaacagtgagcaagataaagaaaattccttaatcaaaagtgaaccaagaagaattaaaatatttgatggaggatataagtcaaatgaagagtatgtatatgtccgaggcaggggaagaggaaaatacatttgtgaagaatgtggaatacgttgtaagaaacctagcatgttaaagaaacacatacgaacccatacagatgtccgcccctaccactgcacttactgtaacttctcctttaagactaaaggaaatctgacaaaacacatgaagtccaaggcacatagcaagaaatgtgtggatttaggcgtctcagtaggtttaatagatgaacaggatacagaagaatcagatgaaaaacagagattcagttatgagcgatctggatatgatcttgaagaatctgatggcccagatgaggatgacaatgaaaatgaagacgatgatgaggacagccaggctgaatcagtcctgtcagccacaccctcagtcacagctagcccgcagcaccttccatctagaagtagccttcaggaccctgtgagtactgacgaggatgtcaggatcaccgattgcttttctggggtacacacggacccaatggacgttctgcccagggcgctgctcaccagaatgactgtcctgagcacagcacagtctgactacaataggaagacactctctccggggaaggccaggcagcgtgctgcgagagatgaaaacgacacaattccgtctgtagacacttccaggtccccgtgtcatcagatgtctgtggactaccctgagtcagaagaaattctgagaagttctatggcaggaaaagctgttgctataacacagagcccatcatctgtaagacttcctcctgctgcagctgagcacagcccccagacagcagcggggatgccttctgtggcctcaccacatcctgaccctcaagaacagaagcagcaaataactctacagccgactccaggcttgccttctccccacactcatttgtttagccaccttcctttgcattcccagcagcaatcgaggacaccttataatatggttccagttggggggatccatgtggtacctgctggcctcacatactccacgtttgtgccccttcaggctggaccagtgcagctcacgatccctgctgtcagtgtcgttcacagaactttgggtactcataggaatacggtcacagaagtgtctggcactacaaaccctgctggagtggctgaattaagcagtgttgtgccatgtattcctatcggccaaatccgcgtgccaggccttcagaacctaagtaccccaggcttgcagtcactcccctcgttaagcatggaaaccgtcaatattgtaggcctagccaatacaaatatggccccacaagtccatccaccaggactggctctgaatgctgtcggactgcaggttctgactgcaaacccttcatcacaaagcagccccgcccctcaggcacacattccaggtctccagatcttgaacatagcattgcccaccttaatcccctcagtcagtcaagtagccgttgatgcacagggagctccagaaatgccagcttcccaaagcaaagcatgcgagacacaacccaagcagacttctgtagccagcgcaaaccaggtcagcaggaccgagtctcctcaggggttacctacagtccagcgggaaaatgcaaaaaaagttctgaatccacctgcccctgcaggtgaccatgcaaggcttgatggcctgagtaaaatggacacagagaaggctgcctcggcaaatcacgtgaagcccaagcctgaactcacttccatacagggccaaccagcgtccacgtcacaacctctgctgaaggcacattctgaagtttttacaaagccctcaggccagcagactctctctccagacagacaggttcccaggcccacagcactaccgcggaggcagcccactgtgcacttcagcgacgtgagcagcgatgatgacgaggacaggcttgtgatagcaacctgatggattttattttttatttgctttttttttatataacacttaaaggtttctttgaaaaccctcctttccttaaagcacatttttctgacataaactcatgactaatctttgtgcaatcatgaacttttgaccaataattgttgttttgtgtcagctccagccatttttgtacatgttgtatagacaattgtgccttttaggagctttatgtttagaaactgtacagattgttgaatatctatatacataaaaatatattatatatgtatatgaaaaccaggtagttatttgtgtttagtaaggaaaacctgtcaaataaatcaaatgattaaattatatgttccactgttgaatataaattttatggctatggggcagagtttctgtgtataaattagtatgtaaactccatatttattgtattcatattagtctttgaaaatgggtctgtcctccttgtgtaagacagtaactttacacttcagacagattttctgtgttatgaaatgtttcagtaaaatattgtttactgacttta

SEQ ID NO: 141471 - DNA, 2085 bp, Homo sapiens
  Payload ID: 7817
  Gene Symbol: HIVEP1
  Gene Name: human immunodeficiency virus type I enhancer binding protein 1
  ENST ID: ENST00000399469
  CDS Start-End: 1-131
ttgcacttgctctccttaattcaaaacagaacactggaaaatcactatactgtcaagcaataactacccattccaagtcagacttattggtctattcaagcaagtggaaaagcagcttaagcaagatataagtcaaatgaagagtatgtatatgtccgaggcaggggaagaggaaaatacatttgtgaagaatgtggaatacgttgtaagaaacctagcatgttaaagaaacacatacgaacccatacagatgtccgcccctaccactgcacttactgtaacttctcctttaagactaaagatgaaaaacagagattcagttatgagcgatctggatatgatcttgaagaatctgatggcccagatgaggatgacaatgaaaatgaagacgatgatgaggacagccaggctgaatcagtcctgtcagccacaccctcagtcacagctagcccgcagcaccttccatctagaagtagccttcaggaccctgtgagtactgacgaggatgtcaggatcaccgattgcttttctggggtacacacggacccaatggacgttctgcccagggcgctgctcaccagaatgactgtcctgagcacagcacagtctgactacaataggaagacactctctccggggaaggccaggcagcgtgctgcgagagatgaaaacgacacaattccgtctgtagacacttccaggtccccgtgtcatcagatgtctgtggactaccctgagtcagaagaaattctgagaagttctatggcaggaaaagctgttgctataacacagagcccatcatctgtaagacttcctcctgctgcagctgagcacagcccccagacagcagcggggatgccttctgtggcctcaccacatcctgaccctcaagaacagaagcagcaaataactctacagccgactccaggcttgccttctccccacactcatttgtttagccaccttcctttgcattcccagcagcaatcgaggacaccttataatatggttccagttggggggatccatgtggtacctgctggcctcacatactccacgtttgtgccccttcaggctggaccagtgcagctcacgatccctgctgtcagtgtcgttcacagaactttgggtactcataggaatacggtcacagaagtgtctggcactacaaaccctgctggagtggctgaattaagcagtgttgtgccatgtattcctatcggccaaatccgcgtgccaggccttcagaacctaagtaccccaggcttgcagtcactcccctcgttaagcatggaaaccgtcaatattgtaggcctagccaatacaaatatggccccacaagtccatccaccaggactggctctgaatgctgtcggactgcaggttctgactgcaaacccttcatcacaaagcagccccgcccctcaggcacacattccaggtctccagatcttgaacatagcattgcccaccttaatcccctcagtcagtcaagtagccgttgatgcacagggagctccagaaatgccagcttcccaaagcaaagcatgcgagacacaacccaagcagacttctgtagccagcgcaaaccaggtcagcaggaccgagtctcctcaggggttacctacagtccagcgggaaaatgcaaaaaaagttctgaatccacctgcccctgcaggtgaccatgcaaggcttgatggcctgagtaaaatggacacagagaaggctgcctcggcaaatcacgtgaagcccaagcctgaactcacttccatacagggccaaccagcgtccacgtcacaacctctgctgaaggcacattctgaagtttttacaaagccctcaggccagcagactctctctccagacagacaggttcccaggcccacagcactaccgcggaggcagcccactgtgcacttcagcgacgtgagcagcgatgatgacgaggacaggcttgtgatagcaacctgatggattttattttttatttgctttttttttatataacacttaaaggtttctttgaaaaccctcctttccttaaagcacatttttctgacataaactcatgactaatctttgtgc

SEQ ID NO: 141472 - DNA, 1044 bp, Homo sapiens
  Payload ID: 7817
  Gene Symbol: HIVEP1
  Gene Name: human immunodeficiency virus type I enhancer binding protein 1
  ENST ID: ENST00000442081
  CDS Start-End: 324-1044
gcggccgccgccatcagcagcgcagctccagggccggctgcagcggcagcggctccgccgggcgtcctggcagcagcacatggattaattgatgtatgttgagtttatggagctgccttttggtggcttgctttatctgcagtttttaagaagaaaaagaaggccctgagtcaaagaagatgcctcgaactaaacaaattcatcccagaaatctaagaggaaacgtggtgggtgccgttttgacaccgacctatcctttgtgaggttgaagaattttggaagagcatgagagcagcacttggtgttcagaagaaaggcttagcatgttgtcctgggttccgtggagaagggtcactggactgcacggggtggctcttccgcatggtcttgacaaaattgaagaagcacaaaaagaacttaatggggcagaagtttcaaaaaaagaaatcttacaggctggtgttaaaggaacttcggaatcccttaaaggaaatctgacaaaacacatgaagtccaaggcacatagcaagaaatgtgtggatttaggcgtctcagtaggtttaatagatgaacaggatacagaagaatcagatgaaaaacagagattcagttatgagcgatctggatatgatcttgaagaatctgatggcccagatgaggatgacaatgaaaatgaagacgatgatgaggacagccaggctgaatcagtcctgtcagccacaccctcagtcacagctagcccgcagcaccttccatctagaagtagccttcaggaccctgtgagtactgacgaggatgtcaggatcaccgattgcttttctggggtacacacggacccaatggacgttctgcccagggcgctgctcaccagaatgactgtcctgagcacagcacagtctgactacaataggaagacactctctccggggaaggccaggcagcgtgctgcgagagatgaaaacgacacaattccgtctgtagacacttccaggtccccgtgtcatcagatgtctgtggactaccctgagtcagaagaaattctga

SEQ ID NO: 141473 - DNA, 585 bp, Homo sapiens
  Payload ID: 7817
  Gene Symbol: HIVEP1
  Gene Name: human immunodeficiency virus type I enhancer binding protein 1
  ENST ID: ENST00000487103
  CDS Start-End: 159-585
tcctcccgccggccccaaagacgctaaacgtgccctactctgccccgggggagagcacatggattaattgatgtatgttgagtttatggagctgccttttggtggcttgctttatctgcagtttttaagaagaaaaagaaggccctgagtcaaagaagatgcctcgaactaaacaaattcatcccagaaatctaagagacaaaattgaagaagcacaaaaagaacttaatggggcagaagtttcaaaaaaagaaatcttacaggctggtgttaaaggaacttcggaatcccttaaaggtgtgaaacgcaaaaagatcgtagctgagaatcacctgaaaaaaataccaaaatccccactgagaaatcctcttcaggcaaaacataaacaaaatacagaagagtcatctttcgccgttcttcatagtgcttcggagtctcacaagaaacagaattatattcctgtaaaaaatgggaagcagtttaccaaacaaaatggagaaacacctggaataattgctgaagcctcaaaatctgaagaatctgtctccccaaagaagcccttgtttctgcagcaaccatctgaac

SEQ ID NO: 141474 - DNA, 576 bp, Homo sapiens
  Payload ID: 7817
  Gene Symbol: HIVEP1
  Gene Name: human immunodeficiency virus type I enhancer binding protein 1
  ENST ID: ENST00000478545
  CDS Start-End: 192-576
gtgcaaccgccgaccttgcagaggggatggctgcgtgcgggagacccttggcacttctgggcgccctcgccgcgcgcgagccgagcagcacatggattaattgatgtatgttgagtttatggagctgccttttggtggcttgctttatctgcagtttttaagaagaaaaagaaggccctgagtcaaagaagatgcctcgaactaaacaaattcatcccagaaatctaagagacaaaattgaagaagcacaaaaagaacttaatggggcagaagtttcaaaaaaagaaatcttacaggctggtgttaaaggaacttcggaatcccttaaaggtgtgaaacgcaaaaagatcgtagctgagaatcacctgaaaaaaataccaaaatccccactgagaaatcctcttcaggcaaaacataaacaaaatacagaagagtcatctttcgccgttcttcatagtgcttcggagtctcacaagaaacagaattatattcctgtaaaaaatgggaagcagtttaccaaacaaaatggagaaacacctggaataattgctgaagcctcaaaatctgaagaatctg

SEQ ID NO: 141475 - DNA, 1602 bp, Homo sapiens
  Payload ID: 7817
  Gene Symbol: HIVEP1
  Gene Name: human immunodeficiency virus type I enhancer binding protein 1
  ENST ID: ENST00000484210
  CDS Start-End: 43-186
tgcagtttttaagaagaaaaagaaggccctgagtcaaagaagatgcctcgaactaaacaaattcatcccagaaatctaagagggtcttgctcttttgctcaggctggagtgcagtggtgtagttgtagctcactgcaaccccaaacttctggggacaagctaaggcttgtccccttcctgctttagcgtcccgaatagcttggactacaggcacatgccagtgtgcctagctactttttttttttggcggaggggaggggagttcctcactttgttgcccagactggtcttgaactcccagcctcaagtgaacctcctgtgttggccccccaaagcactgagattacaggcatgagccaccgcacctagtctgtggtttttcttcttcttatttttaaacatcctgtgcagaaaaaaattaaggaacctgatgtatctgttagacattaataccgtgcaaattcagtatgttttagtgttttgatctattgatatcctttctattgaaggcaaggaacaatagttattcggggctttattagattttatttaatgctttcataaagaagcacagatattactatttatcaactgtaatttttaatatttgagaactatattttggtgtaattgtttttttaatcctgtgtattttatgcattttaaaacattctgaaaaggggtccatcaatttggctaaactgcagaggcatacagggtacacagaaaaagttaagaatcatcctctggatgggcgcggtggctcacgattgtaatcccagcactttgggaggctgaggcaggcagatcacgaggtcaagagattgagaccatcctggccaacatgccgaaaccccgtctgtactaaaaatacaaaaattagctgggcatggtggcatgcacttgtagtcccagctacttgggaggctgaggcaggataattgcttgaagccaggaggcggaggttgcagtgagccaagattgcgccactgcactccagcctgggcgacagggcgagactccatctcaacaacgacaacaacaacaacaacaacaaagaaccaacaacaacaacaacaaagaaccaccaccaccaccaccaacaacaacaacaaagaatcattctccattccccaaaccctaaagccaggaagggagtaagattaactttagaaattaataaatagagttttggatctctactctgccttttaggagctctgtggatgggacgttttacttctgactgtcattctctgtgttataaaatgagtataatatatctgtcacagatttgtgatgagagttaaaatggacactttatataatatacctggcagagtaacaggcacatagaatgaatgttgttacccctttggtccttagtcttatcatgaactagctatgtccttagccaaattacttaccactttttgatctttgttacctatttatctacactgaaaggatttagatttgtatatttctacttcagctaaaaaaaatctgtgattatgtaaaaaaccaggattacctttttcaaattggaatgcttggtcagctaagcttttattttgttgattaaagacatgcatatatcaa

SEQ ID NO: 141476 - DNA, 579 bp, Homo sapiens
  Payload ID: 7817
  Gene Symbol: HIVEP1
  Gene Name: human immunodeficiency virus type I enhancer binding protein 1
  ENST ID: ENST00000491710
  CDS Start-End: 218-579
tttcctctcacgcccacttccaacctaggaggcttttggtttctgcttttttgtttttaaaattaaaagttaaacccaggaagctttggatcagacttttgtgttgcagttcggcacatggattaattgatgtatgttgagtttatggagctgccttttggtggcttgctttatctgcagtttttaagaagaaaaagaaggccctgagtcaaagaagatgcctcgaactaaacaaattcatcccagaaatctaagagacaaaattgaagaagcacaaaaagaacttaatggggcagaagtttcaaaaaaagaaatcttacaggctggtgttaaaggaacttcggaatcccttaaaggtgtgaaacgcaaaaagatcgtagctgagaatcacctgaaaaaaataccaaaatccccactgagaaatcctcttcaggcaaaacataaacaaaatacagaagagtcatctttcgccgttcttcatagtgcttcggagtctcacaagaaacagaattatattcctgtaaaaaatgggaagcagtttaccaaacaaaatggagaaacacctggaataattgctga

SEQ ID NO: 141477 - DNA, 9023 bp, Homo sapiens
  Payload ID: 7817
  Gene Symbol: HIVEP1
  Gene Name: human immunodeficiency virus type I enhancer binding protein 1
  ENST ID: ENST00000541134
  CDS Start-End: 333-8486
gctgctgggcggcggcagggtggcggacggagcgggggaccggggagcggcggccgccggaggaggttatgtttgtgtttggggttgtcaagtgaaggagggatcccaggcgccgccgccgccgccgcgcgggggtcgcggagatcccgagccgcggccgccgccatcagcagcgcagctccagggccggctgcagcggcagcggctccgccgggcgtcctggcagcagcacatggattaattgatgtatgttgagtttatggagctgccttttggtggcttgctttatctgcagtttttaagaagaaaaagaaggccctgagtcaaagaagatgcctcgaactaaacaaattcatcccagaaatctaagagacaaaattgaagaagcacaaaaagaacttaatggggcagaagtttcaaaaaaagaaatcttacaggctggtgttaaaggaacttcggaatcccttaaaggtgtgaaacgcaaaaagatcgtagctgagaatcacctgaaaaaaataccaaaatccccactgagaaatcctcttcaggcaaaacataaacaaaatacagaagagtcatctttcgccgttcttcatagtgcttcggagtctcacaagaaacagaattatattcctgtaaaaaatgggaagcagtttaccaaacaaaatggagaaacacctggaataattgctgaagcctcaaaatctgaagaatctgtctccccaaagaagcccttgtttctgcagcaaccatctgaactgcgtagatggagatccgaaggcgctgatcctgccaaattcagtgacctcgatgaacaatgtgactcaagttccttgtcaagtaaaaccaggactgacaatagcgaatgcatctcttctcattgtggcactacgtccccctcctatacaaacactgcattcgatgtcttactgaaagcaatggagccagaactgagcaccttgtcacaaaagggctcaccttgtgcaattaagacagaaaaactgaggccaaataaaactgcacgttcccctcccaaattaaaaaacagttcaatggatgccccaaatcagacttcacaggaattggttgctgaatcacagtcttcttgtacctcatacacagtccatatgtctgctgctcagaagaatgagcaaggggcaatgcagtcagcttctcatttgtatcatcaacatgaacactttgttcccaaatccaaccaacataatcaacagcttccggggtgttcaggtttcacaggatcactgacaaatctgcaaaatcaagagaatgccaaacttgaacaggtttataatatagcagtgacatcatctgtaggcctaacttcaccttccagtagatctcaggttactcctcaaaaccagcaaatggattctgcttcacctttgtcaataagtccggctaattctacacagtcgccccccatgccaatctataattcaactcatgttgcctctgttgttaatcaaagcgtagagcaaatgtgcaatcttcttctgaaagatcagaagccaaaaaaacaaggaaaatatatttgtgagtattgcaatagagcatgtgcaaagcctagtgtgcttttaaagcatatccgctcccacactggagagcgaccctatccctgtgtgacttgtggattttcatttaagactaaaagtaatctgtataagcacaagaaatcccacgcacatactatcaaactgggtcttgtcttgcaaccagatgctggtggcttgttcttgtcccacgagtcccccaaagcacttagtattcattcagacgtagaagacagtggggagagcgaggaggaaggcgccactgatgagagacagcatgacctgggcgccatggagctgcagcctgtgcacataataaagaggatgtcaaatgctgaaactttactaaaatcaagcttcactccaagcagtccagaaaatgtgataggtgactttttgctacaggacagatctgcagaatcacaagctgtgacagagttaccgaaagttgtggtccaccatgtcactgtgtcccccttaagaactgacagtccaaaggccatggatcccaagcctgaactttctagtgcacaaaagcagaaggaccttcaggtgacaaacgtacagccactttcagccaacatgtcccagggtggagtctccaggttggagactaatgagaattcccaccagaaaggcgacatgaatccactggaaggaaagcaagactctcacgtaggaacggtacacgcccagctacaaaggcagcaggctaccgattactcccaagagcagcaaggaaagctcctgagtcctcgaagtttaggaagtacggattctggttacttttcacgttctgaaagtgccgatcaaacagtgagtccaccaactccctttgccagaaggttacccagcacagaacaagactctggaaggagtaacggaccctctgcagctcttgtcaccacgtcaacaccctctgctttgcccacaggggaaaaggcattgcttttaccaggtcagatgcgcccacctttggccacaaaaacacttgaggagcggatatcgaagcttatctcagacaatgaagctttggtagatgacaagcaactggatagtgtgaagccgcggagaacctcactgtcaagacgaggaagcattgattcccccaaatcatacatatttaaagattctttccagtttgatttaaaaccagtgggacggagaacaagttcaagctctgatataccgaagtcacctttcacccctactgaaaaatcaaagcaagtgtttcttctgtctgtaccttcacttgactgtttacctatcacaagaagtaattccatgccgaccacaggttattcagcagtacctgcaaatataatacctcctcctcatccactaagaggaagtcagtcatttgatgacaaaattggcgctttctatgatgatgtctttgtatcgggacctaacgctcctgtgccccagagtgggcatccccgtacacttgtgagacaagcagccatagaagactcttcagcaaatgaaagtcatgttcttggtactggacagtccctggatgagagccaccaaggatgccatgctgctggtgaagccatgtcagtgaggagcaaggcactggcacaaggcccacatatagaaaaaaagaagtctcatcaagggcgagggacaatgtttgagtgtgaaacttgtagaaacaggtataggaaactggaaaattttgaaaatcataagaaattttactgttctgagttacatggaccaaaaacaaaggtagccatgagagaacctgagcacagccctgtgcccggcggtctgcagcctcagattctacactacagagtcgctgggtcctccggcatctgggaacagacgccccagataagaaaaaggaggaaaatgaaaagtgttggggatgatgaagaacttcagcaaaatgaaagtggaacatctccaaaaagttctgaaggccttcagtttcagaatgctctgggctgtaatcccagtttgcctaaacataatgttaccataagaagtgaccagcagcataaaaatatacagttgcaaaactcccatattcaccttgttgccaggggccctgagcagaccatggatcccaagctgtcgaccatcatggaacaacagataagttcagcagcccaggacaagatagaactgcagagacacggaactggaatctctgtcatccagcacaccaactccctgagcaggcccaactcatttgacaagcctgagccttttgaaagagcctccccagtttctttccaggagctgaatagaacggggaagtccgggtctctaaaagtgataggaatctcccaagaggaaagtcacccttctcgggacgggtctcatcctcaccagcttgcactatcagacgctctcagaggagaacttcaggaaagctccagaaagagtccaagtgaacgacatgtgttaggacagccctcaagacttgtccggcagcacaacatccaagttccagagattttggtcacagaagaaccagatcgagacctggaagctcaatgccatgatcaagaaaagtcagagaagttcagttggccccagcgtagtgaaaccttgtcaaaattgccaacagagaaactgccacccaaaaagaaaaggctccgtctggctgagatagaacattcctcaacagaatcgagctttgattccactctctccaggagtctaagtagggagagcagtttatctcacacttcaagtttctcagcctctttagacatagaggacgtttctaaaacggaggcttcccccaaaatcgattttctaaataaagccgagtttcttatgattccagctggcttgaatactctgaatgttcctggatgtcaccgggaaatgaggcgtactgcatcagaacagattaattgcacgcaaacgtcaatggaggtctctgatctcagaagcaaatcattcgattgtggaagcatcaccccaccccagacaacaccacttactgaattgcagcctccatcttcaccttctcgagtgggagtgactgggcatgtgcctctcttagaaagaaggagaggcccactggtacggcaaatatctttaaacatagccccagatagtcatctgtctcctgtacacccaacatctttccaaaatactgctcttcccagtgtgaatgcagtgccatatcaggggcctcagctcactagtacatctttagctgagttttctgcaaatactttgcactctcagactcaggttaaggatctgcaggcagaaacatcaaactccagctctaccaacgtttttcctgttcaacagctctgtgatatcaatttgttaaatcaaatccatgcaccgcctagccaccagagcacacagctatctctgcaagtgtctacgcagggtagcaagccagataaaaattctgttttatctgggtcttctaaaagtgaggattgctttgctcccaaataccaattgcattgtcaggttttcacttcaggcccatcttgctcttctaatcctgtgcattctttgccaaatcaagttatttcagatccagttggaacagatcattgtgtgacatcagcaacattaccaaccaaattaattgacagcatgtctaattcgcatcctctgctaccaccagagctcaggccccttggaagtcaggtgcagaaggtgccatcatcattcatgctgcccatacgcctgcagagtagtgttcctgcttactgttttgctacactcacatccctgccacaaatactagtgacccaagatctgcccaatcagccaatttgccagactaatcatagtgtagtgccaatcagtgaagaacaaaattctgtgccaacattacaaaaaggtcatcagaatgctttgccaaacccagagaaggaatttctatgtgaaaatgttttttcagagatgagccaaaattcttctctatcagaatccttgcccataactcagaaaatatctgttggtcgactttcccctcaacaagaatcttcagcttcgagtaaaaggatgctttccccagcaaatagtttagacattgccatggaaaagcaccagaagcgggccaaagatgaaaatggagctgtttgtgcaacagacgtgagacctttagaggctttgagttcgagagttaatgaagctagtaaacagaagaagcctattttagtgagacaggtttgtactacagagcccctggacggtgtgatgttggaaaaggatgttttttctcaacctgaaattagtaatgaggctgttaatttgacaaatgttttaccagctgataattcatcaacaggatgctctaaatttgtcgttatagaacctataagtgaattgcaggaatttgaaaacatcaagtcatccacatcattaactcttacagttcgaagttcacctgctccttcagaaaatactcatatttctcctttgaaatgtacagacaataaccaagaaaggaagtctccaggggttaaaaatcaaggtgacaaagtgaacatccaagagcaaagtcaacagccagtcacttctctttcattgtttaacatcaaggacacccagcagctggctttccctagcctgaaaactacaaccaactttacatggtgttatctcttaaggcagaagtcgttgcatttgcctcagaaggaccagaaaacttcagcctatactgattggacagtaagcgccagtaatccaaatccactcggtttgcccacaaaagttgcacttgctctccttaattcaaaacagaacactggaaaatcactatactgtcaagcaataactacccattccaagtcagacttattggtctattcaagcaagtggaaaagcagcttaagcaagagagcattaggtaatcaaaagtccacagtagttgaattcagcaataaagatgcctctgaaattaacagtgagcaagataaagaaaattccttaatcaaaagtgaaccaagaagaattaaaatatttgatggagggcaatcaaatgaagagtatgtatatgtccgaggcaggggaagaggaaaatacatttgtgaagaatgtggaatacgttgtaagaaacctagcatgttaaagaaacacatacgaacccatacagatgtccgcccctaccactgcacttactgtaacttctcctttaagactaaaggaaatctgacaaaacacatgaagtccaaggcacatagcaagaaatgtgtggatttaggcgtctcagtaggtttaatagatgaacaggatacagaagaatcagatgaaaaacagagattcagttatgagcgatctggatatgatcttgaagaatctgatggcccagatgaggatgacaatgaaaatgaagacgatgatgaggacagccaggctgaatcagtcctgtcagccacaccctcagtcacagctagcccgcagcaccttccatctagaagtagccttcaggaccctgtgagtactgacgaggatgtcaggatcaccgattgcttttctggggtacacacggacccaatggacgttctgcccagggcgctgctcaccagaatgactgtcctgagcacagcacagtctgactacaataggaagacactctctccggggaaggccaggcagcgtgctgcgagagatgaaaacgacacaattccgtctgtagacacttccaggtccccgtgtcatcagatgtctgtggactaccctgagtcagaagaaattctgagaagttctatggcaggaaaagctgttgctataacacagagcccatcatctgtaagacttcctcctgctgcagctgagcacagcccccagacagcagcggggatgccttctgtggcctcaccacatcctgaccctcaagaacagaagcagcaaataactctacagccgactccaggcttgccttctccccacactcatttgtttagccaccttcctttgcattcccagcagcaatcgaggacaccttataatatggttccagttggggggatccatgtggtacctgctggcctcacatactccacgtttgtgccccttcaggctggaccagtgcagctcacgatccctgctgtcagtgtcgttcacagaactttgggtactcataggaatacggtcacagaagtgtctggcactacaaaccctgctggagtggctgaattaagcagtgttgtgccatgtattcctatcggccaaatccgcgtgccaggccttcagaacctaagtaccccaggcttgcagtcactcccctcgttaagcatggaaaccgtcaatattgtaggcctagccaatacaaatatggccccacaagtccatccaccaggactggctctgaatgctgtcggactgcaggttctgactgcaaacccttcatcacaaagcagccccgcccctcaggcacacattccaggtctccagatcttgaacatagcattgcccaccttaatcccctcagtcagtcaagtagccgttgatgcacagggagctccagaaatgccagcttcccaaagcaaagcatgcgagacacaacccaagcagacttctgtagccagcgcaaaccaggtcagcaggaccgagtctcctcaggggttacctacagtccagcgggaaaatgcaaaaaaagttctgaatccacctgcccctgcaggtgaccatgcaaggcttgatggcctgagtaaaatggacacagagaaggctgcctcggcaaatcacgtgaagcccaagcctgaactcacttccatacagggccaaccagcgtccacgtcacaacctctgctgaaggcacattctgaagtttttacaaagccctcaggccagcagactctctctccagacagacaggttcccaggcccacagcactaccgcggaggcagcccactgtgcacttcagcgacgtgagcagcgatgatgacgaggacaggcttgtgatagcaacctgatggattttattttttatttgctttttttttatataacacttaaaggtttctttgaaaaccctcctttccttaaagcacatttttctgacataaactcatgactaatctttgtgcaatcatgaacttttgaccaataattgttgttttgtgtcagctccagccatttttgtacatgttgtatagacaattgtgccttttaggagctttatgtttagaaactgtacagattgttgaatatctatatacataaaaatatattatatatgtatatgaaaaccaggtagttatttgtgtttagtaaggaaaacctgtcaaataaatcaaatgattaaattatatgttccactgttgaatataaattttatggctatggggcagagtttctgtgtataaattagtatgtaaactccatatttattgtattcatattagtctttgaaaatgggtctgtcctccttgtgtaagacagtaactttacacttcagacagattttctgtgttatgaaatgtttcagtaaaatattgtttactgacttt

SEQ ID NO: 141478 - DNA, 8924 bp, Homo sapiens
  Payload ID: 7817
  Gene Symbol: HIVEP1
  Gene Name: human immunodeficiency virus type I enhancer binding protein 1
  ENST ID: ENST00000627968
  CDS Start-End: 6636-8387
gctgctgggcggcggcagggtggcggacggagcgggggaccggggagcggcggccgccggaggaggttatgtttgtgtttggggttgtcaagtgaaggagggatcccaggcgccgccgccgccgccgcgcgggggtcgcggagatcccgagccgcggccgccgccatcagcagcgcagctccagggccggctgcagcggcagcggctccgccgggcgtcctggcagcagcacatggattaattgatgtatgttgagtttatggagctgccttttggtggcttgctttatctgcagtttttaagaagaaaaagaaggccctgagtcaaagaagatgcctcgaactaaacaaattcatcccagaaatctaagagacaaaattgaagaagcacaaaaagaacttaatggggcagaagtttcaaaaaaagaaatcttacaggctggtgttaaaggaacttcggaatcccttaaaggtgtgaaacgcaaaaagatcgtagctgagaatcacctgaaaaaaataccaaaatccccactgagaaatcctcttcaggcaaaacataaacaaaatacagaagagtcatctttcgccgttcttcatagtgcttcggagtctcacaagaaacagaattatattcctgtaaaaaatgggaagcagtttaccaaacaaaatggagaaacacctggaataattgctgaagcctcaaaatctgaagaatctgtctccccaaagaagcccttgtttctgcagcaaccatctgaactgcgtagatggagatccgaaggcgctgatcctgccaaattcagtgacctcgatgaacaatgtgactcaagttccttgtcaagtaaaaccaggactgacaatagcgaatgcatctcttctcattgtggcactacgtccccctcctatacaaacactgcattcgatgtcttactgaaagcaatggagccagaactgagcaccttgtcacaaaagggctcaccttgtgcaattaagacagaaaaactgaggccaaataaaactgcacgttcccctcccaaattaaaaaacagttcaatggatgccccaaatcagacttcacaggaattggttgctgaatcacagtcttcttgtacctcatacacagtccatatgtctgctgctcagaagaatgagcaaggggcaatgcagtcagcttctcatttgtatcatcaacatgaacactttgttcccaaatccaaccaacataatcaacagcttccggggtgttcaggtttcacaggatcactgacaaatctgcaaaatcaagagaatgccaaacttgaacaggtttataatatagcagtgacatcatctgtaggcctaacttcaccttccagtagatctcaggttactcctcaaaaccagcaaatggattctgcttcacctttgtcaataagtccggctaattctacacagtcgccccccatgccaatctataattcaactcatgttgcctctgttgttaatcaaagcgtagagcaaatgtgcaatcttcttctgaaagatcagaagccaaaaaaacaaggaaaatatatttgtgagtattgcaatagagcatgtgcaaagcctagtgtgcttttaaagcatatccgctcccacactggagagcgaccctatccctgtgtgacttgtggattttcatttaagactaaaagtaatctgtataagcacaagaaatcccacgcacatactatcaaactgggtcttgtcttgcaaccagatgctggtggcttgttcttgtcccacgagtcccccaaagcacttagtattcattcagacgtagaagacagtggggagagcgaggaggaaggcgccactgatgagagacagcatgacctgggcgccatggagctgcagcctgtgcacataataaagaggatgtcaaatgctgaaactttactaaaatcaagcttcactccaagcagtccagaaaatgtgataggtgactttttgctacaggacagatctgcagaatcacaagctgtgacagagttaccgaaagttgtggtccaccatgtcactgtgtcccccttaagaactgacagtccaaaggccatggatcccaagcctgaactttctagtgcacaaaagcagaaggaccttcaggtgacaaacgtacagccactttcagccaacatgtcccagggtggagtctccaggttggagactaatgagaattcccaccagaaaggcgacatgaatccactggaaggaaagcaagactctcacgtaggaacggtacacgcccagctacaaaggcagcaggctaccgattactcccaagagcagcaaggaaagctcctgagtcctcgaagtttaggaagtacggattctggttacttttcacgttctgaaagtgccgatcaaacagtgagtccaccaactccctttgccagaaggttacccagcacagaacaagactctggaaggagtaacggaccctctgcagctcttgtcaccacgtcaacaccctctgctttgcccacaggggaaaaggcattgcttttaccaggtcagatgcgcccacctttggccacaaaaacacttgaggagcggatatcgaagcttatctcagacaatgaagctttggtagatgacaagcaactggatagtgtgaagccgcggagaacctcactgtcaagacgaggaagcattgattcccccaaatcatacatatttaaagattctttccagtttgatttaaaaccagtgggacggagaacaagttcaagctctgatataccgaagtcacctttcacccctactgaaaaatcaaagcaagtgtttcttctgtctgtaccttcacttgactgtttacctatcacaagaagtaattccatgccgaccacaggttattcagcagtacctgcaaatataatacctcctcctcatccactaagaggaagtcagtcatttgatgacaaaattggcgctttctatgatgatgtctttgtatcgggacctaacgctcctgtgccccagagtgggcatccccgtacacttgtgagacaagcagccatagaagactcttcagcaaatgaaagtcatgttcttggtactggacagtccctggatgagagccaccaaggatgccatgctgctggtgaagccatgtcagtgaggagcaaggcactggcacaaggcccacatatagaaaaaaagaagtctcatcaagggcgagggacaatgtttgagtgtgaaacttgtagaaacaggtataggaaactggaaaattttgaaaatcataagaaattttactgttctgagttacatggaccaaaaacaaaggtagccatgagagaacctgagcacagccctgtgcccggcggtctgcagcctcagattctacactacagagtcgctgggtcctccggcatctgggaacagacgccccagataagaaaaaggaggaaaatgaaaagtgttggggatgatgaagaacttcagcaaaatgaaagtggaacatctccaaaaagttctgaaggccttcagtttcagaatgctctgggctgtaatcccagtttgcctaaacataatgttaccataagaagtgaccagcagcataaaaatatacagttgcaaaactcccatattcaccttgttgccaggggccctgagcagaccatggatcccaagctgtcgaccatcatggaacaacagataagttcagcagcccaggacaagatagaactgcagagacacggaactggaatctctgtcatccagcacaccaactccctgagcaggcccaactcatttgacaagcctgagccttttgaaagagcctccccagtttctttccaggagctgaatagaacggggaagtccgggtctctaaaagtgataggaatctcccaagaggaaagtcacccttctcgggacgggtctcatcctcaccagcttgcactatcagacgctctcagaggagaacttcaggaaagctccagaaagagtccaagtgaacgacatgtgttaggacagccctcaagacttgtccggcagcacaacatccaagttccagagattttggtcacagaagaaccagatcgagacctggaagctcaatgccatgatcaagaaaagtcagagaagttcagttggccccagcgtagtgaaaccttgtcaaaattgccaacagagaaactgccacccaaaaagaaaaggctccgtctggctgagatagaacattcctcaacagaatcgagctttgattccactctctccaggagtctaagtagggagagcagtttatctcacacttcaagtttctcagcctctttagacatagaggacgtttctaaaacggaggcttcccccaaaatcgattttctaaataaagccgagtttcttatgattccagctggcttgaatactctgaatgttcctggatgtcaccgggaaatgaggcgtactgcatcagaacagattaattgcacgcaaacgtcaatggaggtctctgatctcagaagcaaatcattcgattgtggaagcatcaccccaccccagacaacaccacttactgaattgcagcctccatcttcaccttctcgagtgggagtgactgggcatgtgcctctcttagaaagaaggagaggcccactggtacggcaaatatctttaaacatagccccagatagtcatctgtctcctgtacacccaacatctttccaaaatactgctcttcccagtgtgaatgcagtgccatatcaggggcctcagctcactagtacatctttagctgagttttctgcaaatactttgcactctcagactcaggttaaggatctgcaggcagaaacatcaaactccagctctaccaacgtttttcctgttcaacagctctgtgatatcaatttgttaaatcaaatccatgcaccgcctagccaccagagcacacagctatctctgcaagtgtctacgcagggtagcaagccagataaaaattctgttttatctgggtcttctaaaagtgaggattgctttgctcccaaataccaattgcattgtcaggttttcacttcaggcccatcttgctcttctaatcctgtgcattctttgccaaatcaagttatttcagatccagttggaacagatcattgtgtgacatcagcaacattaccaaccaaattaattgacagcatgtctaattcgcatcctctgctaccaccagagctcaggccccttggaagtcaggtgcagaaggtgccatcatcattcatgctgcccatacgcctgcagagtagtgttcctgcttactgttttgctacactcacatccctgccacaaatactagtgacccaagatctgcccaatcagccaatttgccagactaatcatagtgtagtgccaatcagtgaagaacaaaattctgtgccaacattacaaaaaggtcatcagaatgctttgccaaacccagagaaggaatttctatgtgaaaatgttttttcagagatgagccaaaattcttctctatcagaatccttgcccataactcagaaaatatctgttggtcgactttcccctcaacaagaatcttcagcttcgagtaaaaggatgctttccccagcaaatagtttagacattgccatggaaaagcaccagaagcgggccaaagatgaaaatggagctgtttgtgcaacagacgtgagacctttagaggctttgagttcgagagttaatgaagctagtaaacagaagaagcctattttagtgagacaggtttgtactacagagcccctggacggtgtgatgttggaaaaggatgttttttctcaacctgaaattagtaatgaggctgttaatttgacaaatgttttaccagctgataattcatcaacaggatgctctaaatttgtcgttatagaacctataagtgaattgcaggaatttgaaaacatcaagtcatccacatcattaactcttacagttcgaagttcacctgctccttcagaaaatactcatatttctcctttgaaatgtacagacaataaccaagaaaggaagtctccaggggttaaaaatcaaggtgacaaagtgaacatccaagagcaaagtcaacagccagtcacttctctttcattgtttaacatcaaggacacccagcagctggctttccctagcctgaaaactacaaccaactttacatggtgttatctcttaaggcagaagtcgttgcatttgcctcagaaggaccagaaaacttcagcctatactgattggacagtaagcgccagtaatccaaatccactcggtttgcccacaaaagttgcacttgctctccttaattcaaaacagaacactggaaaatcactatactgtcaagcaataactacccattccaagtcagacttattggtctattcaagcaagtggaaaagcagcttaagcaagagagcattaggtaatcaaaagtccacagtagttgaattcagcaataaagatgcctctgaaattaacagtgagcaagataaagaaaattccttaatcaaaagtgaaccaagaagaattaaaatatttgatggaggatataagtcaaatgaagagtatgtatatgtccgaggcaggggaagaggaaaatacatttgtgaagaatgtggaatacgttgtaagaaacctagcatgttaaagaaacacatacgaacccatacagatgtccgcccctaccactgcacttactgtaacttctcctttaagactaaagatgaaaaacagagattcagttatgagcgatctggatatgatcttgaagaatctgatggcccagatgaggatgacaatgaaaatgaagacgatgatgaggacagccaggctgaatcagtcctgtcagccacaccctcagtcacagctagcccgcagcaccttccatctagaagtagccttcaggaccctgtgagtactgacgaggatgtcaggatcaccgattgcttttctggggtacacacggacccaatggacgttctgcccagggcgctgctcaccagaatgactgtcctgagcacagcacagtctgactacaataggaagacactctctccggggaaggccaggcagcgtgctgcgagagatgaaaacgacacaattccgtctgtagacacttccaggtccccgtgtcatcagatgtctgtggactaccctgagtcagaagaaattctgagaagttctatggcaggaaaagctgttgctataacacagagcccatcatctgtaagacttcctcctgctgcagctgagcacagcccccagacagcagcggggatgccttctgtggcctcaccacatcctgaccctcaagaacagaagcagcaaataactctacagccgactccaggcttgccttctccccacactcatttgtttagccaccttcctttgcattcccagcagcaatcgaggacaccttataatatggttccagttggggggatccatgtggtacctgctggcctcacatactccacgtttgtgccccttcaggctggaccagtgcagctcacgatccctgctgtcagtgtcgttcacagaactttgggtactcataggaatacggtcacagaagtgtctggcactacaaaccctgctggagtggctgaattaagcagtgttgtgccatgtattcctatcggccaaatccgcgtgccaggccttcagaacctaagtaccccaggcttgcagtcactcccctcgttaagcatggaaaccgtcaatattgtaggcctagccaatacaaatatggccccacaagtccatccaccaggactggctctgaatgctgtcggactgcaggttctgactgcaaacccttcatcacaaagcagccccgcccctcaggcacacattccaggtctccagatcttgaacatagcattgcccaccttaatcccctcagtcagtcaagtagccgttgatgcacagggagctccagaaatgccagcttcccaaagcaaagcatgcgagacacaacccaagcagacttctgtagccagcgcaaaccaggtcagcaggaccgagtctcctcaggggttacctacagtccagcgggaaaatgcaaaaaaagttctgaatccacctgcccctgcaggtgaccatgcaaggcttgatggcctgagtaaaatggacacagagaaggctgcctcggcaaatcacgtgaagcccaagcctgaactcacttccatacagggccaaccagcgtccacgtcacaacctctgctgaaggcacattctgaagtttttacaaagccctcaggccagcagactctctctccagacagacaggttcccaggcccacagcactaccgcggaggcagcccactgtgcacttcagcgacgtgagcagcgatgatgacgaggacaggcttgtgatagcaacctgatggattttattttttatttgctttttttttatataacacttaaaggtttctttgaaaaccctcctttccttaaagcacatttttctgacataaactcatgactaatctttgtgcaatcatgaacttttgaccaataattgttgttttgtgtcagctccagccatttttgtacatgttgtatagacaattgtgccttttaggagctttatgtttagaaactgtacagattgttgaatatctatatacataaaaatatattatatatgtatatgaaaaccaggtagttatttgtgtttagtaaggaaaacctgtcaaataaatcaaatgattaaattatatgttccactgttgaatataaattttatggctatggggcagagtttctgtgtataaattagtatgtaaactccatatttattgtattcatattagtctttgaaaatgggtctgtcctccttgtgtaagacagtaactttacacttcagacagattttctgtgttatgaaatgtttcagtaaaatattgtttactgacttt

SEQ ID NO: 141479 - DNA, 9524 bp, Homo sapiens
  Payload ID: 7818
  Gene Symbol: HIVEP2
  Gene Name: human immunodeficiency virus type I enhancer binding protein 2
  Uniprot ID: P31629
  ENST ID: ENST00000012134
  CDS Start-End: 546-7886
gtggagcctttgaattttttaaaagaccatagtaatcagatctacttgaaaaattaagtgaattgatttggttggaatgctcttttaccgatgctttaacatacagccactaggaagcgtcaggacaatcatgcccataagaactctaaactgttcagatcattttatcttagtgaaactggcaattgaactttgctctagttgatgggcaaaatttctcctagactattcatcatcccaatttcatcctagttgaaaattttcaaatgccataagaaatctttatagatttgcacttagcttttggatggacgtttctacaatggagagaactgtgttatagccctggtccaaggacattactagctaatgcccatcgactgtggtgtgcgtgtggaaggttccaaagagaaggagcaatcagcaagtttgcagacaccctggaacatggaagcaaccaagctttaagaagcacagctttggagacactccatgagtctgcactgctttcaggggaactagcacttaagaccttgtgtaacaaaatggacactggggacacagctctaggacaaaaagctacctcaaggtctggagaaactgataaagcatcaggtagatggagacaggaacaatcagctgttattaagatgagcacttttggcagtcatgaaggacagcggcaaccacaaatagagcctgagcaaatcggaaacacagcatcagcacaactgtttggttctgggaaactggcctcccctagtgaagtggtgcagcaagtcgcagagaagcaatatccaccgcatcgtccgagtccttactcatgccaacactcactctctttccctcagcactcattgccacagggggtcatgcacagcaccaagccacatcagagcctcgaaggtcctccgtggcttttccctggccctttgccatccgttgcctctgaggacttatttccttttcctatacatggccacagtggtggttatcctagaaaaaagatttcaagtctgaaccctgcttatagccaatactcccagaaaagtattgaacaggcagaagaggctcacaagaaagagcacaaacccaaaaagcctggcaagtacatttgcccttactgcagcagagcgtgtgccaaacctagtgtactgaaaaaacacatcaggtcccatactggggagcggccatatccatgtataccttgtggtttctctttcaagacaaagagcaatttgtacaagcacaggaagtcacatgcccatgcaattaaggcaggattagtacctttcacagagtcagctgtatctaaattggacctagaggctggttttattgatgtagaagcagaaatacattcagatggtgaacagagtacagacacagatgaggagagttctttatttgccgaggcttctgacaaaatgagtcctggtccacccatcccactggacattgccagcagaggcggctatcatgggtcattggaagaatcattgggaggtccaatgaaggtgccgattttgattatccctaaaagtgggattcctctccctaatgaaagctctcagtatattggccctgatatgctaccaaatccatctttaaatactaaggctgatgattcgcacacagtcaaacagaaacttgcactaagactgtcagagaaaaaaggacaagattctgagccatcgctcaaccttctgagcccgcacagtaaaggaagcactgattctggttacttttctcgctcagaaagtgctgagcagcaaataagccctcccaacacaaatgcaaagtcttatgaagaaatcatctttggaaaatactgtcggcttagtccgagaaatgcactcagtgttacaaccacaagtcaggagcgtgccgcaatgggtaggaagggcataatggaaccattacctcacgttaacaccaggttagatgtcaagatgtttgaagatcctgtttcacagctgatcccaagcaagggagatgtcgaccccagtcaaacgagcatgctgaaatccactaagttcaacagtgagtccagacaaccccagattattccatcatctatcaggaacgaaggaaaactttatccagcaaacttccaaggcagcaacccggttctcttagaagctcctgtagactcttcaccccttattagaagcaactcagtgccaacttcttcagcaactaatctaactattcctccttctttgagaggaagtcactcatttgatgaaaggatgactggttccgacgatgtattctatccagggaccgtgggcataccccctcagcgcatgctaagaagacaagcggcatttgagctgccttcggtacaggagggccacgtggaagtcgagcaccatggcaggatgttgaagggtatcagcagttcatccctgaaggaaaagaaattgtctcctggggacagggttgggtatgactatgatgtctgtcggaaaccctataagaagtgggaggactctgaaacaccaaagcaaaactacagggacatttcctgcttgagttctttaaagcatggtggagaatatttcatggatcccgtggtgccattgcagggagtaccaagcatgtttggaactacctgtgaaaacaggaaacgccggaaagagaagagcgtaggggatgaagaggacacgcccatgatctgcagcagcattgtaagcactcctgtgggcatcatggcttccgattatgaccccaaactgcagatgcaggaaggagtcaggagtggatttgccatggctggacacgaaaacctttctcatggtcacacggaacgctttgacccatgtcggccccaactgcagcctggaagtccatctcttgtgtcagaggagtcaccttcagccattgattcagacaagatgtcagacctagggggcaggaaacctcctggaaatgtgatttctgtgattcagcacaccaactcactgagccgacccaattcatttgaaaggtctgagtcagccgaacttgtggcttgcacacaggataaagccccttccccttcagagacttgtgacagtgagatttcagaagccccagtgagtcctgagtgggctccacctggggatggtgcagaaagtggggggaaaccctctccatctcagcaggtgcagcagcagtcctatcacacacagcccaggctagttcggcaacacaacatccaggttcctgagattcgagtgaccgaggagcctgataaacctgagaaggagaaggaagcccagagcaaagagccagagaagcctgtggaagaatttcagtggccccagagaagtgagaccctttcccagctccccgcggagaagttgccacccaaaaagaagcgtctgcgacttgcagatatggagcactcctcaggggagtccagctttgaatccacaggcacaggcctctcccgcagccccagccaagaaagcaacttgtcccacagctccagtttctccatgtcttttgaaagagaagaaaccagtaagctttctgcacttcctaagcaggatgagtttgggaagcattcagagtttctgactgtccctgctggttcatactcattgtctgtcccaggccatcaccaccagaaagagatgcgacgctgctcatcagagcagatgccttgtcctcacccagcggaagtcccagaagttcggagcaaatcatttgattatgggaatctgtcccatgctcctgtgtcgggagcagcagcctccacggtatcaccgtccagggagaggaagaaatgctttctggtgcggcaagcttccttcagtggctccccagaaatctcccagggcgaggttggcatggatcagagcgtgaagcaagagcagctggagcacctgcatgctggcctccggtccgggtggcaccatggcccgcctgctgtgctgcctcctcttcagcaagaggacccagggaagcaggtggcgggtccttgtcccccgctgagctcggggccactgcacctggcccagccacagatcatgcacatggacagtcaggaatctttgagaaatcccttgatccaaccaacatcctatatgacaagcaagcacttacctgaacagccacacttatttccacatcaagagacaattccattttctccaatccagaatgccttgtttcagtttcagtatcctacagtttgtatggttcatttaccagctcagcagcctccctggtggcaggcacatttcccacatccctttgctcagcaccctcagaagagctatggcaagccctcttttcagacagaaatccattcgagctatcccttagagcatgtggcagagcacactggaaagaaacctgctgagtatgcacacacgaaagagcagacctacccatgttattcaggagcatcagggctacacccaaagaaccttcttccaaagtttccatcagaccagagcagtaagtcaactgaaacgccctctgagcaggttcttcaagaagattttgcctcggcaaatgctgggtctttgcagtccctcccaggaacagtggttcctgttcggatccagacgcacgtaccatcctatggaagtgtcatgtacacaagcatttctcagatacttgggcagaatagccctgccattgtcatatgcaaagtcgatgagaatatgacccaaaggacactggtcaccaacgcagccatgcaagggataggattcaacattgcccaggtgctggggcagcatgcgggcttggagaagtaccccatttggaaagcacctcagactttgcccctcggcttagaatcctccatccccttgtgtttaccttccacctctgacagcgtggccaccctgggaggtagcaagcgaatgctttctccagccagtagcttggagctcttcatggaaaccaagcagcagaaaagggtcaaagaagaaaagatgtacggacagattgtggaggagcttagtgctgtggagctgaccaactcagacatcaaaaaggacctctcccgcccccagaaaccccagctggttcgacaaggatgtgcttctgagccaaaagatggcttgcagtcagggtcatcttccttctcctcgctgtcgccctcctcatctcaagactatccttctgttagcccgtcttccagggagccattcctgcccagcaaggagatgctttccggttcccgggcaccacttccggggcagaagtccagtgggccttctgaaagcaaagaatcttcagatgaattagatatcgatgagacggcatcggacatgagcatgagcccacagagttcttcattaccagcaggagatggtcagctggaagaggaagggaagggccacaagcggcctgttggcatgctggtccgcatggcctctgcccccagcgggaacgtggcagactcaactcttcttctcacggacatggcagatttccagcagattcttcagttccccagtctgcggacaacaactactgtgagttggtgcttcttgaattatacaaaacccaattatgtgcaacaggccaccttcaaatcctcggtttatgcttcatggtgcattagttcctgtaatccaaacccatcaggattgaacaccaagaccacgctggctcttctgaggtccaagcaaaaaatcactgcagaaatttatactctggctgctatgcataggcctggaaccggcaagcttacatcatcaagtgcttggaagcagtttactcagatgaaacctgatgcgtcctttttatttggcagcaaactagaaaggaaactagtgggaaatatcttaaaggaaagagggaaaggagatattcatggagataaagatattggatccaaacaaactgagccaatccgaattaaaatatttgaaggagggtacaaatcgaatgaagattatgtatatgtcagaggacgtggccggggaaagtacatttgtgaagaatgtgggattcgctgtaagaagccaagcatgctcaaaaaacacatccgtacccatactgatgttcggccttatgtatgcaagttatgtaactttgccttcaaaacgaaaggaaacctaacgaagcatatgaaatctaaagcacacatgaaaaaatgcctggaattgggagtctcaatgacatcggtggatgatacagaaactgaggaagcagaaaatttggaagatttgcacaaagcagcagagaagcatagcatgtccagcatttcaactgatcatcagttctccgatgctgaggaatcagatggtgaggatggagatgataatgatgatgatgatgaagatgaagatgactttgacgaccagggagatttaacaccaaaaacaagatcaagaagcaccagtcctcagcctcctagattctcctccttgcctgtgaatgttggcgccgtaccccacggggttccttcagatagttccctgggacattcttcgttgatcagctatttggttactttgccaagtattcgagttactcagcttatgacacccagtgattcatgtgaagatacccagatgacagaataccagaggctattccagagcaaaagtacggactcagaaccagacaaagacagattggacatacctagttgtatggatgaggagtgcatgctaccttcagagccaagctcctctcccagggacttctcaccctcaagccaccattcctctccaggatatgattcttcaccctgtcgagataattcaccaaagaggtatctgatacccaaaggagatttatctcccaggagacatttatcacctaggagagatctgtcacccatgagacatctttcaccaagaaaggaagctgcattgagaagagagatgtcccaaagagatgtttcaccaagaaggcatttgtctccaaggaggccagtgtctcctgggaaagatatcacagcaagaagagacctctctcctagaagagagagaagatacatgaccacaataagagcgccatctcccagaagggctttataccataacccaccattgtccatgggacagtatttgcaagcagagccaattgtattggggcctcctaatttaagaagaggattacctcaggttccttacttcagtctctatggagaccaagaaggtgcttatgaacatccaggctccagccttttccctgagggtcctaatgactatgtcttcagtcatcttccactccactctcagcaacaagtgcgagcccctatccccatggtgcccgttggtgggatccagatggttcactccatgccgccagccctttccagtttacatccttcacccacattgcccctgccaatggagggctttgaggagaagaaaggcgcgtcaggggagtccttctccaaggacccctatgtgctttctaagcagcatgagaagcgaggtcctcacgctttgcagtcatctggtccacctagcactccctcctctcctcggctgttgatgaaacagagcacttcggaagacagcctaaacgcaacagagcgggaacaggaggaaaatatacagacttgtacaaaagccattgcctctctccggattgccacggaagaggcagctctgctcgggccagatcagccagcgcgggtgcaggagccccaccagaaccccctgggaagtgcacatgttagcattagacactttagtagacctgagccaggtcagccctgtacctcagccacccaccctgacttgcatgatggtgaaaaggacaattttggtacatcacagactccattagctcactccacgttttacagcaagagttgtgtggatgacaagcagttggactttcacagcagcaaggaattatcttcaagcacagaggaaagcaaagatccttcatcagaaaagagtcagctacattgatctatgatgcatggagactttcatttccacattttcccatttttttgtttttgtttttctagaaatggaggtaatccagtttatagcatgcctgtcctaagttacagtagtttgctattatatatacttttgttatatcaaaagaattaggtaaattaacaagtcatcatgagcctgaccaaaacaaaatttgaaattaacctattgggtctggtacttttaaaattgtacagatgtttgtgccttttctttactttgcttatattcttataagcattttttagcagtaatttgtacatattttagaatttgtgtatctgctttgtaataaatgtaatttctttccttttttggacacttggatctaaatgatgtaaagcaaaacagcatcaatatatatgtgaggttgcactaaaacatatttttatatgattaaaactgaacagcttttatgtacagctctgattctgtaatactaatatttatttactttgtttcataaattgtacattttttcttaatgttgtggattgcttttctatgtgaagcatgggatttactgttgcgtaactagaacaaaaatgtacattgtaaacaagatatttaaactagagtatcttattctgcacttatgcattagttaaaaaaagataaaggatgtatcagtcagttcttaactcttgtatatttttttgtctcttgtttgctggattgactataacttaagtgctgattgtgattttaaaatgatagtaccgtaaagcattaaagtaaacaatgtgctattgtgagttttttcaaagctttataaatcagttataaataatattaaaagtatttggtcttatgtgaacatgttgatctatatactcatctaaaaatatgggaaaacattccaccccatgtaaatatgtacaagtgcatcactggtacaattttatgtaactcagttggacactaggttgccacagacctatgctaggtgtctttaaaaaattaaggtgacaaagcacatgggactgtgtagagcttggttatcggccggcccggtggcttggcaggcagtgctgtgcgctgctcatggagaagacctgggcttagcaatctccttagttcttgctacacaggatggtgactggaactaaggctacacagagggtcgcacttggactctgagggttgggtgtggaagggggaaaaggagatggagacctgctccccagctcttcctgtcagccggtttacatgggaacagggttaacatctgtgttaggggaggtcaccttaccctttttcataggggaagagtgtcacactcctggctatctcagggggaatggggaaaagaatctttcaagggcaaagaactcgtgggaggatgtctgttgtatgtaatactcacaatggcttttggttagtgttgaaggtgggaagagcatttgtaggtccagaagagtgaaagagagggaggggtgcagcaacatgtgcacaggcacgcacatgtgtgcacgcacacatacaatctgggttatctttgtgctatatagtggattataattctgtgaaaccaagtttgtatattgaattacattaaggagtgttctttaaaaagagaaataaatatacaattacatgctt

SEQ ID NO: 141480 - DNA, 9723 bp, Homo sapiens
  Payload ID: 7818
  Gene Symbol: HIVEP2
  Gene Name: human immunodeficiency virus type I enhancer binding protein 2
  Uniprot ID: P31629
  ENST ID: ENST00000367603
  CDS Start-End: 744-8084
gctggaggcaggaatgtgcctgcttactaatgagcgacgtgcaccggcgcgcacggcccggccaccgctgcggctgcggcggccggcggcggcccgttgtcaggtggagcctttgaattttttaaaagaccatagtaatcagatctacttgaaaaattaagtgaattgatttggttggaatgctcttttaccgatgctttaacatacagccactagattcccagaagttgtgcatgagttcctgtgaggagagttggcatcttggaaatcaaagacggttgtgatgcagttttttgatatgaggataacaggaagcgtcaggacaatcatgcccataagaactctaaactgttcagatcattttatcttagtgaaactggcaattgaactttgctctagttgatgggcaaaatttctcctagactattcatcatcccaatttcatcctagttgaaaattttcaaatgccataagaaatctttatagatttgcacttagcttttggatggacgtttctacaatggagagaactgtgttatagccctggtccaaggacattactagctaatgcccatcgactgtggtgtgcgtgtggaaggttccaaagagaaggagcaatcagcaagtttgcagacaccctggaacatggaagcaaccaagctttaagaagcacagctttggagacactccatgagtctgcactgctttcaggggaactagcacttaagaccttgtgtaacaaaatggacactggggacacagctctaggacaaaaagctacctcaaggtctggagaaactgataaagcatcaggtagatggagacaggaacaatcagctgttattaagatgagcacttttggcagtcatgaaggacagcggcaaccacaaatagagcctgagcaaatcggaaacacagcatcagcacaactgtttggttctgggaaactggcctcccctagtgaagtggtgcagcaagtcgcagagaagcaatatccaccgcatcgtccgagtccttactcatgccaacactcactctctttccctcagcactcattgccacagggggtcatgcacagcaccaagccacatcagagcctcgaaggtcctccgtggcttttccctggccctttgccatccgttgcctctgaggacttatttccttttcctatacatggccacagtggtggttatcctagaaaaaagatttcaagtctgaaccctgcttatagccaatactcccagaaaagtattgaacaggcagaagaggctcacaagaaagagcacaaacccaaaaagcctggcaagtacatttgcccttactgcagcagagcgtgtgccaaacctagtgtactgaaaaaacacatcaggtcccatactggggagcggccatatccatgtataccttgtggtttctctttcaagacaaagagcaatttgtacaagcacaggaagtcacatgcccatgcaattaaggcaggattagtacctttcacagagtcagctgtatctaaattggacctagaggctggttttattgatgtagaagcagaaatacattcagatggtgaacagagtacagacacagatgaggagagttctttatttgccgaggcttctgacaaaatgagtcctggtccacccatcccactggacattgccagcagaggcggctatcatgggtcattggaagaatcattgggaggtccaatgaaggtgccgattttgattatccctaaaagtgggattcctctccctaatgaaagctctcagtatattggccctgatatgctaccaaatccatctttaaatactaaggctgatgattcgcacacagtcaaacagaaacttgcactaagactgtcagagaaaaaaggacaagattctgagccatcgctcaaccttctgagcccgcacagtaaaggaagcactgattctggttacttttctcgctcagaaagtgctgagcagcaaataagccctcccaacacaaatgcaaagtcttatgaagaaatcatctttggaaaatactgtcggcttagtccgagaaatgcactcagtgttacaaccacaagtcaggagcgtgccgcaatgggtaggaagggcataatggaaccattacctcacgttaacaccaggttagatgtcaagatgtttgaagatcctgtttcacagctgatcccaagcaagggagatgtcgaccccagtcaaacgagcatgctgaaatccactaagttcaacagtgagtccagacaaccccagattattccatcatctatcaggaacgaaggaaaactttatccagcaaacttccaaggcagcaacccggttctcttagaagctcctgtagactcttcaccccttattagaagcaactcagtgccaacttcttcagcaactaatctaactattcctccttctttgagaggaagtcactcatttgatgaaaggatgactggttccgacgatgtattctatccagggaccgtgggcataccccctcagcgcatgctaagaagacaagcggcatttgagctgccttcggtacaggagggccacgtggaagtcgagcaccatggcaggatgttgaagggtatcagcagttcatccctgaaggaaaagaaattgtctcctggggacagggttgggtatgactatgatgtctgtcggaaaccctataagaagtgggaggactctgaaacaccaaagcaaaactacagggacatttcctgcttgagttctttaaagcatggtggagaatatttcatggatcccgtggtgccattgcagggagtaccaagcatgtttggaactacctgtgaaaacaggaaacgccggaaagagaagagcgtaggggatgaagaggacacgcccatgatctgcagcagcattgtaagcactcctgtgggcatcatggcttccgattatgaccccaaactgcagatgcaggaaggagtcaggagtggatttgccatggctggacacgaaaacctttctcatggtcacacggaacgctttgacccatgtcggccccaactgcagcctggaagtccatctcttgtgtcagaggagtcaccttcagccattgattcagacaagatgtcagacctagggggcaggaaacctcctggaaatgtgatttctgtgattcagcacaccaactcactgagccgacccaattcatttgaaaggtctgagtcagccgaacttgtggcttgcacacaggataaagccccttccccttcagagacttgtgacagtgagatttcagaagccccagtgagtcctgagtgggctccacctggggatggtgcagaaagtggggggaaaccctctccatctcagcaggtgcagcagcagtcctatcacacacagcccaggctagttcggcaacacaacatccaggttcctgagattcgagtgaccgaggagcctgataaacctgagaaggagaaggaagcccagagcaaagagccagagaagcctgtggaagaatttcagtggccccagagaagtgagaccctttcccagctccccgcggagaagttgccacccaaaaagaagcgtctgcgacttgcagatatggagcactcctcaggggagtccagctttgaatccacaggcacaggcctctcccgcagccccagccaagaaagcaacttgtcccacagctccagtttctccatgtcttttgaaagagaagaaaccagtaagctttctgcacttcctaagcaggatgagtttgggaagcattcagagtttctgactgtccctgctggttcatactcattgtctgtcccaggccatcaccaccagaaagagatgcgacgctgctcatcagagcagatgccttgtcctcacccagcggaagtcccagaagttcggagcaaatcatttgattatgggaatctgtcccatgctcctgtgtcgggagcagcagcctccacggtatcaccgtccagggagaggaagaaatgctttctggtgcggcaagcttccttcagtggctccccagaaatctcccagggcgaggttggcatggatcagagcgtgaagcaagagcagctggagcacctgcatgctggcctccggtccgggtggcaccatggcccgcctgctgtgctgcctcctcttcagcaagaggacccagggaagcaggtggcgggtccttgtcccccgctgagctcggggccactgcacctggcccagccacagatcatgcacatggacagtcaggaatctttgagaaatcccttgatccaaccaacatcctatatgacaagcaagcacttacctgaacagccacacttatttccacatcaagagacaattccattttctccaatccagaatgccttgtttcagtttcagtatcctacagtttgtatggttcatttaccagctcagcagcctccctggtggcaggcacatttcccacatccctttgctcagcaccctcagaagagctatggcaagccctcttttcagacagaaatccattcgagctatcccttagagcatgtggcagagcacactggaaagaaacctgctgagtatgcacacacgaaagagcagacctacccatgttattcaggagcatcagggctacacccaaagaaccttcttccaaagtttccatcagaccagagcagtaagtcaactgaaacgccctctgagcaggttcttcaagaagattttgcctcggcaaatgctgggtctttgcagtccctcccaggaacagtggttcctgttcggatccagacgcacgtaccatcctatggaagtgtcatgtacacaagcatttctcagatacttgggcagaatagccctgccattgtcatatgcaaagtcgatgagaatatgacccaaaggacactggtcaccaacgcagccatgcaagggataggattcaacattgcccaggtgctggggcagcatgcgggcttggagaagtaccccatttggaaagcacctcagactttgcccctcggcttagaatcctccatccccttgtgtttaccttccacctctgacagcgtggccaccctgggaggtagcaagcgaatgctttctccagccagtagcttggagctcttcatggaaaccaagcagcagaaaagggtcaaagaagaaaagatgtacggacagattgtggaggagcttagtgctgtggagctgaccaactcagacatcaaaaaggacctctcccgcccccagaaaccccagctggttcgacaaggatgtgcttctgagccaaaagatggcttgcagtcagggtcatcttccttctcctcgctgtcgccctcctcatctcaagactatccttctgttagcccgtcttccagggagccattcctgcccagcaaggagatgctttccggttcccgggcaccacttccggggcagaagtccagtgggccttctgaaagcaaagaatcttcagatgaattagatatcgatgagacggcatcggacatgagcatgagcccacagagttcttcattaccagcaggagatggtcagctggaagaggaagggaagggccacaagcggcctgttggcatgctggtccgcatggcctctgcccccagcgggaacgtggcagactcaactcttcttctcacggacatggcagatttccagcagattcttcagttccccagtctgcggacaacaactactgtgagttggtgcttcttgaattatacaaaacccaattatgtgcaacaggccaccttcaaatcctcggtttatgcttcatggtgcattagttcctgtaatccaaacccatcaggattgaacaccaagaccacgctggctcttctgaggtccaagcaaaaaatcactgcagaaatttatactctggctgctatgcataggcctggaaccggcaagcttacatcatcaagtgcttggaagcagtttactcagatgaaacctgatgcgtcctttttatttggcagcaaactagaaaggaaactagtgggaaatatcttaaaggaaagagggaaaggagatattcatggagataaagatattggatccaaacaaactgagccaatccgaattaaaatatttgaaggagggtacaaatcgaatgaagattatgtatatgtcagaggacgtggccggggaaagtacatttgtgaagaatgtgggattcgctgtaagaagccaagcatgctcaaaaaacacatccgtacccatactgatgttcggccttatgtatgcaagttatgtaactttgccttcaaaacgaaaggaaacctaacgaagcatatgaaatctaaagcacacatgaaaaaatgcctggaattgggagtctcaatgacatcggtggatgatacagaaactgaggaagcagaaaatttggaagatttgcacaaagcagcagagaagcatagcatgtccagcatttcaactgatcatcagttctccgatgctgaggaatcagatggtgaggatggagatgataatgatgatgatgatgaagatgaagatgactttgacgaccagggagatttaacaccaaaaacaagatcaagaagcaccagtcctcagcctcctagattctcctccttgcctgtgaatgttggcgccgtaccccacggggttccttcagatagttccctgggacattcttcgttgatcagctatttggttactttgccaagtattcgagttactcagcttatgacacccagtgattcatgtgaagatacccagatgacagaataccagaggctattccagagcaaaagtacggactcagaaccagacaaagacagattggacatacctagttgtatggatgaggagtgcatgctaccttcagagccaagctcctctcccagggacttctcaccctcaagccaccattcctctccaggatatgattcttcaccctgtcgagataattcaccaaagaggtatctgatacccaaaggagatttatctcccaggagacatttatcacctaggagagatctgtcacccatgagacatctttcaccaagaaaggaagctgcattgagaagagagatgtcccaaagagatgtttcaccaagaaggcatttgtctccaaggaggccagtgtctcctgggaaagatatcacagcaagaagagacctctctcctagaagagagagaagatacatgaccacaataagagcgccatctcccagaagggctttataccataacccaccattgtccatgggacagtatttgcaagcagagccaattgtattggggcctcctaatttaagaagaggattacctcaggttccttacttcagtctctatggagaccaagaaggtgcttatgaacatccaggctccagccttttccctgagggtcctaatgactatgtcttcagtcatcttccactccactctcagcaacaagtgcgagcccctatccccatggtgcccgttggtgggatccagatggttcactccatgccgccagccctttccagtttacatccttcacccacattgcccctgccaatggagggctttgaggagaagaaaggcgcgtcaggggagtccttctccaaggacccctatgtgctttctaagcagcatgagaagcgaggtcctcacgctttgcagtcatctggtccacctagcactccctcctctcctcggctgttgatgaaacagagcacttcggaagacagcctaaacgcaacagagcgggaacaggaggaaaatatacagacttgtacaaaagccattgcctctctccggattgccacggaagaggcagctctgctcgggccagatcagccagcgcgggtgcaggagccccaccagaaccccctgggaagtgcacatgttagcattagacactttagtagacctgagccaggtcagccctgtacctcagccacccaccctgacttgcatgatggtgaaaaggacaattttggtacatcacagactccattagctcactccacgttttacagcaagagttgtgtggatgacaagcagttggactttcacagcagcaaggaattatcttcaagcacagaggaaagcaaagatccttcatcagaaaagagtcagctacattgatctatgatgcatggagactttcatttccacattttcccatttttttgtttttgtttttctagaaatggaggtaatccagtttatagcatgcctgtcctaagttacagtagtttgctattatatatacttttgttatatcaaaagaattaggtaaattaacaagtcatcatgagcctgaccaaaacaaaatttgaaattaacctattgggtctggtacttttaaaattgtacagatgtttgtgccttttctttactttgcttatattcttataagcattttttagcagtaatttgtacatattttagaatttgtgtatctgctttgtaataaatgtaatttctttccttttttggacacttggatctaaatgatgtaaagcaaaacagcatcaatatatatgtgaggttgcactaaaacatatttttatatgattaaaactgaacagcttttatgtacagctctgattctgtaatactaatatttatttactttgtttcataaattgtacattttttcttaatgttgtggattgcttttctatgtgaagcatgggatttactgttgcgtaactagaacaaaaatgtacattgtaaacaagatatttaaactagagtatcttattctgcacttatgcattagttaaaaaaagataaaggatgtatcagtcagttcttaactcttgtatatttttttgtctcttgtttgctggattgactataacttaagtgctgattgtgattttaaaatgatagtaccgtaaagcattaaagtaaacaatgtgctattgtgagttttttcaaagctttataaatcagttataaataatattaaaagtatttggtcttatgtgaacatgttgatctatatactcatctaaaaatatgggaaaacattccaccccatgtaaatatgtacaagtgcatcactggtacaattttatgtaactcagttggacactaggttgccacagacctatgctaggtgtctttaaaaaattaaggtgacaaagcacatgggactgtgtagagcttggttatcggccggcccggtggcttggcaggcagtgctgtgcgctgctcatggagaagacctgggcttagcaatctccttagttcttgctacacaggatggtgactggaactaaggctacacagagggtcgcacttggactctgagggttgggtgtggaagggggaaaaggagatggagacctgctccccagctcttcctgtcagccggtttacatgggaacagggttaacatctgtgttaggggaggtcaccttaccctttttcataggggaagagtgtcacactcctggctatctcagggggaatggggaaaagaatctttcaagggcaaagaactcgtgggaggatgtctgttgtatgtaatactcacaatggcttttggttagtgttgaaggtgggaagagcatttgtaggtccagaagagtgaaagagagggaggggtgcagcaacatgtgcacaggcacgcacatgtgtgcacgcacacatacaatctgggttatctttgtgctatatagtggattataattctgtgaaaccaagtttgtatattgaattacattaaggagtgttctttaaaaagagaaataaatatacaattacatgcttg

SEQ ID NO: 141481 - DNA, 9621 bp, Homo sapiens
  Payload ID: 7818
  Gene Symbol: HIVEP2
  Gene Name: human immunodeficiency virus type I enhancer binding protein 2
  Uniprot ID: P31629
  ENST ID: ENST00000367604
  CDS Start-End: 641-7981
gtggagcctttgaattttttaaaagaccatagtaatcagatctacttgaaaaattaagtgaattgatttggttggaatgctcttttaccgatgctttaacatacagccactagattcccagaagttgtgcatgagttcctgtgaggagagttggcatcttggaaatcaaagacggttgtgatgcagttttttgatatgaggataacaggaagcgtcaggacaatcatgcccataagaactctaaactgttcagatcattttatcttagtgaaactggcaattgaactttgctctagttgatgggcaaaatttctcctagactattcatcatcccaatttcatcctagttgaaaattttcaaatgccataagaaatctttatagatttgcacttagcttttggatggacgtttctacaatggagagaactgtgttatagccctggtccaaggacattactagctaatgcccatcgactgtggtgtgcgtgtggaaggttccaaagagaaggagcaatcagcaagtttgcagacaccctggaacatggaagcaaccaagctttaagaagcacagctttggagacactccatgagtctgcactgctttcaggggaactagcacttaagaccttgtgtaacaaaatggacactggggacacagctctaggacaaaaagctacctcaaggtctggagaaactgataaagcatcaggtagatggagacaggaacaatcagctgttattaagatgagcacttttggcagtcatgaaggacagcggcaaccacaaatagagcctgagcaaatcggaaacacagcatcagcacaactgtttggttctgggaaactggcctcccctagtgaagtggtgcagcaagtcgcagagaagcaatatccaccgcatcgtccgagtccttactcatgccaacactcactctctttccctcagcactcattgccacagggggtcatgcacagcaccaagccacatcagagcctcgaaggtcctccgtggcttttccctggccctttgccatccgttgcctctgaggacttatttccttttcctatacatggccacagtggtggttatcctagaaaaaagatttcaagtctgaaccctgcttatagccaatactcccagaaaagtattgaacaggcagaagaggctcacaagaaagagcacaaacccaaaaagcctggcaagtacatttgcccttactgcagcagagcgtgtgccaaacctagtgtactgaaaaaacacatcaggtcccatactggggagcggccatatccatgtataccttgtggtttctctttcaagacaaagagcaatttgtacaagcacaggaagtcacatgcccatgcaattaaggcaggattagtacctttcacagagtcagctgtatctaaattggacctagaggctggttttattgatgtagaagcagaaatacattcagatggtgaacagagtacagacacagatgaggagagttctttatttgccgaggcttctgacaaaatgagtcctggtccacccatcccactggacattgccagcagaggcggctatcatgggtcattggaagaatcattgggaggtccaatgaaggtgccgattttgattatccctaaaagtgggattcctctccctaatgaaagctctcagtatattggccctgatatgctaccaaatccatctttaaatactaaggctgatgattcgcacacagtcaaacagaaacttgcactaagactgtcagagaaaaaaggacaagattctgagccatcgctcaaccttctgagcccgcacagtaaaggaagcactgattctggttacttttctcgctcagaaagtgctgagcagcaaataagccctcccaacacaaatgcaaagtcttatgaagaaatcatctttggaaaatactgtcggcttagtccgagaaatgcactcagtgttacaaccacaagtcaggagcgtgccgcaatgggtaggaagggcataatggaaccattacctcacgttaacaccaggttagatgtcaagatgtttgaagatcctgtttcacagctgatcccaagcaagggagatgtcgaccccagtcaaacgagcatgctgaaatccactaagttcaacagtgagtccagacaaccccagattattccatcatctatcaggaacgaaggaaaactttatccagcaaacttccaaggcagcaacccggttctcttagaagctcctgtagactcttcaccccttattagaagcaactcagtgccaacttcttcagcaactaatctaactattcctccttctttgagaggaagtcactcatttgatgaaaggatgactggttccgacgatgtattctatccagggaccgtgggcataccccctcagcgcatgctaagaagacaagcggcatttgagctgccttcggtacaggagggccacgtggaagtcgagcaccatggcaggatgttgaagggtatcagcagttcatccctgaaggaaaagaaattgtctcctggggacagggttgggtatgactatgatgtctgtcggaaaccctataagaagtgggaggactctgaaacaccaaagcaaaactacagggacatttcctgcttgagttctttaaagcatggtggagaatatttcatggatcccgtggtgccattgcagggagtaccaagcatgtttggaactacctgtgaaaacaggaaacgccggaaagagaagagcgtaggggatgaagaggacacgcccatgatctgcagcagcattgtaagcactcctgtgggcatcatggcttccgattatgaccccaaactgcagatgcaggaaggagtcaggagtggatttgccatggctggacacgaaaacctttctcatggtcacacggaacgctttgacccatgtcggccccaactgcagcctggaagtccatctcttgtgtcagaggagtcaccttcagccattgattcagacaagatgtcagacctagggggcaggaaacctcctggaaatgtgatttctgtgattcagcacaccaactcactgagccgacccaattcatttgaaaggtctgagtcagccgaacttgtggcttgcacacaggataaagccccttccccttcagagacttgtgacagtgagatttcagaagccccagtgagtcctgagtgggctccacctggggatggtgcagaaagtggggggaaaccctctccatctcagcaggtgcagcagcagtcctatcacacacagcccaggctagttcggcaacacaacatccaggttcctgagattcgagtgaccgaggagcctgataaacctgagaaggagaaggaagcccagagcaaagagccagagaagcctgtggaagaatttcagtggccccagagaagtgagaccctttcccagctccccgcggagaagttgccacccaaaaagaagcgtctgcgacttgcagatatggagcactcctcaggggagtccagctttgaatccacaggcacaggcctctcccgcagccccagccaagaaagcaacttgtcccacagctccagtttctccatgtcttttgaaagagaagaaaccagtaagctttctgcacttcctaagcaggatgagtttgggaagcattcagagtttctgactgtccctgctggttcatactcattgtctgtcccaggccatcaccaccagaaagagatgcgacgctgctcatcagagcagatgccttgtcctcacccagcggaagtcccagaagttcggagcaaatcatttgattatgggaatctgtcccatgctcctgtgtcgggagcagcagcctccacggtatcaccgtccagggagaggaagaaatgctttctggtgcggcaagcttccttcagtggctccccagaaatctcccagggcgaggttggcatggatcagagcgtgaagcaagagcagctggagcacctgcatgctggcctccggtccgggtggcaccatggcccgcctgctgtgctgcctcctcttcagcaagaggacccagggaagcaggtggcgggtccttgtcccccgctgagctcggggccactgcacctggcccagccacagatcatgcacatggacagtcaggaatctttgagaaatcccttgatccaaccaacatcctatatgacaagcaagcacttacctgaacagccacacttatttccacatcaagagacaattccattttctccaatccagaatgccttgtttcagtttcagtatcctacagtttgtatggttcatttaccagctcagcagcctccctggtggcaggcacatttcccacatccctttgctcagcaccctcagaagagctatggcaagccctcttttcagacagaaatccattcgagctatcccttagagcatgtggcagagcacactggaaagaaacctgctgagtatgcacacacgaaagagcagacctacccatgttattcaggagcatcagggctacacccaaagaaccttcttccaaagtttccatcagaccagagcagtaagtcaactgaaacgccctctgagcaggttcttcaagaagattttgcctcggcaaatgctgggtctttgcagtccctcccaggaacagtggttcctgttcggatccagacgcacgtaccatcctatggaagtgtcatgtacacaagcatttctcagatacttgggcagaatagccctgccattgtcatatgcaaagtcgatgagaatatgacccaaaggacactggtcaccaacgcagccatgcaagggataggattcaacattgcccaggtgctggggcagcatgcgggcttggagaagtaccccatttggaaagcacctcagactttgcccctcggcttagaatcctccatccccttgtgtttaccttccacctctgacagcgtggccaccctgggaggtagcaagcgaatgctttctccagccagtagcttggagctcttcatggaaaccaagcagcagaaaagggtcaaagaagaaaagatgtacggacagattgtggaggagcttagtgctgtggagctgaccaactcagacatcaaaaaggacctctcccgcccccagaaaccccagctggttcgacaaggatgtgcttctgagccaaaagatggcttgcagtcagggtcatcttccttctcctcgctgtcgccctcctcatctcaagactatccttctgttagcccgtcttccagggagccattcctgcccagcaaggagatgctttccggttcccgggcaccacttccggggcagaagtccagtgggccttctgaaagcaaagaatcttcagatgaattagatatcgatgagacggcatcggacatgagcatgagcccacagagttcttcattaccagcaggagatggtcagctggaagaggaagggaagggccacaagcggcctgttggcatgctggtccgcatggcctctgcccccagcgggaacgtggcagactcaactcttcttctcacggacatggcagatttccagcagattcttcagttccccagtctgcggacaacaactactgtgagttggtgcttcttgaattatacaaaacccaattatgtgcaacaggccaccttcaaatcctcggtttatgcttcatggtgcattagttcctgtaatccaaacccatcaggattgaacaccaagaccacgctggctcttctgaggtccaagcaaaaaatcactgcagaaatttatactctggctgctatgcataggcctggaaccggcaagcttacatcatcaagtgcttggaagcagtttactcagatgaaacctgatgcgtcctttttatttggcagcaaactagaaaggaaactagtgggaaatatcttaaaggaaagagggaaaggagatattcatggagataaagatattggatccaaacaaactgagccaatccgaattaaaatatttgaaggagggtacaaatcgaatgaagattatgtatatgtcagaggacgtggccggggaaagtacatttgtgaagaatgtgggattcgctgtaagaagccaagcatgctcaaaaaacacatccgtacccatactgatgttcggccttatgtatgcaagttatgtaactttgccttcaaaacgaaaggaaacctaacgaagcatatgaaatctaaagcacacatgaaaaaatgcctggaattgggagtctcaatgacatcggtggatgatacagaaactgaggaagcagaaaatttggaagatttgcacaaagcagcagagaagcatagcatgtccagcatttcaactgatcatcagttctccgatgctgaggaatcagatggtgaggatggagatgataatgatgatgatgatgaagatgaagatgactttgacgaccagggagatttaacaccaaaaacaagatcaagaagcaccagtcctcagcctcctagattctcctccttgcctgtgaatgttggcgccgtaccccacggggttccttcagatagttccctgggacattcttcgttgatcagctatttggttactttgccaagtattcgagttactcagcttatgacacccagtgattcatgtgaagatacccagatgacagaataccagaggctattccagagcaaaagtacggactcagaaccagacaaagacagattggacatacctagttgtatggatgaggagtgcatgctaccttcagagccaagctcctctcccagggacttctcaccctcaagccaccattcctctccaggatatgattcttcaccctgtcgagataattcaccaaagaggtatctgatacccaaaggagatttatctcccaggagacatttatcacctaggagagatctgtcacccatgagacatctttcaccaagaaaggaagctgcattgagaagagagatgtcccaaagagatgtttcaccaagaaggcatttgtctccaaggaggccagtgtctcctgggaaagatatcacagcaagaagagacctctctcctagaagagagagaagatacatgaccacaataagagcgccatctcccagaagggctttataccataacccaccattgtccatgggacagtatttgcaagcagagccaattgtattggggcctcctaatttaagaagaggattacctcaggttccttacttcagtctctatggagaccaagaaggtgcttatgaacatccaggctccagccttttccctgagggtcctaatgactatgtcttcagtcatcttccactccactctcagcaacaagtgcgagcccctatccccatggtgcccgttggtgggatccagatggttcactccatgccgccagccctttccagtttacatccttcacccacattgcccctgccaatggagggctttgaggagaagaaaggcgcgtcaggggagtccttctccaaggacccctatgtgctttctaagcagcatgagaagcgaggtcctcacgctttgcagtcatctggtccacctagcactccctcctctcctcggctgttgatgaaacagagcacttcggaagacagcctaaacgcaacagagcgggaacaggaggaaaatatacagacttgtacaaaagccattgcctctctccggattgccacggaagaggcagctctgctcgggccagatcagccagcgcgggtgcaggagccccaccagaaccccctgggaagtgcacatgttagcattagacactttagtagacctgagccaggtcagccctgtacctcagccacccaccctgacttgcatgatggtgaaaaggacaattttggtacatcacagactccattagctcactccacgttttacagcaagagttgtgtggatgacaagcagttggactttcacagcagcaaggaattatcttcaagcacagaggaaagcaaagatccttcatcagaaaagagtcagctacattgatctatgatgcatggagactttcatttccacattttcccatttttttgtttttgtttttctagaaatggaggtaatccagtttatagcatgcctgtcctaagttacagtagtttgctattatatatacttttgttatatcaaaagaattaggtaaattaacaagtcatcatgagcctgaccaaaacaaaatttgaaattaacctattgggtctggtacttttaaaattgtacagatgtttgtgccttttctttactttgcttatattcttataagcattttttagcagtaatttgtacatattttagaatttgtgtatctgctttgtaataaatgtaatttctttccttttttggacacttggatctaaatgatgtaaagcaaaacagcatcaatatatatgtgaggttgcactaaaacatatttttatatgattaaaactgaacagcttttatgtacagctctgattctgtaatactaatatttatttactttgtttcataaattgtacattttttcttaatgttgtggattgcttttctatgtgaagcatgggatttactgttgcgtaactagaacaaaaatgtacattgtaaacaagatatttaaactagagtatcttattctgcacttatgcattagttaaaaaaagataaaggatgtatcagtcagttcttaactcttgtatatttttttgtctcttgtttgctggattgactataacttaagtgctgattgtgattttaaaatgatagtaccgtaaagcattaaagtaaacaatgtgctattgtgagttttttcaaagctttataaatcagttataaataatattaaaagtatttggtcttatgtgaacatgttgatctatatactcatctaaaaatatgggaaaacattccaccccatgtaaatatgtacaagtgcatcactggtacaattttatgtaactcagttggacactaggttgccacagacctatgctaggtgtctttaaaaaattaaggtgacaaagcacatgggactgtgtagagcttggttatcggccggcccggtggcttggcaggcagtgctgtgcgctgctcatggagaagacctgggcttagcaatctccttagttcttgctacacaggatggtgactggaactaaggctacacagagggtcgcacttggactctgagggttgggtgtggaagggggaaaaggagatggagacctgctccccagctcttcctgtcagccggtttacatgggaacagggttaacatctgtgttaggggaggtcaccttaccctttttcataggggaagagtgtcacactcctggctatctcagggggaatggggaaaagaatctttcaagggcaaagaactcgtgggaggatgtctgttgtatgtaatactcacaatggcttttggttagtgttgaaggtgggaagagcatttgtaggtccagaagagtgaaagagagggaggggtgcagcaacatgtgcacaggcacgcacatgtgtgcacgcacacatacaatctgggttatctttgtgctatatagtggattataattctgtgaaaccaagtttgtatattgaattacattaaggagtgttctttaaaaagagaaataaatatacaattacatgcttga

SEQ ID NO: 141482 - DNA, 12110 bp, Homo sapiens
  Payload ID: 7819
  Gene Symbol: HIVEP3
  Gene Name: human immunodeficiency virus type I enhancer binding protein 3
  Uniprot ID: Q5T1R4
  ENST ID: ENST00000247584
  CDS Start-End: 807-8027
ccacaggcctccctccaacacagttctccaagctctagaaatctctgacacatcttgaccatgagaccacggctggtttttggcaggattcgaggcacaaacccagcagcctcaacctagttcatggaggagcctcgcggggtcctggccaagcaagcccgcccctctggtgggaagagcggcgcctaggtggagggtggctgccgtaggagtggacatgaatgctggctttcagagagaacagcgtttcagttttggtcatcggaagtggtgccttcagcacagaagaagagcgtgatttctcctccaaggccgttgatctccaacccagaactaaaggggagaagagccacccccagcatccagcgtggcatctcttgtgccaggaccagggatgactgggccatggacacagatgtctccaaccttcaaccgtttgcatagcacacgggggactcgtgggggccacctgccactgccagctgaaacaatacaatggcaatactgacatccttcatgacgttttcccgacagacattcaggcagaaagtgctggtgcgttttctgtctgcaaagtagagggccatgcctcaccaatagaatagcgtgggccctgatgacctgctccgagtccactcacagccagtgacacttgcaaaaaactcccaaagccgtcttgggtttggctcccacagctcttgaccaatgtggccaaagctggacacctccttgggacactgggattattcataaatgcagcccgccctgactctccctgaatagcatctgaagtctttgtgaaggtcatggatcctgaacaaagtgtcaagggcaccaagaaggctgagggaagtccccggaagcggctgaccaaaggagaggccattcagaccagtgtttcttccagcgtcccatacccaggcagcggcacagctgccacccaagagagccccgcccaagagctcttagccccgcagcccttcccgggcccctcatcagttcttagggaaggctctcaggagaaaacgggccagcagcagaagccccccaaaaggccccccatcgaagcatccgtccacatctcacagcttccgcagcaccctctgacaccagcattcatgtcgcctggcaaacctgagcatctcctggaggggtccacatggcaactggttgaccccatgagacctggaccctctggctccttcgtggcccctgggctccatcctcagagccagctccttccttcccacgcttccatcattccccccgaggaccttcctggagtccccaaagtcttcgtgcctcgtccttcccaggtctccttgaagcccacagaagaggcacacaagaaggagaggaagccccagaagccaggcaagtacatctgccagtactgcagccggccctgtgccaagcccagcgtgctccagaagcacattcgctcacacacaggtgagaggccctacccctgcggcccctgtggcttctccttcaagaccaagagtaatctctacaagcacaggaagtcccatgcccaccgcatcaaagcaggcctggcctcaggcatgggtggcgagatgtacccacatgggctggagatggagcggatccctggggaagagtttgaggagcccactgagggagaaagcacagattctgaagaggagactagtgccacctctggtcaccctgcagagctctccccaagacccaagcagccccttctctccagcgggctatacagctctgggagccacagttccagccacgaacgctgttccctgtcccagtccagcacagcccagtcactcgaagacccccctccatttgtggaaccctcatctgagcaccccctgagccataaacctgaagacacccacacgattaagcagaagctggccctccgcttaagcgagaggaagaaggtgatcgatgagcaggcgtttctgagcccaggcagcaaagggagtactgagtctgggtatttctctcgctccgagagtgcagagcagcaggtcagccccccaaacaccaacgccaagtcctacgctgagatcatctttggcaagtgtgggcgaataggacagcggaccgccatgctgacagccacctccacccagcccctcctgcccctgtccaccgaagacaagcccagcctggtgcctttgtctgtaccccggacgcaggtgatcgagcacatcacgaagctcatcaccatcaacgaggccgtggtggacaccagcgagatcgacagcgtgaagccaaggcggagctcactgtccaggcgcagcagcatggagtccccaaaatccagcctctaccgggagcccctgtcatcccacagtgagaaaaccaagcctgaacaatcactgctgagcctccagcacccgcccagtaccgccccccctgtgcctctcctgagaagccactcaatgccttctgccgcctgcactatcagcaccccccaccaccccttccgaggtagctactccttcgatgaccatatcaccgactccgaagccctgagccacagcagtcacgtgtttacctcccacccccggatgctgaagcgccagccggcaatcgaattacctttgggaggggaatacagttctgaggagcctggcccaagcagcaaagacacagcctccaagccctcggacgaagtggaacccaaggaaagcgagcttaccaaaaagaccaagaagggtttgaaaacaaaaggggtgatctacgaatgtaacatatgtggtgctcggtacaagaaaagggataactacgaagcccacaaaaaatactactgctcagagcttcagatcgcaaagcccatctctgcaggcacccacacatctccagaagctgaaaagagtcagattgagcatgagccgtggtcccaaatgatgcattacaaactgggaaccaccctggaactcactccactgaggaagaggaggaaagagaagagccttggggacgaggaagagccacctgcctttgagtccacaaaaagtcagtttggcagccccgggccatctgatgctgctcggaaccttcccctggagtccaccaagtcaccagcagaaccaagtaaatcagtgccctccttggagggacccacgggcttccagccaaggactcccaagccagggtccggttcagaatcagggaaggagaggagaacaacgtccaaagaaatttctgtcatccagcacaccagctcctttgagaaatctgattctctcgagcagccgagtggcttggaaggggaagacaaacctctggcccagttcccatcacccccacctgccccacacggacgctctgctcactccctgcagcctaagttggtccgccagcccaacattcaggttcctgagatcctagtaactgaggagcctgaccggccggacacagagccagagccgccccctaaggaacctgagaagactgaggagttccaatggccccagcgcagccagacacttgcccagctcccagctgagaagctgccacccaaaaagaagaggttgcgcctggcagagatggcccaatcatcaggggagtccagcttcgagtcctctgtgcctctgtctcgcagcccgagccaggaaagcaatgtctctttgagtgggtccagccgctcagcctcgtttgagagggatgaccatgggaaagccgaggcccccagtccctcatctgacatgcgccccaaacccctgggcacccacatgttgactgtccccagccaccacccacatgcccgagagatgcggaggtcagcctcagagcagagccccaacgtttcccattctgcccacatgaccgagacacgcagcaaatcctttgactatggcagcttgtccttgacaggcccttctgctccagccccagtggctccaccagcgcgggtggccccgccagagagaagaaaatgcttcttggtgagacaggcctctctgagcaggcctccagaatctgagttggaggttgcccccaagggaagacaggagagcgaagaaccacagccctcatccagtaaaccctctgccaaaagctcattgtcccagatttcctctgcggccacctcacatggtggacccccgggaggcaagggcccagggcaggacaggcccccattggggcccactgtgccctacacagaagcactgcaagtgttccaccaccccgttgcccagacacccctgcatgagaagccatacctgcccccaccagtctcccttttctccttccagcatctcgtgcagcatgagccaggacagtctccagaattcttctccacccaggccatgtccagcctcctgtcctcaccatactccatgcccccacttcctccctccttatttcaagccccaccgcttcctctccagcctactgttctgcacccaggccaactccatctcccccagctcatgcctcacccagccaacatccccttcaggcagcccccttccttcctccccatgccatacccgacctcctcagcactgtcttctgggtttttcctgcctctgcaatcccagtttgcacttcagctccctggtgatgtggaaagccatctgccccagatcaaaaccagcctggccccactggcaacaggaagtgctggcctctcccccagcacagagtacagcagtgacatccggctaccccctgtggctcccccagccagctcctcagcacctacatcagctcctccactggccctgcctgcctgtccagacaccatggtgtccctggttgtgcctgtccgtgttcagaccaatatgccgtcctatgggagcgcaatgtacaccaccctttcccagatcttggtcacccagtcccaaggcagctcagcaactgtggcacttcccaagtttgaggaacccccatcaaaggggacgactgtatgtggtgcagatgtgcatgaggttgggcccggcccttctgggttaagtgaagagcaaagcagagctttcccaactccatacctgagagtgcctgtgacattacctgaaagaaaaggcacttccctgtcatcagagagtatcttgagcctggaggggagttcatcaacagcagggggaagcaaacgtgtcctttcaccagctggcagccttgaacttaccatggaaacccagcagcaaaaaagagtgaaggaggaggaggcttccaaggcagatgaaaaacttgagctggtaaaaccatgcagtgtggtccttaccagcaccgaggatgggaagaggccagagaaatcccacttaggcaaccagggccaaggcaggagggagctagaaatgctgtccagcctgtcctcagatccatctgacacaaaggaaattcctcccctccctcaccctgcattgtcccatgggacagccccaggctcagaagctttgaaggaatatccccagccatctggcaaacctcaccgaagagggttgaccccactgagcgtgaagaaagaagattccaaggaacaacctgatctcccctccttggcacctccgagctctctgcctctgtcagaaacgtcctccagaccagccaagtcacaagaaggtacggactcaaagaaggtactgcagttccccagcctccacacaaccactaatgtcagttggtgctatttaaactacattaagccaaatcacatccagcatgcagataggaggtcctctgtttacgctggttggtgcataagtttgtacaaccccaaccttccgggggtttccactaaagctgctttgtccctcctgaggtctaagcagaaagtgagcaaagagacatacaccatggccacagctccgcatcctgaggcaggaaggcttgtgccatccagctcccgcaagccccgcatgacagaggttcacctcccttcactggtttccccggaaggccagaaagatctagctagagtggagaaggaagaagagaggagaggggagccggaggaggatgctcctgcctcccagagaggggagccggcgaggatcaaaatcttcgaaggagggtacaaatcaaacgaagagtatgtatatgtgcgaggccgcggccgagggaaatatgtttgtgaggagtgtggaattcgctgcaagaagcccagcatgctgaagaaacacatccgcacccacactgacgtccggccctatgtgtgcaagcactgtcactttgcttttaaaaccaaagggaatctgactaagcacatgaagtcgaaggcccacagcaaaaagtgccaagagacaggggtgctggaggagctggaagccgaagaaggaaccagtgacgacctgttccaggactcggaaggacgagagggttcagaggctgtggaggagcaccagttttcggacctggaggactcggactcagactcagacctggacgaagacgaggatgaggatgaggaggagagccaggatgagctgtccagaccatcctcagaggcgcccccgcctggcccaccacatgcactgcgggcagactcctcacccatcctgggccctcagcccccagatgcccccgcctctggcacggaggctacacgaggcagctcggtctcggaagctgagcgcctgacagccagcagctgctccatgtccagccagagcatgccgggcctcccctggctgggaccggcccctctgggctctgtggagaaagacacaggctcagccttgagctacaagcctgtgtccccaagaagaccgtggtccccaagcaaagaagcaggcagccgtccaccactagcccgcaaacactcgctaaccaaaaacgactcatctccccagcgatgctccccggcccgagaaccacaggcctcagccccaagcccacctggcctgcacgtggacccaggaaggggcatgggcgctctcccttgtgggtctccaagacttcagctgtctcctctcaccctctgccccctgggaagagaactggcccctcgagcacatgtgctctccaaactcgagggtaccaccgacccaggcctccccagatactcgcccaccaggagatggtctccaggtcaggccgagtcaccaccacggtcagcgccgccagggaagtgggccttggctgggccgggcagcccctcagcgggggagcatggcccaggcttggggctggacccacgggttctcttcccgcccgcgcctctacctcacaagctcctcagcagaagcccagagacctgcgcctccccgtggcagaaggccgagtcccgaagtccctcctgctcacccggccctgctcatcctctctcctcccgacccttctccgccctccatgacttccacggccacatcctggcccggacagaggagaacatcttcagccacctgcctctgcactcccagcacttgacccgtgccccatgtcccttgattcccatcggtgggatccagatggtgcaggcccggccaggagcccaccccaccctgctgccagggcccaccgcagcctgggtcagtggcttctccgggggtggcagcgacctgacaggggcccgggaggcccaggagcgaggccgctggagtcccactgagagctcgtcagcctccgtgtcgcctgtggctaaggtctccaaattcacactctcctcagagctggagggcggggactaccccaaggagagggagaggaccggcggaggcccgggcaggcctcctgactggacaccccatgggaccggggcacctgcagagcccacacccacgcacagcccctgcaccccacccgacaccttgccccggccgccccagggacgccgggcagcgcagtcctggagcccccgcttggagtccccgcgtgcaccgaccaaccccgagccttctgccaccccgccgctggaccgcagcagctctgtgggctgcctggcagaggcctctgcccgcttcccagcccggacgaggaacctctccggggaacccaggaccaggcaggactcccccaagccctcaggaagtggggagcccagggcacatccacatcagcctgaggacagggttccccccaacgcttagcctctctccaactgcttcagcatctggcttccagtgtccagcaacagacgtttccagccactttcctcgaatcatcccacttcctcagccccatctgtccctccgtccaggagctctcacggccccatctgttgtaccttcccatgtatgcagttacctgtgcctttttctacaccttttgttgcttaaaaagaaacaaaacaaatcacatacatacatttaaaaaaaaaacaacaacccacgaggagtctgaggctgtgaatagtttatggttttggggaaaggctgatggtgaagcctcctgaccctccccgctgtggttggcagccacccaccccagaggctggcagagggaaaggggtacactgagggagaaaggaaaaggaaacttcaaacaatatagaattaaatgtaaaaggaagcactcctgtgtacagatgcgatcaaggttcctgtttattgccacttcacccccctgcccagctcgtagccacccctctctgccagcagaaaggccagtgtccccaggcagaggggcacaaacacaggcaggtgacccccacccaggccccagcaggcaggcccagaaaaactaatcttttccttttttttttttttttttttttttgcaagaaaataaaatgatacttttcctaggatttcaacacaaaataataggtgcaggtagaaggaggagggctggctccccaagggctcctggatactctggtagtctgagtcatgggcccatcctggcactccacaggtgggcaggccaccccacccacgcacccccactccagacacctcccttctgcaccccaccctggccccctgggctggggaaggagccctgactgtccgtccctggctcccaagcccctgaccgaggcctcactctcctgttgcctcctctgttctaaaaccaccaaaccacccacaaaggcagaagtggcagggcccgagccctagcggccgttcctgagactgggttttgggttttgtttcatcttggtccctggggtacaagggagcctgttcccctcatggctgggtttttccagttctccacagcagaggtttgcggggaactgtttcaggaccactttgccacaggaccgtttccccccgtccctgcccctgtctccactaccccaaggaaatacccacaactgtggctggtggatacggcctggacctgtttgctgtcttacacctcttttttaaaaagagagaggatggtgtttgatacttcacccagccaccacagattcttttgacctagaggatttttgaattgtcctaactcgttggaattctccaaagcaatcagtgtgagccagtgcctcttccttacccacatctctactttcaagaagctgccctgcatttcctggggcaaaactctactttgtaagaaaaataataggaccagaaatttaaatcccaaattgaactatggaacttgaactctagcgtgttcgccccaactgggagaggtgagctttttcccagtgtttcagaactgattttctttactttctacaagggagggcagcacagggactacggttgaggcccgtgaaggctgggtttgatgccaccctatacagagcagggacctctctggctaatccccagtcctcagccaggctgtgtgaatcaagtgcctgccccagggctcttgagctattgaagctgcttgggtacaggacacagtaggtggggagggttaagacccttctgtgagttccctgtgcggggctgtacttgcctcttccaattcgtggcctttccctgcttggtccctactagacagacaaaccagccacagtccagcctgcagccagaccaccttgttcactcattctcctttgcctcagagctaagacaaaaatgagacagaaggcagggctccctgggagtccactgtgctccagggttctggggaatcagggttagccagcagctcctggctgcttccctcagagactagggctctcatcctccccaagagaagcagcaagcccagcctggaccacactgtccatattgctggacagtggcctgacagaaagtgactcctccaagtcccaggaggccagggcttttctcatccttgcctttcagccctaacccatgggactgcccacggattggagacttcaagggctgaggtctgggagctgcataaagggcattgcttcagcccaggttagaaatctgcctgggcaagctcttcctgccccagacctacaaagcagcagaccgggggctctggtggactagcccctgacattggtggggggccccacaccactccaccccaccctgccttccagctctcctgggcatttttctccctgtactcaaacagcctacccacccaaggtttcctccctgggcagcctagcaatgaacagtgcagccggcagggcagaggcccggcagtcaccgggcccgtcaggctcaggcagagaagccacaggggccaggagtcactggagactatttctaaatgatgggggtaaatgcacaaatagaatctcaccaaagggctgcctccacattgatgccgtgcccagagggacagaaccaatgccaccagcctgggtatatgtcactgggcacagctctaaccccctcctccggactctagtcccgctcctctgcgcacagagcccccagcccacaggtacaccttcatgatttggagaaagacgctcgccccatgcacgccctcctctgggccttctgccctgctcccagtcacttccaagcttcctgtttgcctgtgatgttattgtgcctgttgagggaagcagcagaggaggcagtggctgacttggcacagatgcctgctacgtgctctgttgaaatgcgcggggtggccattcctcggtacagactagtcctggtccttgggtgtgggcagtgggggaggaaccaactggtcgaggtttcagagccaaaccttgcctttggttggtgagtccttgccccccaggcctgcgctccacgatgcctttcacccttggcaatctcagggccatcctgggtagtaaccccactcctctctgctcccgcccgcacctgtggctctcactctgggctcaacccctgcaaccctccaggagcccgacagcagccagctgcctgcactgtcgcctccgtaagctccaacttccagacccagaagtccctctgcttccctctgttggaaaaagcctaaaagaattagcttccagattcctctagcccctgctccattcccacccagtccttctgaagaggaatgagcaatacatctgagctggatttctctctagtcctttctccagacaaatccttcttaaagcaaaagtcctggctgagcacctgtccttggggaccgatctgccgtgtgaccaggggaagaaagttcccgaaagcctgttccaccaattctgcttctgtgttgtgaatccagtctgctttccattagaaaaccgcttcggcacttatggtcactttaataaatctagtatgtaaaaaaagaaagaaagaaaagaaacagaaaaaagaaacgtgcaggcaaatgtaaaatacaatgctctctgtaagataaatatttgcctttttttctaaaaggtgtacgtattctgtatgtgaaattgtctgtagaaagtttctatgttcttaaatggcaatacattccaaaaattgtactgtagatatgtacagcaaccgcactgggatggggtagttttgcctgtaattttatttaaactccagtttccacacttgcatcttgcaatgttggtatggtatatatcagtgcaaaagaaaaaacaaaacagaaacaaacaaaaaaaaaaaacaaaaatccacgcaggtctaaagcacagagtctgacgtacaaaaggaaaaatgctcagtattgatgtgtgtgacctttgttgtaaattacatctgtactgtgaatgagaagtttttacaagtataataattgcctttattacagctctggctgagtgttcagcctgaggatattttttaaaaaaaaaagaattagcatgttggaataaatttgaaaatcccaac

SEQ ID NO: 141483 - DNA, 12193 bp, Homo sapiens
  Payload ID: 7819
  Gene Symbol: HIVEP3
  Gene Name: human immunodeficiency virus type I enhancer binding protein 3
  Uniprot ID: Q5T1R4
  ENST ID: ENST00000372583
  CDS Start-End: 887-8107
cctgcctggccggaataattcatgaagaaggggctggatccgtgggtcagagaacacaggaccagtttgccatcccaaggccgaaggcctccctccaacacagttctccaagctctagaaatctctgacacatcttgaccatgagaccacggctggtttttggcaggattcgaggcacaaacccagcagcctcaacctagttcatggaggagcctcgcggggtcctggccaagcaagcccgcccctctggtgggaagagcggcgcctaggtggagggtggctgccgtaggagtggacatgaatgctggctttcagagagaacagcgtttcagttttggtcatcggaagtggtgccttcagcacagaagaagagcgtgatttctcctccaaggccgttgatctccaacccagaactaaaggggagaagagccacccccagcatccagcgtggcatctcttgtgccaggaccagggatgactgggccatggacacagatgtctccaaccttcaaccgtttgcatagcacacgggggactcgtgggggccacctgccactgccagctgaaacaatacaatggcaatactgacatccttcatgacgttttcccgacagacattcaggcagaaagtgctggtgcgttttctgtctgcaaagtagagggccatgcctcaccaatagaatagcgtgggccctgatgacctgctccgagtccactcacagccagtgacacttgcaaaaaactcccaaagccgtcttgggtttggctcccacagctcttgaccaatgtggccaaagctggacacctccttgggacactgggattattcataaatgcagcccgccctgactctccctgaatagcatctgaagtctttgtgaaggtcatggatcctgaacaaagtgtcaagggcaccaagaaggctgagggaagtccccggaagcggctgaccaaaggagaggccattcagaccagtgtttcttccagcgtcccatacccaggcagcggcacagctgccacccaagagagccccgcccaagagctcttagccccgcagcccttcccgggcccctcatcagttcttagggaaggctctcaggagaaaacgggccagcagcagaagccccccaaaaggccccccatcgaagcatccgtccacatctcacagcttccgcagcaccctctgacaccagcattcatgtcgcctggcaaacctgagcatctcctggaggggtccacatggcaactggttgaccccatgagacctggaccctctggctccttcgtggcccctgggctccatcctcagagccagctccttccttcccacgcttccatcattccccccgaggaccttcctggagtccccaaagtcttcgtgcctcgtccttcccaggtctccttgaagcccacagaagaggcacacaagaaggagaggaagccccagaagccaggcaagtacatctgccagtactgcagccggccctgtgccaagcccagcgtgctccagaagcacattcgctcacacacaggtgagaggccctacccctgcggcccctgtggcttctccttcaagaccaagagtaatctctacaagcacaggaagtcccatgcccaccgcatcaaagcaggcctggcctcaggcatgggtggcgagatgtacccacatgggctggagatggagcggatccctggggaagagtttgaggagcccactgagggagaaagcacagattctgaagaggagactagtgccacctctggtcaccctgcagagctctccccaagacccaagcagccccttctctccagcgggctatacagctctgggagccacagttccagccacgaacgctgttccctgtcccagtccagcacagcccagtcactcgaagacccccctccatttgtggaaccctcatctgagcaccccctgagccataaacctgaagacacccacacgattaagcagaagctggccctccgcttaagcgagaggaagaaggtgatcgatgagcaggcgtttctgagcccaggcagcaaagggagtactgagtctgggtatttctctcgctccgagagtgcagagcagcaggtcagccccccaaacaccaacgccaagtcctacgctgagatcatctttggcaagtgtgggcgaataggacagcggaccgccatgctgacagccacctccacccagcccctcctgcccctgtccaccgaagacaagcccagcctggtgcctttgtctgtaccccggacgcaggtgatcgagcacatcacgaagctcatcaccatcaacgaggccgtggtggacaccagcgagatcgacagcgtgaagccaaggcggagctcactgtccaggcgcagcagcatggagtccccaaaatccagcctctaccgggagcccctgtcatcccacagtgagaaaaccaagcctgaacaatcactgctgagcctccagcacccgcccagtaccgccccccctgtgcctctcctgagaagccactcaatgccttctgccgcctgcactatcagcaccccccaccaccccttccgaggtagctactccttcgatgaccatatcaccgactccgaagccctgagccacagcagtcacgtgtttacctcccacccccggatgctgaagcgccagccggcaatcgaattacctttgggaggggaatacagttctgaggagcctggcccaagcagcaaagacacagcctccaagccctcggacgaagtggaacccaaggaaagcgagcttaccaaaaagaccaagaagggtttgaaaacaaaaggggtgatctacgaatgtaacatatgtggtgctcggtacaagaaaagggataactacgaagcccacaaaaaatactactgctcagagcttcagatcgcaaagcccatctctgcaggcacccacacatctccagaagctgaaaagagtcagattgagcatgagccgtggtcccaaatgatgcattacaaactgggaaccaccctggaactcactccactgaggaagaggaggaaagagaagagccttggggacgaggaagagccacctgcctttgagtccacaaaaagtcagtttggcagccccgggccatctgatgctgctcggaaccttcccctggagtccaccaagtcaccagcagaaccaagtaaatcagtgccctccttggagggacccacgggcttccagccaaggactcccaagccagggtccggttcagaatcagggaaggagaggagaacaacgtccaaagaaatttctgtcatccagcacaccagctcctttgagaaatctgattctctcgagcagccgagtggcttggaaggggaagacaaacctctggcccagttcccatcacccccacctgccccacacggacgctctgctcactccctgcagcctaagttggtccgccagcccaacattcaggttcctgagatcctagtaactgaggagcctgaccggccggacacagagccagagccgccccctaaggaacctgagaagactgaggagttccaatggccccagcgcagccagacacttgcccagctcccagctgagaagctgccacccaaaaagaagaggttgcgcctggcagagatggcccaatcatcaggggagtccagcttcgagtcctctgtgcctctgtctcgcagcccgagccaggaaagcaatgtctctttgagtgggtccagccgctcagcctcgtttgagagggatgaccatgggaaagccgaggcccccagtccctcatctgacatgcgccccaaacccctgggcacccacatgttgactgtccccagccaccacccacatgcccgagagatgcggaggtcagcctcagagcagagccccaacgtttcccattctgcccacatgaccgagacacgcagcaaatcctttgactatggcagcttgtccttgacaggcccttctgctccagccccagtggctccaccagcgcgggtggccccgccagagagaagaaaatgcttcttggtgagacaggcctctctgagcaggcctccagaatctgagttggaggttgcccccaagggaagacaggagagcgaagaaccacagccctcatccagtaaaccctctgccaaaagctcattgtcccagatttcctctgcggccacctcacatggtggacccccgggaggcaagggcccagggcaggacaggcccccattggggcccactgtgccctacacagaagcactgcaagtgttccaccaccccgttgcccagacacccctgcatgagaagccatacctgcccccaccagtctcccttttctccttccagcatctcgtgcagcatgagccaggacagtctccagaattcttctccacccaggccatgtccagcctcctgtcctcaccatactccatgcccccacttcctccctccttatttcaagccccaccgcttcctctccagcctactgttctgcacccaggccaactccatctcccccagctcatgcctcacccagccaacatccccttcaggcagcccccttccttcctccccatgccatacccgacctcctcagcactgtcttctgggtttttcctgcctctgcaatcccagtttgcacttcagctccctggtgatgtggaaagccatctgccccagatcaaaaccagcctggccccactggcaacaggaagtgctggcctctcccccagcacagagtacagcagtgacatccggctaccccctgtggctcccccagccagctcctcagcacctacatcagctcctccactggccctgcctgcctgtccagacaccatggtgtccctggttgtgcctgtccgtgttcagaccaatatgccgtcctatgggagcgcaatgtacaccaccctttcccagatcttggtcacccagtcccaaggcagctcagcaactgtggcacttcccaagtttgaggaacccccatcaaaggggacgactgtatgtggtgcagatgtgcatgaggttgggcccggcccttctgggttaagtgaagagcaaagcagagctttcccaactccatacctgagagtgcctgtgacattacctgaaagaaaaggcacttccctgtcatcagagagtatcttgagcctggaggggagttcatcaacagcagggggaagcaaacgtgtcctttcaccagctggcagccttgaacttaccatggaaacccagcagcaaaaaagagtgaaggaggaggaggcttccaaggcagatgaaaaacttgagctggtaaaaccatgcagtgtggtccttaccagcaccgaggatgggaagaggccagagaaatcccacttaggcaaccagggccaaggcaggagggagctagaaatgctgtccagcctgtcctcagatccatctgacacaaaggaaattcctcccctccctcaccctgcattgtcccatgggacagccccaggctcagaagctttgaaggaatatccccagccatctggcaaacctcaccgaagagggttgaccccactgagcgtgaagaaagaagattccaaggaacaacctgatctcccctccttggcacctccgagctctctgcctctgtcagaaacgtcctccagaccagccaagtcacaagaaggtacggactcaaagaaggtactgcagttccccagcctccacacaaccactaatgtcagttggtgctatttaaactacattaagccaaatcacatccagcatgcagataggaggtcctctgtttacgctggttggtgcataagtttgtacaaccccaaccttccgggggtttccactaaagctgctttgtccctcctgaggtctaagcagaaagtgagcaaagagacatacaccatggccacagctccgcatcctgaggcaggaaggcttgtgccatccagctcccgcaagccccgcatgacagaggttcacctcccttcactggtttccccggaaggccagaaagatctagctagagtggagaaggaagaagagaggagaggggagccggaggaggatgctcctgcctcccagagaggggagccggcgaggatcaaaatcttcgaaggagggtacaaatcaaacgaagagtatgtatatgtgcgaggccgcggccgagggaaatatgtttgtgaggagtgtggaattcgctgcaagaagcccagcatgctgaagaaacacatccgcacccacactgacgtccggccctatgtgtgcaagcactgtcactttgcttttaaaaccaaagggaatctgactaagcacatgaagtcgaaggcccacagcaaaaagtgccaagagacaggggtgctggaggagctggaagccgaagaaggaaccagtgacgacctgttccaggactcggaaggacgagagggttcagaggctgtggaggagcaccagttttcggacctggaggactcggactcagactcagacctggacgaagacgaggatgaggatgaggaggagagccaggatgagctgtccagaccatcctcagaggcgcccccgcctggcccaccacatgcactgcgggcagactcctcacccatcctgggccctcagcccccagatgcccccgcctctggcacggaggctacacgaggcagctcggtctcggaagctgagcgcctgacagccagcagctgctccatgtccagccagagcatgccgggcctcccctggctgggaccggcccctctgggctctgtggagaaagacacaggctcagccttgagctacaagcctgtgtccccaagaagaccgtggtccccaagcaaagaagcaggcagccgtccaccactagcccgcaaacactcgctaaccaaaaacgactcatctccccagcgatgctccccggcccgagaaccacaggcctcagccccaagcccacctggcctgcacgtggacccaggaaggggcatgggcgctctcccttgtgggtctccaagacttcagctgtctcctctcaccctctgccccctgggaagagaactggcccctcgagcacatgtgctctccaaactcgagggtaccaccgacccaggcctccccagatactcgcccaccaggagatggtctccaggtcaggccgagtcaccaccacggtcagcgccgccagggaagtgggccttggctgggccgggcagcccctcagcgggggagcatggcccaggcttggggctggacccacgggttctcttcccgcccgcgcctctacctcacaagctcctcagcagaagcccagagacctgcgcctccccgtggcagaaggccgagtcccgaagtccctcctgctcacccggccctgctcatcctctctcctcccgacccttctccgccctccatgacttccacggccacatcctggcccggacagaggagaacatcttcagccacctgcctctgcactcccagcacttgacccgtgccccatgtcccttgattcccatcggtgggatccagatggtgcaggcccggccaggagcccaccccaccctgctgccagggcccaccgcagcctgggtcagtggcttctccgggggtggcagcgacctgacaggggcccgggaggcccaggagcgaggccgctggagtcccactgagagctcgtcagcctccgtgtcgcctgtggctaaggtctccaaattcacactctcctcagagctggagggcggggactaccccaaggagagggagaggaccggcggaggcccgggcaggcctcctgactggacaccccatgggaccggggcacctgcagagcccacacccacgcacagcccctgcaccccacccgacaccttgccccggccgccccagggacgccgggcagcgcagtcctggagcccccgcttggagtccccgcgtgcaccgaccaaccccgagccttctgccaccccgccgctggaccgcagcagctctgtgggctgcctggcagaggcctctgcccgcttcccagcccggacgaggaacctctccggggaacccaggaccaggcaggactcccccaagccctcaggaagtggggagcccagggcacatccacatcagcctgaggacagggttccccccaacgcttagcctctctccaactgcttcagcatctggcttccagtgtccagcaacagacgtttccagccactttcctcgaatcatcccacttcctcagccccatctgtccctccgtccaggagctctcacggccccatctgttgtaccttcccatgtatgcagttacctgtgcctttttctacaccttttgttgcttaaaaagaaacaaaacaaatcacatacatacatttaaaaaaaaaacaacaacccacgaggagtctgaggctgtgaatagtttatggttttggggaaaggctgatggtgaagcctcctgaccctccccgctgtggttggcagccacccaccccagaggctggcagagggaaaggggtacactgagggagaaaggaaaaggaaacttcaaacaatatagaattaaatgtaaaaggaagcactcctgtgtacagatgcgatcaaggttcctgtttattgccacttcacccccctgcccagctcgtagccacccctctctgccagcagaaaggccagtgtccccaggcagaggggcacaaacacaggcaggtgacccccacccaggccccagcaggcaggcccagaaaaactaatcttttccttttttttttttttttttttttttgcaagaaaataaaatgatacttttcctaggatttcaacacaaaataataggtgcaggtagaaggaggagggctggctccccaagggctcctggatactctggtagtctgagtcatgggcccatcctggcactccacaggtgggcaggccaccccacccacgcacccccactccagacacctcccttctgcaccccaccctggccccctgggctggggaaggagccctgactgtccgtccctggctcccaagcccctgaccgaggcctcactctcctgttgcctcctctgttctaaaaccaccaaaccacccacaaaggcagaagtggcagggcccgagccctagcggccgttcctgagactgggttttgggttttgtttcatcttggtccctggggtacaagggagcctgttcccctcatggctgggtttttccagttctccacagcagaggtttgcggggaactgtttcaggaccactttgccacaggaccgtttccccccgtccctgcccctgtctccactaccccaaggaaatacccacaactgtggctggtggatacggcctggacctgtttgctgtcttacacctcttttttaaaaagagagaggatggtgtttgatacttcacccagccaccacagattcttttgacctagaggatttttgaattgtcctaactcgttggaattctccaaagcaatcagtgtgagccagtgcctcttccttacccacatctctactttcaagaagctgccctgcatttcctggggcaaaactctactttgtaagaaaaataataggaccagaaatttaaatcccaaattgaactatggaacttgaactctagcgtgttcgccccaactgggagaggtgagctttttcccagtgtttcagaactgattttctttactttctacaagggagggcagcacagggactacggttgaggcccgtgaaggctgggtttgatgccaccctatacagagcagggacctctctggctaatccccagtcctcagccaggctgtgtgaatcaagtgcctgccccagggctcttgagctattgaagctgcttgggtacaggacacagtaggtggggagggttaagacccttctgtgagttccctgtgcggggctgtacttgcctcttccaattcgtggcctttccctgcttggtccctactagacagacaaaccagccacagtccagcctgcagccagaccaccttgttcactcattctcctttgcctcagagctaagacaaaaatgagacagaaggcagggctccctgggagtccactgtgctccagggttctggggaatcagggttagccagcagctcctggctgcttccctcagagactagggctctcatcctccccaagagaagcagcaagcccagcctggaccacactgtccatattgctggacagtggcctgacagaaagtgactcctccaagtcccaggaggccagggcttttctcatccttgcctttcagccctaacccatgggactgcccacggattggagacttcaagggctgaggtctgggagctgcataaagggcattgcttcagcccaggttagaaatctgcctgggcaagctcttcctgccccagacctacaaagcagcagaccgggggctctggtggactagcccctgacattggtggggggccccacaccactccaccccaccctgccttccagctctcctgggcatttttctccctgtactcaaacagcctacccacccaaggtttcctccctgggcagcctagcaatgaacagtgcagccggcagggcagaggcccggcagtcaccgggcccgtcaggctcaggcagagaagccacaggggccaggagtcactggagactatttctaaatgatgggggtaaatgcacaaatagaatctcaccaaagggctgcctccacattgatgccgtgcccagagggacagaaccaatgccaccagcctgggtatatgtcactgggcacagctctaaccccctcctccggactctagtcccgctcctctgcgcacagagcccccagcccacaggtacaccttcatgatttggagaaagacgctcgccccatgcacgccctcctctgggccttctgccctgctcccagtcacttccaagcttcctgtttgcctgtgatgttattgtgcctgttgagggaagcagcagaggaggcagtggctgacttggcacagatgcctgctacgtgctctgttgaaatgcgcggggtggccattcctcggtacagactagtcctggtccttgggtgtgggcagtgggggaggaaccaactggtcgaggtttcagagccaaaccttgcctttggttggtgagtccttgccccccaggcctgcgctccacgatgcctttcacccttggcaatctcagggccatcctgggtagtaaccccactcctctctgctcccgcccgcacctgtggctctcactctgggctcaacccctgcaaccctccaggagcccgacagcagccagctgcctgcactgtcgcctccgtaagctccaacttccagacccagaagtccctctgcttccctctgttggaaaaagcctaaaagaattagcttccagattcctctagcccctgctccattcccacccagtccttctgaagaggaatgagcaatacatctgagctggatttctctctagtcctttctccagacaaatccttcttaaagcaaaagtcctggctgagcacctgtccttggggaccgatctgccgtgtgaccaggggaagaaagttcccgaaagcctgttccaccaattctgcttctgtgttgtgaatccagtctgctttccattagaaaaccgcttcggcacttatggtcactttaataaatctagtatgtaaaaaaagaaagaaagaaaagaaacagaaaaaagaaacgtgcaggcaaatgtaaaatacaatgctctctgtaagataaatatttgcctttttttctaaaaggtgtacgtattctgtatgtgaaattgtctgtagaaagtttctatgttcttaaatggcaatacattccaaaaattgtactgtagatatgtacagcaaccgcactgggatggggtagttttgcctgtaattttatttaaactccagtttccacacttgcatcttgcaatgttggtatggtatatatcagtgcaaaagaaaaaacaaaacagaaacaaacaaaaaaaaaaaacaaaaatccacgcaggtctaaagcacagagtctgacgtacaaaaggaaaaatgctcagtattgatgtgtgtgacctttgttgtaaattacatctgtactgtgaatgagaagtttttacaagtataataattgcctttattacagctctggctgagtgttcagcctgaggatattttttaaaaaaaaaagaattagcatgttggaataaatttgaaaatcccaacata

SEQ ID NO: 141484 - DNA, 12319 bp, Homo sapiens
  Payload ID: 7819
  Gene Symbol: HIVEP3
  Gene Name: human immunodeficiency virus type I enhancer binding protein 3
  Uniprot ID: Q5T1R4
  ENST ID: ENST00000372584
  CDS Start-End: 1016-8233
ctcacaaccagccgactctcccattatccagctgcctagtttggtgcttcaatgtacatggctattccgtgtgcatatgtgtgtatacaaacacgcatgcatgcctggatggacatacgtatgcacaggttattttttaaggacaattctttcaataaggtctttaccccttacttgaaacaggtgttcatgaaaaaaatgcacaaaatcctgcctggccggaataattcatgaagaaggggctggatccgtgggtcagagaacacaggaccagtttgccatcccaaggccgaaggattcgaggcacaaacccagcagcctcaacctagttcatggaggagcctcgcggggtcctggccaagcaagcccgcccctctggtgggaagagcggcgcctaggtggagggtggctgccgtaggagtggacatgaatgctggctttcagagagaacagcgtttcagttttggtcatcggaagtggtgccttcagcacagaagaagagcgtgatttctcctccaaggccgttgatctccaacccagaactaaaggggagaagagccacccccagcatccagcgtggcatctcttgtgccaggaccagggatgactgggccatggacacagatgtctccaaccttcaaccgtttgcatagcacacgggggactcgtgggggccacctgccactgccagctgaaacaatacaatggcaatactgacatccttcatgacgttttcccgacagacattcaggcagaaagtgctggtgcgttttctgtctgcaaagtagagggccatgcctcaccaatagaatagcgtgggccctgatgacctgctccgagtccactcacagccagtgacacttgcaaaaaactcccaaagccgtcttgggtttggctcccacagctcttgaccaatgtggccaaagctggacacctccttgggacactgggattattcataaatgcagcccgccctgactctccctgaatagcatctgaagtctttgtgaaggtcatggatcctgaacaaagtgtcaagggcaccaagaaggctgagggaagtccccggaagcggctgaccaaaggagaggccattcagaccagtgtttcttccagcgtcccatacccaggcagcggcacagctgccacccaagagagccccgcccaagagctcttagccccgcagcccttcccgggcccctcatcagttcttagggaaggctctcaggagaaaacgggccagcagcagaagccccccaaaaggccccccatcgaagcatccgtccacatctcacagcttccgcagcaccctctgacaccagcattcatgtcgcctggcaaacctgagcatctcctggaggggtccacatggcaactggttgaccccatgagacctggaccctctggctccttcgtggcccctgggctccatcctcagagccagctccttccttcccacgcttccatcattccccccgaggaccttcctggagtccccaaagtcttcgtgcctcgtccttcccaggtctccttgaagcccacagaagaggcacacaagaaggagaggaagccccagaagccaggcaagtacatctgccagtactgcagccggccctgtgccaagcccagcgtgctccagaagcacattcgctcacacacaggtgagaggccctacccctgcggcccctgtggcttctccttcaagaccaagagtaatctctacaagcacaggaagtcccatgcccaccgcatcaaagcaggcctggcctcaggcatgggtggcgagatgtacccacatgggctggagatggagcggatccctggggaagagtttgaggagcccactgagggagaaagcacagattctgaagaggagactagtgccacctctggtcaccctgcagagctctccccaagacccaagcagccccttctctccagcgggctatacagctctgggagccacagttccagccacgaacgctgttccctgtcccagtccagcacagcccagtcactcgaagacccccctccatttgtggaaccctcatctgagcaccccctgagccataaacctgaagacacccacacgattaagcagaagctggccctccgcttaagcgagaggaagaaggtgatcgatgagcaggcgtttctgagcccaggcagcaaagggagtactgagtctgggtatttctctcgctccgagagtgcagagcagcaggtcagccccccaaacaccaacgccaagtcctacgctgagatcatctttggcaagtgtgggcgaataggacagcggaccgccatgctgacagccacctccacccagcccctcctgcccctgtccaccgaagacaagcccagcctggtgcctttgtctgtaccccggacgcaggtgatcgagcacatcacgaagctcatcaccatcaacgaggccgtggtggacaccagcgagatcgacagcgtgaagccaaggcggagctcactgtccaggcgcagcagcatggagtccccaaaatccagcctctaccgggagcccctgtcatcccacagtgagaaaaccaagcctgaacaatcactgctgagcctccagcacccgcccagtaccgccccccctgtgcctctcctgagaagccactcaatgccttctgccgcctgcactatcagcaccccccaccaccccttccgaggtagctactccttcgatgaccatatcaccgactccgaagccctgagccacagcagtcacgtgtttacctcccacccccggatgctgaagcgccagccggcaatcgaattacctttgggaggggaatacagttctgaggagcctggcccaagcagcaaagacacagcctccaagccctcggacgaagtggaacccaaggaaagcgagcttaccaaaaagaccaagaagggtttgaaaacaaaaggggtgatctacgaatgtaacatatgtggtgctcggtacaagaaaagggataactacgaagcccacaaaaaatactactgctcagagcttcagatcgcaaagcccatctctgcaggcacccacacatctccagaagctgaaaagagtcagattgagcatgagccgtggtcccaaatgatgcattacaaactgggaaccaccctggaactcactccactgaggaagaggaggaaagagaagagccttggggacgaggaagagccacctgcctttgagtccacaaaaagtcagtttggcagccccgggccatctgatgctgctcggaaccttcccctggagtccaccaagtcaccagcagaaccaagtaaatcagtgccctccttggagggacccacgggcttccagccaaggactcccaagccagggtccggttcagaatcagggaaggagaggagaacaacgtccaaagaaatttctgtcatccagcacaccagctcctttgagaaatctgattctctcgagcagccgagtggcttggaaggggaagacaaacctctggcccagttcccatcacccccacctgccccacacggacgctctgctcactccctgcagcctaagttggtccgccagcccaacattcaggttcctgagatcctagtaactgaggagcctgaccggccggacacagagccagagccgccccctaaggaacctgagaagactgaggagttccaatggccccagcgcagccagacacttgcccagctcccagctgagaagctgccacccaaaaagaagaggttgcgcctggcagagatggcccaatcatcaggggagtccagcttcgagtcctctgtgcctctgtctcgcagcccgagccaggaaagcaatgtctctttgagtgggtccagccgctcagcctcgtttgagagggatgaccatgggaaagccgaggcccccagtccctcatctgacatgcgccccaaacccctgggcacccacatgttgactgtccccagccaccacccacatgcccgagagatgcggaggtcagcctcagagcagagccccaacgtttcccattctgcccacatgaccgagacacgcagcaaatcctttgactatggcagcttgtccttgacaggcccttctgctccagccccagtggctccaccagcgcgggtggccccgccagagagaagaaaatgcttcttggtgagacaggcctctctgagcaggcctccagaatctgagttggaggttgcccccaagggaagacaggagagcgaagaaccacagccctcatccagtaaaccctctgccaaaagctcattgtcccagatttcctctgcggccacctcacatggtggacccccgggaggcaagggcccagggcaggacaggcccccattggggcccactgtgccctacacagaagcactgcaagtgttccaccaccccgttgcccagacacccctgcatgagaagccatacctgcccccaccagtctcccttttctccttccagcatctcgtgcagcatgagccaggacagtctccagaattcttctccacccaggccatgtccagcctcctgtcctcaccatactccatgcccccacttcctccctccttatttcaagccccaccgcttcctctccagcctactgttctgcacccaggccaactccatctcccccagctcatgcctcacccagccaacatccccttcaggcagcccccttccttcctccccatgccatacccgacctcctcagcactgtcttctgggtttttcctgcctctgcaatcccagtttgcacttcagctccctggtgatgtggaaagccatctgccccagatcaaaaccagcctggccccactggcaacaggaagtgctggcctctcccccagcacagagtacagcagtgacatccggctaccccctgtggctcccccagccagctcctcagcacctacatcagctcctccactggccctgcctgcctgtccagacaccatggtgtccctggttgtgcctgtccgtgttcagaccaatatgccgtcctatgggagcgcaatgtacaccaccctttcccagatcttggtcacccagtcccaaggcagctcagcaactgtggcacttcccaagtttgaggaacccccatcaaaggggacgactgtatgtggtgcagatgtgcatgaggttgggcccggcccttctgggttaagtgaagagcaaagcagagctttcccaactccatacctgagagtgcctgtgacattacctgaaagaaaaggcacttccctgtcatcagagagtatcttgagcctggaggggagttcatcaacagcagggggaagcaaacgtgtcctttcaccagctggcagccttgaacttaccatggaaacccagcagcaaaaaagagtgaaggaggaggaggcttccaaggcagatgaaaaacttgagctggtaaaaccatgcagtgtggtccttaccagcaccgaggatgggaagaggccagagaaatcccacttaggcaaccagggccaaggcaggagggagctagaaatgctgtccagcctgtcctcagatccatctgacacaaaggaaattcctcccctccctcaccctgcattgtcccatgggacagccccaggctcagaagctttgaaggaatatccccagccatctggcaaacctcaccgaagagggttgaccccactgagcgtgaagaaagaagattccaaggaacaacctgatctcccctccttggcacctccgagctctctgcctctgtcagaaacgtcctccagaccagccaagtcacaagaaggtacggactcaaagaaggtactgcagttccccagcctccacacaaccactaatgtcagttggtgctatttaaactacattaagccaaatcacatccagcatgcagataggaggtcctctgtttacgctggttggtgcataagtttgtacaaccccaaccttccgggggtttccactaaagctgctttgtccctcctgaggtctaagcagaaagtgagcaaagagacatacaccatggccacagctccgcatcctgaggcaggaaggcttgtgccatccagctcccgcaagccccgcatgacagaggttcacctcccttcactggtttccccggaaggccagaaagatctagctagagtggagaaggaagaagagaggagaggggagccggaggaggatgctcctgcctcccagagaggggagccggcgaggatcaaaatcttcgaaggagggtacaaatcaaacgaagagtatgtatatgtgcgaggccgcggccgagggaaatatgtttgtgaggagtgtggaattcgctgcaagaagcccagcatgctgaagaaacacatccgcacccacactgacgtccggccctatgtgtgcaagcactgtcactttgcttttaaaaccaaagggaatctgactaagcacatgaagtcgaaggcccacagcaaaaagtgccaagagacaggggtgctggaggagctggaagccgaagaaggaaccagtgacgacctgttccaggactcggaaggacgagagggttcagaggctgtggaggagcaccagttttcggacctggaggactcggactcagactcagacctggacgaagacgaggatgaggatgaggaggagagccaggatgagctgtccagaccatcctcagaggcgcccccgcctggcccaccacatgcactgcgggcagactcctcacccatcctgggccctcagcccccagatgcccccgcctctggcacggaggctacacgaggcagctcggtctcggaagctgagcgcctgacagccagcagctgctccatgtccagccagagcatgccgggcctcccctggctgggaccggcccctctgggctctgtggagaaagacacaggctcagccttgagctacaagcctgtgtccccaagaagaccgtggtccccaagcaaagaagcaggcagccgtccaccactagcccgcaaacactcgctaaccaaaaacgactcatctccccagcgatgctccccggcccgagaaccacaggcctcagccccaagcccacctggcctgcacgtggacccaggaaggggcatgggcgctctcccttgtgggtctccaagacttcagctgtctcctctcaccctctgccccctgggaagagaactggcccctcgagcacatgtgctctccaaactcgagggtaccaccgacccaggcctccccagatactcgcccaccaggagatggtctccaggtcaggccgagtcaccaccacggtcagcgccgccagggaagtgggccttggctgggccgggcagcccctcagcgggggagcatggcccaggcttggggctggacccacgggttctcttcccgcccgcgcctctacctcacaagctcctcagcagaagcccagagacctgcgcctccccgtggaaggccgagtcccgaagtccctcctgctcacccggccctgctcatcctctctcctcccgacccttctccgccctccatgacttccacggccacatcctggcccggacagaggagaacatcttcagccacctgcctctgcactcccagcacttgacccgtgccccatgtcccttgattcccatcggtgggatccagatggtgcaggcccggccaggagcccaccccaccctgctgccagggcccaccgcagcctgggtcagtggcttctccgggggtggcagcgacctgacaggggcccgggaggcccaggagcgaggccgctggagtcccactgagagctcgtcagcctccgtgtcgcctgtggctaaggtctccaaattcacactctcctcagagctggagggcggggactaccccaaggagagggagaggaccggcggaggcccgggcaggcctcctgactggacaccccatgggaccggggcacctgcagagcccacacccacgcacagcccctgcaccccacccgacaccttgccccggccgccccagggacgccgggcagcgcagtcctggagcccccgcttggagtccccgcgtgcaccgaccaaccccgagccttctgccaccccgccgctggaccgcagcagctctgtgggctgcctggcagaggcctctgcccgcttcccagcccggacgaggaacctctccggggaacccaggaccaggcaggactcccccaagccctcaggaagtggggagcccagggcacatccacatcagcctgaggacagggttccccccaacgcttagcctctctccaactgcttcagcatctggcttccagtgtccagcaacagacgtttccagccactttcctcgaatcatcccacttcctcagccccatctgtccctccgtccaggagctctcacggccccatctgttgtaccttcccatgtatgcagttacctgtgcctttttctacaccttttgttgcttaaaaagaaacaaaacaaatcacatacatacatttaaaaaaaaaacaacaacccacgaggagtctgaggctgtgaatagtttatggttttggggaaaggctgatggtgaagcctcctgaccctccccgctgtggttggcagccacccaccccagaggctggcagagggaaaggggtacactgagggagaaaggaaaaggaaacttcaaacaatatagaattaaatgtaaaaggaagcactcctgtgtacagatgcgatcaaggttcctgtttattgccacttcacccccctgcccagctcgtagccacccctctctgccagcagaaaggccagtgtccccaggcagaggggcacaaacacaggcaggtgacccccacccaggccccagcaggcaggcccagaaaaactaatcttttccttttttttttttttttttttttttgcaagaaaataaaatgatacttttcctaggatttcaacacaaaataataggtgcaggtagaaggaggagggctggctccccaagggctcctggatactctggtagtctgagtcatgggcccatcctggcactccacaggtgggcaggccaccccacccacgcacccccactccagacacctcccttctgcaccccaccctggccccctgggctggggaaggagccctgactgtccgtccctggctcccaagcccctgaccgaggcctcactctcctgttgcctcctctgttctaaaaccaccaaaccacccacaaaggcagaagtggcagggcccgagccctagcggccgttcctgagactgggttttgggttttgtttcatcttggtccctggggtacaagggagcctgttcccctcatggctgggtttttccagttctccacagcagaggtttgcggggaactgtttcaggaccactttgccacaggaccgtttccccccgtccctgcccctgtctccactaccccaaggaaatacccacaactgtggctggtggatacggcctggacctgtttgctgtcttacacctcttttttaaaaagagagaggatggtgtttgatacttcacccagccaccacagattcttttgacctagaggatttttgaattgtcctaactcgttggaattctccaaagcaatcagtgtgagccagtgcctcttccttacccacatctctactttcaagaagctgccctgcatttcctggggcaaaactctactttgtaagaaaaataataggaccagaaatttaaatcccaaattgaactatggaacttgaactctagcgtgttcgccccaactgggagaggtgagctttttcccagtgtttcagaactgattttctttactttctacaagggagggcagcacagggactacggttgaggcccgtgaaggctgggtttgatgccaccctatacagagcagggacctctctggctaatccccagtcctcagccaggctgtgtgaatcaagtgcctgccccagggctcttgagctattgaagctgcttgggtacaggacacagtaggtggggagggttaagacccttctgtgagttccctgtgcggggctgtacttgcctcttccaattcgtggcctttccctgcttggtccctactagacagacaaaccagccacagtccagcctgcagccagaccaccttgttcactcattctcctttgcctcagagctaagacaaaaatgagacagaaggcagggctccctgggagtccactgtgctccagggttctggggaatcagggttagccagcagctcctggctgcttccctcagagactagggctctcatcctccccaagagaagcagcaagcccagcctggaccacactgtccatattgctggacagtggcctgacagaaagtgactcctccaagtcccaggaggccagggcttttctcatccttgcctttcagccctaacccatgggactgcccacggattggagacttcaagggctgaggtctgggagctgcataaagggcattgcttcagcccaggttagaaatctgcctgggcaagctcttcctgccccagacctacaaagcagcagaccgggggctctggtggactagcccctgacattggtggggggccccacaccactccaccccaccctgccttccagctctcctgggcatttttctccctgtactcaaacagcctacccacccaaggtttcctccctgggcagcctagcaatgaacagtgcagccggcagggcagaggcccggcagtcaccgggcccgtcaggctcaggcagagaagccacaggggccaggagtcactggagactatttctaaatgatgggggtaaatgcacaaatagaatctcaccaaagggctgcctccacattgatgccgtgcccagagggacagaaccaatgccaccagcctgggtatatgtcactgggcacagctctaaccccctcctccggactctagtcccgctcctctgcgcacagagcccccagcccacaggtacaccttcatgatttggagaaagacgctcgccccatgcacgccctcctctgggccttctgccctgctcccagtcacttccaagcttcctgtttgcctgtgatgttattgtgcctgttgagggaagcagcagaggaggcagtggctgacttggcacagatgcctgctacgtgctctgttgaaatgcgcggggtggccattcctcggtacagactagtcctggtccttgggtgtgggcagtgggggaggaaccaactggtcgaggtttcagagccaaaccttgcctttggttggtgagtccttgccccccaggcctgcgctccacgatgcctttcacccttggcaatctcagggccatcctgggtagtaaccccactcctctctgctcccgcccgcacctgtggctctcactctgggctcaacccctgcaaccctccaggagcccgacagcagccagctgcctgcactgtcgcctccgtaagctccaacttccagacccagaagtccctctgcttccctctgttggaaaaagcctaaaagaattagcttccagattcctctagcccctgctccattcccacccagtccttctgaagaggaatgagcaatacatctgagctggatttctctctagtcctttctccagacaaatccttcttaaagcaaaagtcctggctgagcacctgtccttggggaccgatctgccgtgtgaccaggggaagaaagttcccgaaagcctgttccaccaattctgcttctgtgttgtgaatccagtctgctttccattagaaaaccgcttcggcacttatggtcactttaataaatctagtatgtaaaaaaagaaagaaagaaaagaaacagaaaaaagaaacgtgcaggcaaatgtaaaatacaatgctctctgtaagataaatatttgcctttttttctaaaaggtgtacgtattctgtatgtgaaattgtctgtagaaagtttctatgttcttaaatggcaatacattccaaaaattgtactgtagatatgtacagcaaccgcactgggatggggtagttttgcctgtaattttatttaaactccagtttccacacttgcatcttgcaatgttggtatggtatatatcagtgcaaaagaaaaaacaaaacagaaacaaacaaaaaaaaaaaacaaaaatccacgcaggtctaaagcacagagtctgacgtacaaaaggaaaaatgctcagtattgatgtgtgtgacctttgttgtaaattacatctgtactgtgaatgagaagtttttacaagtataataattgcctttattacagctctggctgagtgttcagcctgaggatattttttaaaaaaaaaagaattagcatgttggaataaatttgaaaatcccaacata

SEQ ID NO: 141485 - DNA, 13474 bp, Homo sapiens
  Payload ID: 7820
  Gene Symbol: HTT
  Gene Name: huntingtin
  Uniprot ID: P42858
  ENST ID: ENST00000355072
  CDS Start-End: 146-9574
gctgccgggacgggtccaagatggacggccgctcaggttctgcttttacctgcggcccagagccccattcattgccccggtgctgagcggcgccgcgagtcggcccgaggcctccggggactgccgtgccgggcgggagaccgccatggcgaccctggaaaagctgatgaaggccttcgagtccctcaagtccttccagcagcagcagcagcagcagcagcagcagcagcagcagcagcagcagcagcagcagcaacagccgccaccgccgccgccgccgccgccgcctcctcagcttcctcagccgccgccgcaggcacagccgctgctgcctcagccgcagccgcccccgccgccgcccccgccgccacccggcccggctgtggctgaggagccgctgcaccgaccaaagaaagaactttcagctaccaagaaagaccgtgtgaatcattgtctgacaatatgtgaaaacatagtggcacagtctgtcagaaattctccagaatttcagaaacttctgggcatcgctatggaactttttctgctgtgcagtgatgacgcagagtcagatgtcaggatggtggctgacgaatgcctcaacaaagttatcaaagctttgatggattctaatcttccaaggttacagctcgagctctataaggaaattaaaaagaatggtgcccctcggagtttgcgtgctgccctgtggaggtttgctgagctggctcacctggttcggcctcagaaatgcaggccttacctggtgaaccttctgccgtgcctgactcgaacaagcaagagacccgaagaatcagtccaggagaccttggctgcagctgttcccaaaattatggcttcttttggcaattttgcaaatgacaatgaaattaaggttttgttaaaggccttcatagcgaacctgaagtcaagctcccccaccattcggcggacagcggctggatcagcagtgagcatctgccagcactcaagaaggacacaatatttctatagttggctactaaatgtgctcttaggcttactcgttcctgtcgaggatgaacactccactctgctgattcttggcgtgctgctcaccctgaggtatttggtgcccttgctgcagcagcaggtcaaggacacaagcctgaaaggcagcttcggagtgacaaggaaagaaatggaagtctctccttctgcagagcagcttgtccaggtttatgaactgacgttacatcatacacagcaccaagaccacaatgttgtgaccggagccctggagctgttgcagcagctcttcagaacgcctccacccgagcttctgcaaaccctgaccgcagtcgggggcattgggcagctcaccgctgctaaggaggagtctggtggccgaagccgtagtgggagtattgtggaacttatagctggagggggttcctcatgcagccctgtcctttcaagaaaacaaaaaggcaaagtgctcttaggagaagaagaagccttggaggatgactctgaatcgagatcggatgtcagcagctctgccttaacagcctcagtgaaggatgagatcagtggagagctggctgcttcttcaggggtttccactccagggtcagcaggtcatgacatcatcacagaacagccacggtcacagcacacactgcaggcggactcagtggatctggccagctgtgacttgacaagctctgccactgatggggatgaggaggatatcttgagccacagctccagccaggtcagcgccgtcccatctgaccctgccatggacctgaatgatgggacccaggcctcgtcgcccatcagcgacagctcccagaccaccaccgaagggcctgattcagctgttaccccttcagacagttctgaaattgtgttagacggtaccgacaaccagtatttgggcctgcagattggacagccccaggatgaagatgaggaagccacaggtattcttcctgatgaagcctcggaggccttcaggaactcttccatggcccttcaacaggcacatttattgaaaaacatgagtcactgcaggcagccttctgacagcagtgttgataaatttgtgttgagagatgaagctactgaaccgggtgatcaagaaaacaagccttgccgcatcaaaggtgacattggacagtccactgatgatgactctgcacctcttgtccattgtgtccgccttttatctgcttcgtttttgctaacagggggaaaaaatgtgctggttccggacagggatgtgagggtcagcgtgaaggccctggccctcagctgtgtgggagcagctgtggccctccacccggaatctttcttcagcaaactctataaagttcctcttgacaccacggaataccctgaggaacagtatgtctcagacatcttgaactacatcgatcatggagacccacaggttcgaggagccactgccattctctgtgggaccctcatctgctccatcctcagcaggtcccgcttccacgtgggagattggatgggcaccattagaaccctcacaggaaatacattttctttggcggattgcattcctttgctgcggaaaacactgaaggatgagtcttctgttacttgcaagttagcttgtacagctgtgaggaactgtgtcatgagtctctgcagcagcagctacagtgagttaggactgcagctgatcatcgatgtgctgactctgaggaacagttcctattggctggtgaggacagagcttctggaaacccttgcagagattgacttcaggctggtgagctttttggaggcaaaagcagaaaacttacacagaggggctcatcattatacagggcttttaaaactgcaagaacgagtgctcaataatgttgtcatccatttgcttggagatgaagaccccagggtgcgacatgttgccgcagcatcactaattaggcttgtcccaaagctgttttataaatgtgaccaaggacaagctgatccagtagtggccgtggcaagagatcaaagcagtgtttacctgaaacttctcatgcatgagacgcagcctccatctcatttctccgtcagcacaataaccagaatatatagaggctataacctactaccaagcataacagacgtcactatggaaaataacctttcaagagttattgcagcagtttctcatgaactaatcacatcaaccaccagagcactcacatttggatgctgtgaagctttgtgtcttctttccactgccttcccagtttgcatttggagtttaggttggcactgtggagtgcctccactgagtgcctcagatgagtctaggaagagctgtaccgttgggatggccacaatgattctgaccctgctctcgtcagcttggttcccattggatctctcagcccatcaagatgctttgattttggccggaaacttgcttgcagccagtgctcccaaatctctgagaagttcatgggcctctgaagaagaagccaacccagcagccaccaagcaagaggaggtctggccagccctgggggaccgggccctggtgcccatggtggagcagctcttctctcacctgctgaaggtgattaacatttgtgcccacgtcctggatgacgtggctcctggacccgcaataaaggcagccttgccttctctaacaaaccccccttctctaagtcccatccgacgaaaggggaaggagaaagaaccaggagaacaagcatctgtaccgttgagtcccaagaaaggcagtgaggccagtgcagcttctagacaatctgatacctcaggtcctgttacaacaagtaaatcctcatcactggggagtttctatcatcttccttcatacctcaaactgcatgatgtcctgaaagctacacacgctaactacaaggtcacgctggatcttcagaacagcacggaaaagtttggagggtttctccgctcagccttggatgttctttctcagatactagagctggccacactgcaggacattgggaagtgtgttgaagagatcctaggatacctgaaatcctgctttagtcgagaaccaatgatggcaactgtttgtgttcaacaattgttgaagactctctttggcacaaacttggcctcccagtttgatggcttatcttccaaccccagcaagtcacaaggccgagcacagcgccttggctcctccagtgtgaggccaggcttgtaccactactgcttcatggccccgtacacccacttcacccaggccctcgctgacgccagcctgaggaacatggtgcaggcggagcaggagaacgacacctcgggatggtttgatgtcctccagaaagtgtctacccagttgaagacaaacctcacgagtgtcacaaagaaccgtgcagataagaatgctattcataatcacattcgtttgtttgaacctcttgttataaaagctttaaaacagtacacgactacaacatgtgtgcagttacagaagcaggttttagatttgctggcgcagctggttcagttacgggttaattactgtcttctggattcagatcaggtgtttattggctttgtattgaaacagtttgaatacattgaagtgggccagttcagggaatcagaggcaatcattccaaacatctttttcttcttggtattactatcttatgaacgctatcattcaaaacagatcattggaattcctaaaatcattcagctctgtgatggcatcatggccagtggaaggaaggctgtgacacatgccataccggctctgcagcccatagtccacgacctctttgtattaagaggaacaaataaagctgatgcaggaaaagagcttgaaacccaaaaagaggtggtggtgtcaatgttactgagactcatccagtaccatcaggtgttggagatgttcattcttgtcctgcagcagtgccacaaggagaatgaagacaagtggaagcgactgtctcgacagatagctgacatcatcctcccaatgttagccaaacagcagatgcacattgactctcatgaagcccttggagtgttaaatacattatttgagattttggccccttcctccctccgtccggtagacatgcttttacggagtatgttcgtcactccaaacacaatggcgtccgtgagcactgttcaactgtggatatcgggaattctggccattttgagggttctgatttcccagtcaactgaagatattgttctttctcgtattcaggagctctccttctctccgtatttaatctcctgtacagtaattaataggttaagagatggggacagtacttcaacgctagaagaacacagtgaagggaaacaaataaagaatttgccagaagaaacattttcaaggtttctattacaactggttggtattcttttagaagacattgttacaaaacagctgaaggtggaaatgagtgagcagcaacatactttctattgccaggaactaggcacactgctaatgtgtctgatccacatcttcaagtctggaatgttccggagaatcacagcagctgccactaggctgttccgcagtgatggctgtggcggcagtttctacaccctggacagcttgaacttgcgggctcgttccatgatcaccacccacccggccctggtgctgctctggtgtcagatactgctgcttgtcaaccacaccgactaccgctggtgggcagaagtgcagcagaccccgaaaagacacagtctgtccagcacaaagttacttagtccccagatgtctggagaagaggaggattctgacttggcagccaaacttggaatgtgcaatagagaaatagtacgaagaggggctctcattctcttctgtgattatgtctgtcagaacctccatgactccgagcacttaacgtggctcattgtaaatcacattcaagatctgatcagcctttcccacgagcctccagtacaggacttcatcagtgccgttcatcggaactctgctgccagcggcctgttcatccaggcaattcagtctcgttgtgaaaacctttcaactccaaccatgctgaagaaaactcttcagtgcttggaggggatccatctcagccagtcgggagctgtgctcacgctgtatgtggacaggcttctgtgcacccctttccgtgtgctggctcgcatggtcgacatccttgcttgtcgccgggtagaaatgcttctggctgcaaatttacagagcagcatggcccagttgccaatggaagaactcaacagaatccaggaataccttcagagcagcgggctcgctcagagacaccaaaggctctattccctgctggacaggtttcgtctctccaccatgcaagactcacttagtccctctcctccagtctcttcccacccgctggacggggatgggcacgtgtcactggaaacagtgagtccggacaaagactggtacgttcatcttgtcaaatcccagtgttggaccaggtcagattctgcactgctggaaggtgcagagctggtgaatcggattcctgctgaagatatgaatgccttcatgatgaactcggagttcaacctaagcctgctagctccatgcttaagcctagggatgagtgaaatttctggtggccagaagagtgccctttttgaagcagcccgtgaggtgactctggcccgtgtgagcggcaccgtgcagcagctccctgctgtccatcatgtcttccagcccgagctgcctgcagagccggcggcctactggagcaagttgaatgatctgtttggggatgctgcactgtatcagtccctgcccactctggcccgggccctggcacagtacctggtggtggtctccaaactgcccagtcatttgcaccttcctcctgagaaagagaaggacattgtgaaattcgtggtggcaacccttgaggccctgtcctggcatttgatccatgagcagatcccgctgagtctggatctccaggcagggctggactgctgctgcctggccctgcagctgcctggcctctggagcgtggtctcctccacagagtttgtgacccacgcctgctccctcatctactgtgtgcacttcatcctggaggccgttgcagtgcagcctggagagcagcttcttagtccagaaagaaggacaaataccccaaaagccatcagcgaggaggaggaggaagtagatccaaacacacagaatcctaagtatatcactgcagcctgtgagatggtggcagaaatggtggagtctctgcagtcggtgttggccttgggtcataaaaggaatagcggcgtgccggcgtttctcacgccattgctaaggaacatcatcatcagcctggcccgcctgccccttgtcaacagctacacacgtgtgcccccactggtgtggaagcttggatggtcacccaaaccgggaggggattttggcacagcattccctgagatccccgtggagttcctccaggaaaaggaagtctttaaggagttcatctaccgcatcaacacactaggctggaccagtcgtactcagtttgaagaaacttgggccaccctccttggtgtcctggtgacgcagcccctcgtgatggagcaggaggagagcccaccagaagaagacacagagaggacccagatcaacgtcctggccgtgcaggccatcacctcactggtgctcagtgcaatgactgtgcctgtggccggcaacccagctgtaagctgcttggagcagcagccccggaacaagcctctgaaagctctcgacaccaggtttgggaggaagctgagcattatcagagggattgtggagcaagagattcaagcaatggtttcaaagagagagaatattgccacccatcatttatatcaggcatgggatcctgtcccttctctgtctccggctactacaggtgccctcatcagccacgagaagctgctgctacagatcaaccccgagcgggagctggggagcatgagctacaaactcggccaggtgtccatacactccgtgtggctggggaacagcatcacacccctgagggaggaggaatgggacgaggaagaggaggaggaggccgacgcccctgcaccttcgtcaccacccacgtctccagtcaactccaggaaacaccgggctggagttgacatccactcctgttcgcagtttttgcttgagttgtacagccgctggatcctgccgtccagctcagccaggaggaccccggccatcctgatcagtgaggtggtcagatcccttctagtggtctcagacttgttcaccgagcgcaaccagtttgagctgatgtatgtgacgctgacagaactgcgaagggtgcacccttcagaagacgagatcctcgctcagtacctggtgcctgccacctgcaaggcagctgccgtccttgggatggacaaggccgtggcggagcctgtcagccgcctgctggagagcacgctcaggagcagccacctgcccagcagggttggagccctgcacggcgtcctctatgtgctggagtgcgacctgctggacgacactgccaagcagctcatcccggtcatcagcgactatctcctctccaacctgaaagggatcgcccactgcgtgaacattcacagccagcagcacgtactggtcatgtgtgccactgcgttttacctcattgagaactatcctctggacgtagggccggaattttcagcatcaataatacagatgtgtggggtgatgctgtctggaagtgaggagtccaccccctccatcatttaccactgtgccctcagaggcctggagcgcctcctgctctctgagcagctctcccgcctggatgcagaatcgctggtcaagctgagtgtggacagagtgaacgtgcacagcccgcaccgggccatggcggctctgggcctgatgctcacctgcatgtacacaggaaaggagaaagtcagtccgggtagaacttcagaccctaatcctgcagcccccgacagcgagtcagtgattgttgctatggagcgggtatctgttctttttgataggatcaggaaaggctttccttgtgaagccagagtggtggccaggatcctgccccagtttctagacgacttcttcccaccccaggacatcatgaacaaagtcatcggagagtttctgtccaaccagcagccatacccccagttcatggccaccgtggtgtataaggtgtttcagactctgcacagcaccgggcagtcgtccatggtccgggactgggtcatgctgtccctctccaacttcacgcagagggccccggtcgccatggccacgtggagcctctcctgcttctttgtcagcgcgtccaccagcccgtgggtcgcggcgatcctcccacatgtcatcagcaggatgggcaagctggagcaggtggacgtgaaccttttctgcctggtcgccacagacttctacagacaccagatagaggaggagctcgaccgcagggccttccagtctgtgcttgaggtggttgcagccccaggaagcccatatcaccggctgctgacttgtttacgaaatgtccacaaggtcaccacctgctgagcgccatggtgggagagactgtgaggcggcagctggggccggagcctttggaagtctgcgcccttgtgccctgcctccaccgagccagcttggtccctatgggcttccgcacatgccgcgggcggccaggcaacgtgcgtgtctctgccatgtggcagaagtgctctttgtggcagtggccaggcagggagtgtctgcagtcctggtggggctgagcctgaggccttccagaaagcaggagcagctgtgctgcaccccatgtgggtgaccaggtcctttctcctgatagtcacctgctggttgttgccaggttgcagctgctcttgcatctgggccagaagtcctccctcctgcaggctggctgttggcccctctgctgtcctgcagtagaaggtgccgtgagcaggctttgggaacactggcctgggtctccctggtggggtgtgcatgccacgccccgtgtctggatgcacagatgccatggcctgtgctgggccagtggctgggggtgctagacacccggcaccattctcccttctctcttttcttctcaggatttaaaatttaattatatcagtaaagagattaattttaacgtaactctttctatgcccgtgtaaagtatgtgaatcgcaaggcctgtgctgcatgcgacagcgtccggggtggtggacagggcccccggccacgctccctctcctgtagccactggcatagccctcctgagcacccgctgacatttccgttgtacatgttcctgtttatgcattcacaaggtgactgggatgtagagaggcgttagtgggcaggtggccacagcaggactgaggacaggcccccattatcctaggggtgcgctcacctgcagcccctcctcctcgggcacagacgactgtcgttctccacccaccagtcagggacagcagcctccctgtcactcagctgagaaggccagccctccctggctgtgagcagcctccactgtgtccagagacatgggcctcccactcctgttccttgctagccctggggtggcgtctgcctaggagctggctggcaggtgttgggacctgctgctccatggatgcatgccctaagagtgtcactgagctgtgttttgtctgagcctctctcggtcaacagcaaagcttggtgtcttggcactgttagtgacagagcccagcatcccttctgcccccgttccagctgacatcttgcacggtgaccccttttagtcaggagagtgcagatctgtgctcatcggagactgccccacggccctgtcagagccgccactcctatccccaggccaggtccctggaccagcctcctgtttgcaggcccagaggagccaagtcattaaaatggaagtggattctggatggccgggctgctgctgatgtaggagctggatttgggagctctgcttgccgactggctgtgagacgaggcaggggctctgcttcctcagccctagaggcgagccaggcaaggttggcgactgtcatgtggcttggtttggtcatgcccgtcgatgttttgggtattgaatgtggtaagtggaggaaatgttggaactctgtgcaggtgctgccttgagacccccaagcttccacctgtccctctcctatgtggcagctggggagcagctgagatgtggacttgtatgctgcccacatacgtgagggggagctgaaagggagcccctcctctgagcagcctctgccaggcctgtatgaggcttttcccaccagctcccaacagaggcctcccccagccaggaccacctcgtcctcgtggcggggcagcaggagcggtagaaaggggtccgatgtttgaggaggcccttaagggaagctactgaattataacacgtaagaaaatcaccattccgtattggttgggggctcctgtttctcatcctagctttttcctggaaagcccgctagaaggtttgggaacgaggggaaagttctcagaactgttggctgctccccacccgcctcccgcctcccccgcaggttatgtcagcagctctgagacagcagtatcacaggccagatgttgttcctggctagatgtttacatttgtaagaaataacactgtgaatgtaaaacagagccattcccttggaatgcatatcgctgggctcaacatagagtttgtcttcctcttgtttacgacgtgatctaaaccagtccttagcaaggggctcagaacaccccgctctggcagtaggtgtcccccacccccaaagacctgcctgtgtgctccggagatgaatatgagctcattagtaaaaatgacttcacccacgcatatacataaagtatccatgcatgtgcatatagacacatctataattttacacacacacctctcaagacggagatgcatggcctctaagagtgcccgtgtcggttcttcctggaagttgactttccttagacccgccaggtcaagttagccgcgtgacggacatccaggcgtgggacgtggtcagggcagggctcattcattgcccactaggatcccactggcgaagatggtctccatatcagctctctgcagaagggaggaagactttatcatgttcctaaaaatctgtggcaagcacccatcgtattatccaaattttgttgcaaatgtgattaatttggttgtcaagttttgggggtgggctgtggggagattgcttttgttttcctgctggtaatatcgggaaagattttaatgaaaccagggtagaattgtttggcaatgcactgaagcgtgtttctttcccaaaatgtgcctcccttccgctgcgggcccagctgagtctatgtaggtgatgtttccagctgccaagtgctctttgttactgtccaccctcatttctgccagcgcatgtgtcctttcaaggggaaaatgtgaagctgaaccccctccagacacccagaatgtagcatctgagaaggccctgtgccctaaaggacacccctcgcccccatcttcatggagggggtcatttcagagccctcggagccaatgaacagctcctcctcttggagctgagatgagccccacgtggagctcgggacggatagtagacagcaataactcggtgtgtggccgcctggcaggtggaacttcctcccgttgcggggtggagtgaggttagttctgtgtgtctggtgggtggagtcaggcttctcttgctacctgtgagcatccttcccagcagacatcctcatcgggctttgtccctcccccgcttcctccctctgcggggaggacccgggaccacagctgctggccagggtagacttggagctgtcctccagaggggtcacgtgtaggagtgagaagaaggaagatcttgagagctgctgagggaccttggagagctcaggatggctcagacgaggacactcgcttgccgggcctgggcctcctgggaaggagggagctgctcagaatgccgcatgacaactgaaggcaacctggaaggttcaggggccgctcttcccccatgtgcctgtcacgctctggtgcagtcaaaggaacgccttcccctcagttgtttctaagagcagagtctcccgctgcaatctgggtggtaactgccagccttggaggatcgtggccaacgtggacctgcctacggagggtgggctctgacccaagtggggcctccttgtccaggtctcactgctttgcaccgtggtcagagggactgtcagctgagcttgagctcccctggagccagcagggctgtgatgggcgagtcccggagccccacccagacctgaatgcttctgagagcaaagggaaggactgacgagagatgtatatttaattttttaactgctgcaaacattgtacatccaaattaaaggaaaaaaatggaaaccatc

SEQ ID NO: 141486 - DNA, 429 bp, Homo sapiens
  Payload ID: 7820
  Gene Symbol: HTT
  Gene Name: huntingtin
  ENST ID: ENST00000509618
  CDS Start-End: 1-337
agagctggccacactgcaggacattgggaagtgtgttgaagagatcctaggatacctgaaatcctgctttagtcgagaaccaatgatggcaactgtttgtgttcaacaattgttgaagactctctttggcacaaacttggcctcccagtttgatggcttatcttccaaccccagcaagtcacaaggccgagcacagcgccttggctcctccagtgtgaggccaggcttgtaccactactgcttcatggccccgtacacccacttcacccaggccctcgctgacgccagcctgaggaacatggtgcaggcggagcaggagaacgacacctcggggtaacagttgtggcaagaatgctgtcgttggtggaagcacgaaagagcaagcaggaaatactttgtaaaagaataaaaacgaaaaatgttagcgaa

SEQ ID NO: 141487 - DNA, 8013 bp, Homo sapiens
  Payload ID: 7821
  Gene Symbol: HIP1
  Gene Name: huntingtin interacting protein 1
  Uniprot ID: O00291
  ENST ID: ENST00000336926
  CDS Start-End: 28-3141
gcccctgactcggctcctcgcggcgacatggatcggatggccagctccatgaagcaggtgcccaacccactgcccaaggtgctgagccggcgcggggtcggcgctgggctggaggcggcggagcgcgagagcttcgagcggactcagactgtcagcatcaataaggccattaatacgcaggaagtggctgtaaaggaaaaacacgccagaacgtgcatactgggcacccaccatgagaaaggggcacagaccttctggtctgttgtcaaccgcctgcctctgtctagcaacgcagtgctctgctggaagttctgccatgtgttccacaaactcctccgagatggacacccgaacgtcctgaaggactctctgagatacagaaatgaattgagtgacatgagcaggatgtggggccacctgagcgaggggtatggccagctgtgcagcatctacctgaaactgctaagaaccaagatggagtaccacaccaaaaatcccaggttcccaggcaacctgcagatgagtgaccgccagctggacgaggctggagaaagtgacgtgaacaactttttccagttaacagtggagatgtttgactacctggagtgtgaactcaacctcttccaaacagtattcaactccctggacatgtcccgctctgtgtccgtgacggcagcagggcagtgccgcctcgccccgctgatccaggtcatcttggactgcagccacctttatgactacactgtcaagcttctcttcaaactccactcctgcctcccagctgacaccctgcaaggccaccgggaccgcttcatggagcagtttacaaagttgaaagatctgttctaccgctccagcaacctgcagtacttcaagcggctcattcagatcccccagctgcctgagaacccacccaacttcctgcgagcctcagccctgtcagaacatatcagccctgtggtggtgatccctgcagaggcctcatcccccgacagcgagccagtcctagagaaggatgacctcatggacatggatgcctctcagcagaatttatttgacaacaagtttgatgacatctttggcagttcattcagcagtgatcccttcaatttcaacagtcaaaatggtgtgaacaaggatgagaaggaccacttaattgagcgactatacagagagatcagtggattgaaggcacagctagaaaacatgaagactgagagccagcgggttgtgctgcagctgaagggccacgtcagcgagctggaagcagatctggccgagcagcagcacctgcggcagcaggcggccgacgactgtgaattcctgcgggcagaactggacgagctcaggaggcagcgggaggacaccgagaaggctcagcggagcctgtctgagatagaaaggaaagctcaagccaatgaacagcgatatagcaagctaaaggagaagtacagcgagctggttcagaaccacgctgacctgctgcggaagaatgcagaggtgaccaaacaggtgtccatggccagacaagcccaggtagatttggaacgagagaaaaaagagctggaggattcgttggagcgcatcagtgaccagggccagcggaagactcaagaacagctggaagttctagagagcttgaagcaggaacttgccacaagccaacgggagcttcaggttctgcaaggcagcctggaaacttctgcccagtcagaagcaaactgggcagccgagttcgccgagctagagaaggagcgggacagcctggtgagtggcgcagctcatagggaggaggaattatctgctcttcggaaagaactgcaggacactcagctcaaactggccagcacagaggaatctatgtgccagcttgccaaagaccaacgaaaaatgcttctggtggggtccaggaaggctgcggagcaggtgatacaagacgccctgaaccagcttgaagaacctcctctcatcagctgcgctgggtctgcagatcacctcctctccacggtcacatccatttccagctgcatcgagcaactggagaaaagctggagccagtatctggcctgcccagaagacatcagtggacttctccattccataaccctgctggcccacttgaccagcgacgccattgctcatggtgccaccacctgcctcagagccccacctgagcctgccgactcactgaccgaggcctgtaagcagtatggcagggaaaccctcgcctacctggcctccctggaggaagagggaagccttgagaatgccgacagcacagccatgaggaactgcctgagcaagatcaaggccatcggcgaggagctcctgcccaggggactggacatcaagcaggaggagctgggggacctggtggacaaggagatggcggccacttcagctgctattgaaactgccacggccagaatagaggagatgctcagcaaatcccgagcaggagacacaggagtcaaattggaggtgaatgaaaggatccttggttgctgtaccagcctcatgcaagctattcaggtgctcatcgtggcctctaaggacctccagagagagattgtggagagcggcaggggtacagcatcccctaaagagttttatgccaagaactctcgatggacagaaggacttatctcagcctccaaggctgtgggctggggagccactgtcatggtggatgcagctgatctggtggtacaaggcagagggaaatttgaggagctaatggtgtgttctcatgaaattgctgctagcacagcccagcttgtggctgcatccaaggtgaaagctgataaggacagccccaacctagcccagctgcagcaggcctctcggggagtgaaccaggccactgccggcgttgtggcctcaaccatttccggcaaatcacagatcgaagagacagacaacatggacttctcaagcatgacgctgacacagatcaaacgccaagagatggattctcaggttagggtgctagagctagaaaatgaattgcagaaggagcgtcaaaaactgggagagcttcggaaaaagcactacgagcttgctggtgttgctgagggctgggaagaaggaacagaggcatctccacctacactgcaagaagtggtaaccgaaaaagaatagagccaaaccaacaccccatatgtcagtgtaaatccttgttacctatctcgtgtgtgttatttccccagccacaggccaaatccttggagtcccaggggcagccacaccactgccattacccagtgccgaggacatgcatgacacttccaaagactccctccatagcgacaccctttctgtttggacccatggtcatctctgttcttttcccgcctccctagttagcatccaggctggccagtgctgcccatgagcaagcctaggtacgaagaggggtggtggggggcagggccactcaacagagaggaccaacatccagtcctgctgactatttgacccccacaacaatgggtatccttaatagaggagctgcttgttgtttgttgacagcttggaaagggaagatcttatgccttttcttttctgttttcttctcagtcttttcagtttcatcatttgcacaaacttgtgagcatcagagggctgatggattccaaaccaggacactaccctgagatctgcacagtcagaaggacggcaggagtgtcctggctgtgaatgccaaagccattctccccctctttgggcagtgccatggatttccactgcttcttatggtggttggttgggttttttggttttgtttttttttttaagtttcactcacatagccaactctcccaaagggcacacccctggggctgagtctccagggccccccaactgtggtagctccagcgatggtgctgcccaggcctctcggtgctccatctccgcctccacactgaccaagtgctggcccacccagtccatgctccagggtcaggcggagctgctgagtgacagctttcctcaaaaagcagaaggagagtgagtgcctttccctcctaaagctgaatcccggcggaaagcctctgtccgcctttacaagggagaagacaacagaaagagggacaagagggttcacacagcccagttcccgtgacgaggctcaaaaacttgatcacatgcttgaatggagctggtgagatcaacaacactacttccctgccggaatgaactgtccgtgaatggtctctgtcaagcgggccgtctcccttggcccagagacggagtgtgggagtgattcccaactcctttctgcagacgtctgccttggcatcctcttgaataggaagatcgttccaccttctacgcaattgacaaacccggaagatcagatgcaattgctcccatcagggaagaaccctatacttggtttgctacccttagtatttattactaacctcccttaagcagcaacagcctacaaagagatgcttggagcaatcagaacttcaggtgtgactctagcaaggctcatctttctgcccggctacatcagccttcaagaatcagaagaaaggccaaggtgctggactgttactgacttggatcccaaagcaaggagatcatttggagctcttgggtcagagaaaatgagaaaggacagagccagcggctccaactcctttcagccacatgccccaggctctcgctgccctgtggacaggatgaggacagagggcacatgaacagcttgccagggatgggcagcccaacagcacttttcctcttctagatggaccccagcatttaagtgaccttctgatcttggaaaaacagcgtcttccttctttatctatagcaactcattggtggtagccatcaagcacttcccaggatctgctccaacagaatattgctaggttttgctacatgacgggttgtgagacttctgtttgatcactgtgaaccaacccccatctccctagcccacccccctccccaactccctctctgtgcattttctaagtgggacattcaaaaaactctctcccaggacctcggatgaccatactcagacgtgtgacctccatactgggctaaggaagtatcagcactagaaattgggcagtcttaatgttgaatgctgctttctgcttagtatttttttgattcaaggctcagaaggaatggtgcgtggcttccctgtcccagttgtggcaactaaaccaatcggtgtgttcttgatgcgggtcaacatttccaaaagtggctagtcctcacttctagatctcagccattctaactcatatgttcccaattaccaaggggtggccgggcacagtggctcacgcctgtaatcccagcactttgagaggctgaggtggtaggatcacctgaggtcaggagttcaagaccagcctgtccaacatggtgaaacccccatctctactaaaaataccaaaaattagccgagcgtagtgacgggtgcccgtaatcccagctactcaggaggctgagacaggagaatcacctgaaccccagaggcagaggttgcagtgagctgagatcacgccattgtactccagcctgggcaacaagagcaaaactccgtctcaaaaaaaaaaaaaaattacaaatggggcaaacagtctagtgtaatggatcaaattaagattctctgcccagccgggcacagtggcgcatgcctgtaatcccagaactttgggaggccaagacgggatgattgcttgagctcaggagtttgagaccaggctgggcatcatagcaagacctcatctctactaaaattcaaaaacaaaattagccgggcatgatggtgcatgcctgtagtctcagctagttggggagctaaggtgggagaattgcttgagcttgggaagtcgaggctgcagtcagccctgattgtgccagtgcactccggcctgggtgacagagtgagaccctgtctcaaaaaaaaaaagattctgtgtcagagcccagcccaggagtttgaggctgcaatgagccatgatttcccactgcactccagcctgagtgacagagcgagactccatctctttaaaaacaaacaaaaaattatctgaatgatcctgtctctaaaaagaagccacagaaatgtttaaaaacttcatcgacttagcctgagtcataacggttaagaaagcacttaaacagaagcagaggctaattcagtgtcacatgaggaagtagctgtcagatgtcacataattactttcgtaatagctcagattagaatggctaccccattctctagacaaaatcaaattgtcctattgtgactcttctaaaaatgaagatgaagagctatttaatgacacaccttggattaaaacgggaatcacatcttaaagctaaaaatgaacctgcaagccttctaaatgagtcactgagcatcactagtgacaagtctcgggtgagcgtaaatgggtcatgacaagatgggacagcaacaaaatcatggcttaggatcgacaagaagttaaaaaacagctgcatctgttacttaagtttgtaagacagtgccctgagacctctagagaaaagatgtttgtttacataagagaaagaggccagacatggtgtctcacacgtttaatcccagcactttgggaggcaggggcgggtggatcacctgaggtcaggagttcaagactagcctggccaacatggtgaaaccccgtctctactaaaaatacaaaaattagccgggcatggtggcaggcgcctataatcccagctactggggaggctgaggcaggagaatcacttgaacccgggggacagaggttgtagtgagccaagatcgcaccactgcactccagcctgggtcacagagtgagactccatctcaaaaaaaaaaaagagagagagagagaaagaaatagaagagaagagccatcttggcagggttattttatatctgagcaaggagtttaaatgagactagtttagattgtctgctgatgcagccgtccatagcagtacccctaaaatcccaccagaatacgggtccctctaacccagtggctggaagaaccactgtctagagcaacttttcttggaactgtcccagctaccaagtcagacaccaaggtttatgccaccaggtaacacgggaatcacaggtacatgtcgctccggtcagattagttggctttggcccctcgaccctgtgcaggagctagttctcagcttgcagctggaagttccctcttagctccttagtctagaggggtctcctggctccatttgaccctggtctttaataaccggtcagcatcttgctaccttctaccacctttccaaatctctggaaatcctgccagggaaagcctccagttccaacattggctttccaagcaaactggctttgccctctctctgccatccttgtcctccagagactgcaccacctgtagcatagaaaaccaccaccacggacctgccagccatcggcgcagcaaaccagccagctgtttgctgccaaattccttcctctcccaggtccagaccaaatacaagatcagcaccacaccgtggtgttgtcaggagccaaagcaacaggaaacaattcaatgctgttgggttcgattctgagagtagatttttccagacatgtctttcaggtgaccctcaactacctcaggtttgaaggccctaaatgaaactgattaccactcatagggacaaaccgagggggttcggttacatcttggtgataatgcagttgtctcaaacttataacagactctttcacatttcagtttgcagggatagggttgggtttgtttttcttctgtttttaacctttcccctgggtttccattagggtagttccttgaaatgaatttcatttttcactgagtgcctaccttcccagggcaggtggccactggcttctgtttccctccaacaatacttttattatggtattaagacctttctttgtataatacattgcatctgtgttttcaatttttcaaataaatatttccgcctggc

SEQ ID NO: 141488 - DNA, 7066 bp, Homo sapiens
  Payload ID: 7821
  Gene Symbol: HIP1
  Gene Name: huntingtin interacting protein 1
  Uniprot ID: O00291
  ENST ID: ENST00000434438
  CDS Start-End: 22-2982
gactcggctcctcgcggcgacatggatcggatggccagctccatgaagcaggtgcccaacccactgcccaaggtgctgagccggcgcggggtcggcgctgggctggaggcggcggagcgcgagagcttcgagcggactcagactgtcagcatcaataaggccattaatacgcaggaagtggctgtaaaggaaaaacacgccagaacgtgcatactgggcacccaccatgagaaaggggcacagaccttctggtctgttgtcaaccgcctgcctctgtctagcaacgcagtgctctgctggaagttctgccatgtgttccacaaactcctccgagatggacacccgaacgtcctgaaggactctctgagatacagaaatgaattgagtgacatgagcaggatgtggggccacctgagcgaggggtatggccagctgtgcagcatctacctgaaactgctaagaaccaagatggagtaccacaccaaaaatcccaggttcccaggcaacctgcagatgagtgaccgccagctggacgaggctggagaaagtgacgtgaacaactttttccagttaacagtggagatgtttgactacctggagtgtgaactcaacctcttccaaacagtattcaactccctggacatgtcccgctctgtgtccgtgacggcagcagggcagtgccgcctcgccccgctgatccaggtcatcttggactgcagccacctttatgactacactgtcaagcttctcttcaaactccactcctgcctcccagctgacaccctgcaaggccaccgggaccgcttcatggagcagtttacaaagttgaaagatctgttctaccgctccagcaacctgcagtacttcaagcggctcattcagatcccccagctgcctgagaacccacccaacttcctgcgagcctcagccctgtcagaacatatcagccctgtggtggtgatccctgcagaggcctcatcccccgacagcgagccagtcctagagaaggatgacctcatggacatggatgcctctcagcagaatttatttgacaacaagtttgatgacatctttggcagttcattcagcagtgatcccttcaatttcaacagtcaaaatggtgtgaacaaggatgagaaggaccacttaattgagcgactatacagagagatcagtggattgaaggcacagctagaaaacatgaagactgagagccagcgggttgtgctgcagctgaagggccacgtcagcgagctggaagcagatctggccgagcagcagcacctgcggcagcaggcggccgacgactgtgaattcctgcgggcagaactggacgagctcaggaggcagcgggaggacaccgagaaggctcagcggagcctgtctgagatagaaaggaaagctcaagccaatgaacagcgatatagcaagctaaaggagaagtacagcgagctggttcagaaccacgctgacctgctgcggaagaatgcagaggtgaccaaacaggtgtccatggccagacaagcccaggtagatttggaacgagagaaaaaagagctggaggattcgttggagcgcatcagtgaccagggccagcggaagactcaagaacagctggaagttctagagagcttgaagcaggaacttgccacaagccaacgggagcttcaggttctgcaaggcagcctggaaacttctgcccagtcagaagcaaactgggcagccgagttcgccgagctagagaaggagcgggacagcctggtgagtggcgcagctcatagggaggaggaattatctgctcttcggaaagaactgcaggacactcagctcaaactggccagcacagaggaatctatgtgccagcttgccaaagaccaacgaaaaatgcttctggtggggtccaggaaggctgcggagcaggtgatacaagacgccctgaaccagcttgaagaacctcctctcatcagctgcgctgggtctgcagatcacctcctctccacggtcacatccatttccagctgcatcgagcaactggagaaaagctggagccagtatctggcctgcccagaagacatcagtggacttctccattccataaccctgctggcccacttgaccagcgacgccattgctcatggtgccaccacctgcctcagagccccacctgagcctgccgactcactgaccgaggcctgtaagcagtatggcagggaaaccctcgcctacctggcctccctggaggaagagggaagccttgagaatgccgacagcacagccatgaggaactgcctgagcaagatcaaggccatcggcgaggagctcctgcccaggggactggacatcaagcaggaggagctgggggacctggtggacaaggagatggcggccacttcagctgctattgaaactgccacggccagaatagagggtacagcatcccctaaagagttttatgccaagaactctcgatggacagaaggacttatctcagcctccaaggctgtgggctggggagccactgtcatggtggatgcagctgatctggtggtacaaggcagagggaaatttgaggagctaatggtgtgttctcatgaaattgctgctagcacagcccagcttgtggctgcatccaaggtgaaagctgataaggacagccccaacctagcccagctgcagcaggcctctcggggagtgaaccaggccactgccggcgttgtggcctcaaccatttccggcaaatcacagatcgaagagacagacaacatggacttctcaagcatgacgctgacacagatcaaacgccaagagatggattctcaggttagggtgctagagctagaaaatgaattgcagaaggagcgtcaaaaactgggagagcttcggaaaaagcactacgagcttgctggtgttgctgagggctgggaagaaggaacagaggcatctccacctacactgcaagaagtggtaaccgaaaaagaatagagccaaaccaacaccccatatgtcagtgtaaatccttgttacctatctcgtgtgtgttatttccccagccacaggccaaatccttggagtcccaggggcagccacaccactgccattacccagtgccgaggacatgcatgacacttccaaagactccctccatagcgacaccctttctgtttggacccatggtcatctctgttcttttcccgcctccctagttagcatccaggctggccagtgctgcccatgagcaagcctaggtacgaagaggggtggtggggggcagggccactcaacagagaggaccaacatccagtcctgctgactatttgacccccacaacaatgggtatccttaatagaggagctgcttgttgtttgttgacagcttggaaagggaagatcttatgccttttcttttctgttttcttctcagtcttttcagtttcatcatttgcacaaacttgtgagcatcagagggctgatggattccaaaccaggacactaccctgagatctgcacagtcagaaggacggcaggagtgtcctggctgtgaatgccaaagccattctccccctctttgggcagtgccatggatttccactgcttcttatggtggttggttgggttttttggttttgtttttttttttaagtttcactcacatagccaactctcccaaagggcacacccctggggctgagtctccagggccccccaactgtggtagctccagcgatggtgctgcccaggcctctcggtgctccatctccgcctccacactgaccaagtgctggcccacccagtccatgctccagggtcaggcggagctgctgagtgacagctttcctcaaaaagcagaaggagagtgagtgcctttccctcctaaagctgaatcccggcggaaagcctctgtccgcctttacaagggagaagacaacagaaagagggacaagagggttcacacagcccagttcccgtgacgaggctcaaaaacttgatcacatgcttgaatggagctggtgagatcaacaacactacttccctgccggaatgaactgtccgtgaatggtctctgtcaagcgggccgtctcccttggcccagagacggagtgtgggagtgattcccaactcctttctgcagacgtctgccttggcatcctcttgaataggaagatcgttccaccttctacgcaattgacaaacccggaagatcagatgcaattgctcccatcagggaagaaccctatacttggtttgctacccttagtatttattactaacctcccttaagcagcaacagcctacaaagagatgcttggagcaatcagaacttcaggtgtgactctagcaaggctcatctttctgcccggctacatcagccttcaagaatcagaagaaaggccaaggtgctggactgttactgacttggatcccaaagcaaggagatcatttggagctcttgggtcagagaaaatgagaaaggacagagccagcggctccaactcctttcagccacatgccccaggctctcgctgccctgtggacaggatgaggacagagggcacatgaacagcttgccagggatgggcagcccaacagcacttttcctcttctagatggaccccagcatttaagtgaccttctgatcttggaaaaacagcgtcttccttctttatctatagcaactcattggtggtagccatcaagcacttcccaggatctgctccaacagaatattgctaggttttgctacatgacgggttgtgagacttctgtttgatcactgtgaaccaacccccatctccctagcccacccccctccccaactccctctctgtgcattttctaagtgggacattcaaaaaactctctcccaggacctcggatgaccatactcagacgtgtgacctccatactgggctaaggaagtatcagcactagaaattgggcagtcttaatgttgaatgctgctttctgcttagtatttttttgattcaaggctcagaaggaatggtgcgtggcttccctgtcccagttgtggcaactaaaccaatcggtgtgttcttgatgcgggtcaacatttccaaaagtggctagtcctcacttctagatctcagccattctaactcatatgttcccaattaccaaggggtggccgggcacagtggctcacgcctgtaatcccagcactttgagaggctgaggtggtaggatcacctgaggtcaggagttcaagaccagcctgtccaacatggtgaaacccccatctctactaaaaataccaaaaattagccgagcgtagtgacgggtgcccgtaatcccagctactcaggaggctgagacaggagaatcacctgaaccccagaggcagaggttgcagtgagctgagatcacgccattgtactccagcctgggcaacaagagcaaaactccgtctcaaaaaaaaaaaaaaattacaaatggggcaaacagtctagtgtaatggatcaaattaagattctctgcccagccgggcacagtggcgcatgcctgtaatcccagaactttgggaggccaagacgggatgattgcttgagctcaggagtttgagaccaggctgggcatcatagcaagacctcatctctactaaaattcaaaaacaaaattagccgggcatgatggtgcatgcctgtagtctcagctagttggggagctaaggtgggagaattgcttgagcttgggaagtcgaggctgcagtcagccctgattgtgccagtgcactccggcctgggtgacagagtgagaccctgtctcaaaaaaaaaaagattctgtgtcagagcccagcccaggagtttgaggctgcaatgagccatgatttcccactgcactccagcctgagtgacagagcgagactccatctctttaaaaacaaacaaaaaattatctgaatgatcctgtctctaaaaagaagccacagaaatgtttaaaaacttcatcgacttagcctgagtcataacggttaagaaagcacttaaacagaagcagaggctaattcagtgtcacatgaggaagtagctgtcagatgtcacataattactttcgtaatagctcagattagaatggctaccccattctctagacaaaatcaaattgtcctattgtgactcttctaaaaatgaagatgaagagctatttaatgacacaccttggattaaaacgggaatcacatcttaaagctaaaaatgaacctgcaagccttctaaatgagtcactgagcatcactagtgacaagtctcgggtgagcgtaaatgggtcatgacaagatgggacagcaacaaaatcatggcttaggatcgacaagaagttaaaaaacagctgcatctgttacttaagtttgtaagacagtgccctgagacctctagagaaaagatgtttgtttacataagagaaagaggccagacatggtgtctcacacgtttaatcccagcactttgggaggcaggggcgggtggatcacctgaggtcaggagttcaagactagcctggccaacatggtgaaaccccgtctctactaaaaatacaaaaattagccgggcatggtggcaggcgcctataatcccagctactggggaggctgaggcaggagaatcacttgaacccgggggacagaggttgtagtgagccaagatcgcaccactgcactccagcctgggtcacagagtgagactccatctcaaaaaaaaaaaagagagagagagagaaagaaatagaagagaagagccatcttggcagggttattttatatctgagcaaggagtttaaatgagactagtttagattgtctgctgatgcagccgtccatagcagtacccctaaaatcccaccagaatacgggtccctctaacccagtggctggaagaaccactgtctagagcaacttttcttggaactgtcccagctaccaagtcagacaccaaggtttatgccaccaggtaacacgggaatcacaggtacatgtcgctccggtcagattagttggctttggcccctcgaccctgtgcaggagctagttctcagcttgcagctggaagttccctct

SEQ ID NO: 141489 - DNA, 583 bp, Homo sapiens
  Payload ID: 7821
  Gene Symbol: HIP1
  Gene Name: huntingtin interacting protein 1
  ENST ID: ENST00000420909
  CDS Start-End: 146-583
gtaattggctctccggaaccagccggggacacgagggcctgctgggtcaggaagtggtggacaatgccaccctttcaggggagacacggcttggtcttaggtcctgtgtgactccagggaagtccagagaacagcctgttctcagatgatgttccctaacccagagccccctccagagactgtcagcatcaataaggccattaatacgcaggaagtggctgtaaaggaaaaacacgccagaacgtgcatactgggcacccaccatgagaaaggggcacagaccttctggtctgttgtcaaccgcctgcctctgtctagcaacgcagtgctctgctggaagttctgccatgtgttccacaaactcctccgagatggacacccgaacgtcctgaaggactctctgagatacagaaatgaattgagtgacatgagcaggatgtggggccacctgagcgaggggtatggccagctgtgcagcatctacctgaaactgctaagaaccaagatggagtaccacaccaaaaatcccaggttcccaggcaacctgcagatgagtgaccgccagctggacgaggctggagaa

SEQ ID NO: 141490 - DNA, 3120 bp, Homo sapiens
  Payload ID: 7821
  Gene Symbol: HIP1
  Gene Name: huntingtin interacting protein 1
  Uniprot ID: O00291
  ENST ID: ENST00000616821
  CDS Start-End: 5-3031
tcagatgatgttccctaacccagagccccctccagagactgtcagcatcaataaggccattaatacgcaggaagtggctgtaaaggaaaaacacgccagaacgtgcatactgggcacccaccatgagaaaggggcacagaccttctggtctgttgtcaaccgcctgcctctgtctagcaacgcagtgctctgctggaagttctgccatgtgttccacaaactcctccgagatggacacccgaacgtcctgaaggactctctgagatacagaaatgaattgagtgacatgagcaggatgtggggccacctgagcgaggggtatggccagctgtgcagcatctacctgaaactgctaagaaccaagatggagtaccacaccaaaaatcccaggttcccaggcaacctgcagatgagtgaccgccagctggacgaggctggagaaagtgacgtgaacaactttttccagttaacagtggagatgtttgactacctggagtgtgaactcaacctcttccaaacagtattcaactccctggacatgtcccgctctgtgtccgtgacggcagcagggcagtgccgcctcgccccgctgatccaggtcatcttggactgcagccacctttatgactacactgtcaagcttctcttcaaactccactcctgcctcccagctgacaccctgcaaggccaccgggaccgcttcatggagcagtttacaaagttgaaagatctgttctaccgctccagcaacctgcagtacttcaagcggctcattcagatcccccagctgcctgagaacccacccaacttcctgcgagcctcagccctgtcagaacatatcagccctgtggtggtgatccctgcagaggcctcatcccccgacagcgagccagtcctagagaaggatgacctcatggacatggatgcctctcagcagaatttatttgacaacaagtttgatgacatctttggcagttcattcagcagtgatcccttcaatttcaacagtcaaaatggtgtgaacaaggatgagaaggaccacttaattgagcgactatacagagagatcagtggattgaaggcacagctagaaaacatgaagactgagagccagcgggttgtgctgcagctgaagggccacgtcagcgagctggaagcagatctggccgagcagcagcacctgcggcagcaggcggccgacgactgtgaattcctgcgggcagaactggacgagctcaggaggcagcgggaggacaccgagaaggctcagcggagcctgtctgagatagaaaggaaagctcaagccaatgaacagcgatatagcaagctaaaggagaagtacagcgagctggttcagaaccacgctgacctgctgcggaagaatgcagaggtgaccaaacaggtgtccatggccagacaagcccaggtagatttggaacgagagaaaaaagagctggaggattcgttggagcgcatcagtgaccagggccagcggaagactcaagaacagctggaagttctagagagcttgaagcaggaacttgccacaagccaacgggagcttcaggttctgcaaggcagcctggaaacttctgcccagtcagaagcaaactgggcagccgagttcgccgagctagagaaggagcgggacagcctggtgagtggcgcagctcatagggaggaggaattatctgctcttcggaaagaactgcaggacactcagctcaaactggccagcacagaggaatctatgtgccagcttgccaaagaccaacgaaaaatgcttctggtggggtccaggaaggctgcggagcaggtgatacaagacgccctgaaccagcttgaagaacctcctctcatcagctgcgctgggtctgcagatcacctcctctccacggtcacatccatttccagctgcatcgagcaactggagaaaagctggagccagtatctggcctgcccagaagacatcagtggacttctccattccataaccctgctggcccacttgaccagcgacgccattgctcatggtgccaccacctgcctcagagccccacctgagcctgccgactcactgaccgaggcctgtaagcagtatggcagggaaaccctcgcctacctggcctccctggaggaagagggaagccttgagaatgccgacagcacagccatgaggaactgcctgagcaagatcaaggccatcggcgaggagctcctgcccaggggactggacatcaagcaggaggagctgggggacctggtggacaaggagatggcggccacttcagctgctattgaaactgccacggccagaatagaggagatgctcagcaaatcccgagcaggagacacaggagtcaaattggaggtgaatgaaaggatccttggttgctgtaccagcctcatgcaagctattcaggtgctcatcgtggcctctaaggacctccagagagagattgtggagagcggcaggggtacagcatcccctaaagagttttatgccaagaactctcgatggacagaaggacttatctcagcctccaaggctgtgggctggggagccactgtcatggtggatgcagctgatctggtggtacaaggcagagggaaatttgaggagctaatggtgtgttctcatgaaattgctgctagcacagcccagcttgtggctgcatccaaggtgaaagctgataaggacagccccaacctagcccagctgcagcaggcctctcggggagtgaaccaggccactgccggcgttgtggcctcaaccatttccggcaaatcacagatcgaagagacagacaacatggacttctcaagcatgacgctgacacagatcaaacgccaagagatggattctcaggttagggtgctagagctagaaaatgaattgcagaaggagcgtcaaaaactgggagagcttcggaaaaagcactacgagcttgctggtgttgctgagggctgggaagaaggaacagaggcatctccacctacactgcaagaagtggtaaccgaaaaagaatagagccaaaccaacaccccatatgtcagtgtaaatccttgttacctatctcgtgtgtgttatttccccagccacaggccaaatccttggag

SEQ ID NO: 141491 - DNA, 4539 bp, Homo sapiens
  Payload ID: 7822
  Gene Symbol: HIP1R
  Gene Name: huntingtin interacting protein 1 related
  Uniprot ID: O75146
  ENST ID: ENST00000253083
  CDS Start-End: 126-3332
ctcctccccggcgggcgggcccgggcgcggcgcggtggcctcgcggtgcctaggctggggctgccggaccgtgaggctgtgagtcgcgcggacggagccggacaaaagcgggcggcggcggcaggatgaacagcatcaagaacgtgccggcgcgggtgctgagccgcaggccgggccacagcctggaggccgagcgcgagcagttcgacaagacccaggccatcagcatcagcaaagccatcaacacccaggaggcccccgtgaaggagaagcacgcccggcgcatcattctgggcacacaccacgagaagggggctttcaccttctggtcctacgccattgggctgccgctgcccagcagctccattctcagctggaagttctgccacgtcctccacaaggtccttcgagacgggcaccccaatgtgctgcatgactgccagcggtaccgcagcaacatccgggagattggagacctgtggggacatttgcatgaccgctacggacagctggtgaatgtctacaccaagctgctgctgaccaagatctccttccacctcaagcatccccagtttcccgcgggcctggaggtgacagatgaggtactggagaaggcagctgggaccgatgtcaacaacatcttccagctcactgtggagatgtttgattacatggattgtgagctgaagctttctgaatcagttttccgacagctcaacacggccatcgccgtatcccagatgtcctcaggccagtgccgcctggcccccctcatccaggtcatccaggactgcagccacctctaccactacacggtcaagctcctgttcaagctacactcttgtctccctgcggacaccctgcaaggccacagggaccggttccacgagcagtttcacagcctcaggaacttcttccgcagagcctccgacatgctgtacttcaagcggctcatccagatcccccggctgcccgagggaccccctaacttcctgcgggcctcagccctggctgagcacatcaagccggtggtggtgatccccgaggaggccccggaagatgaggagccggagaatctcattgagatcagcacagggccccccgcgggggagccagtggtggtggctgacctcttcgatcagacgtttggaccccccaatgggtctgtgaaggacgacagggacctccagattgagagcttgaagagagaggtggaaatgctccgctctgaactggagaagatcaagctggaggcccagcggtacatcgcgcagctgaagagccaggtgaatgcactggagggtgagctggaggagcagcggaagcagaagcagaaggccctggtggataatgagcagctccgccacgagctggcccagctgagggctgcccagctggagggcgagcggagccagggcctgcgtgaggaggctgagaggaaggccagtgccacggaggcgcgctacaacaagctgaaggaaaagcacagtgagctcgtccatgtgcacgcggagctgctcagaaagaacgcggacacagccaagcagctgacggtgacgcagcaaagccaggaggaggtggcgcgggtgaaggagcagctggccttccaggtggagcaggtgaagcgggagtcggagttgaagctagaggagaagagcgaccagctggagaagctcaagagggagctggaggccaaggccggagagctggcccgcgcgcaggaggccctgagccacacagagcagagcaagtcggagctgagctcacggctggacacgctgagtgcggagaaggatgctctgagtggagctgtgcggcagcgggaggcagacctgctggcggcgcagagcctggtgcgcgagacagaggcggcgctgagccgggagcagcagcgcagctcccaggagcagggcgagttgcagggccggctggcagagagggagtctcaggagcaggggctgcggcagaggctgctggacgagcagttcgcagtgttgcggggcgctgctgccgaggccgcgggcatcctgcaggatgccgtgagcaagctggacgaccccctgcacctgcgctgtaccagctccccagactacctggtgagcagggcccaggaggccttggatgccgtgagcaccctggaggagggccacgcccagtacctgacctccttggcagacgcctccgccctggtggcagctctgacccgcttctcccacctggctgcggataccatcatcaatggcggtgccacctcgcacctggctcccaccgaccctgccgaccgcctcatagacacctgcagggagtgcggggcccgggctctggagctcatggggcagctgcaggaccagcaggctctgcggcacatgcaggccagcctggtgcggacacccctgcagggcatccttcagctgggccaggaactgaaacccaagagcctagatgtgcggcaggaggagctgggggccgtggtcgacaaggagatggcggccacatccgcagccattgaagatgctgtgcggaggattgaggacatgatgaaccaggcacgccacgccagctcgggggtgaagctggaggtgaacgagaggatcctcaactcctgcacagacctgatgaaggctatccggctcctggtgacgacatccactagcctgcagaaggagatcgtggagagcggcaggggggcagccacgcagcaggaattttacgccaagaactcgcgctggaccgaaggcctcatctcggcctccaaggctgtgggctggggagccacacagctggtggaggcagctgacaaggtggtgcttcacacgggcaagtatgaggagctcatcgtctgctcccacgagatcgcagccagcacggcccagctggtggcggcctccaaggtgaaggccaacaagcacagcccccacctgagccgcctgcaggaatgttctcgcacagtcaatgagagggctgccaatgtggtggcctccaccaagtcaggccaggagcagattgaggacagagacaccatggatttctccggcctgtccctcatcaagctgaagaagcaggagatggagacccaggtgcgtgtcctggagctggagaagacgctggaggctgaacgcatgcggctgggggagttgcggaagcaacactacgtgctggctggggcatcaggcagccctggagaggaggtggccatccggcccagcactgccccccgaagtgtaaccaccaagaaaccacccctggcccagaagcccagcgtggcccccagacaggaccaccagcttgacaaaaaggatggcatctacccagctcaactcgtgaactactaggccccccaggggtccagcagggtggctggtgacaggcctgggcctctgcaactgccctgacaggaccgagaggccttgcccctccacctggtgcccaagcctcccgccccaccgtctggatcaatgtcctcaaggcccctggcccttactgagcctgcagggtcctgggccatgtgggtggtgcttctggatgtgagtctcttatttatctgcagaaggaactttggggtgcagccaggacccggtaggcctgagcctcaactcttcagaaaatagtgtttttaatattcctcttcagaaaatagtgtttttaatattccgagctagagctcttcttcctacgtttgtagtcagcacactgggaaaccgggccagcgtggggctccctgccttctggactcctgaaggtcgtggatggatggaaggcacacagcccgtgccggctgatgggacgagggtcaggcatcctgtctgtggccttctggggcaccgattctaccaggccctccagctgcgtggtctccgcagaccaggctctgtgtgggctagaggaatgtcgcccattactcctcaggcctggccctcgggcctccgtgatgggagccccccaggaggggtcagatgctggaaggggccgctttctggggagtgaggtgagacatagcggcccgggcgctgccttcactcctggagtgagtttccatttccagctggaatctgcagccacccccatttcctgttttccattcccccgttctggccgcgccccactgcccacctgaaggggtggtttccagccctccggagagtgggcttggccctaggccctccagctcagccagaaaaagcccagaaacccaggtgctggaccagggccctcagggaggggaccctgcggctagagtgggctaggccctggctttgcccgtcagatttgaacgaatgtgtgtcccttgagcccaaggagagcggcaggaggggtgggaccaggctgggaggacagagccagcagctgccatgccctcctgctccccccaccccagccctagccctttagcctttcaccctgtgctctggaaaggctaccaaatactggccaaggtcaggaggagcaaaaatgagccagcaccagcgccttggctttgtgttagcatttcctcctgaagtgttctgttggcaataaaatgcactttgactgtttgttgtc

SEQ ID NO: 141492 - DNA, 924 bp, Homo sapiens
  Payload ID: 7822
  Gene Symbol: HIP1R
  Gene Name: huntingtin interacting protein 1 related
  ENST ID: ENST00000535012
  CDS Start-End: 1-593
gacgacatccactagcctgcagaaggagatcgtggagagcggcaggggaggcagctgacaaggtggtgcttcacacgggcaagtatgaggagctcatcgtctgctcccacgagatcgcagccagcacggcccagctggtggcggcctccaaggtgaaggccaacaagcacagcccccacctgagccgcctgcaggaatgttctcgcacagtcaatgagagggctgccaatgtggtggcctccaccaagtcaggccaggagcagattgaggacagagacaccatggatttctccggcctgtccctcatcaagctgaagaagcaggagatggagacccaggtgcgtgtcctggagctggagaagacgctggaggctgaacgcatgcggctgggggagttgcggaagcaacactacgtgctggctggggcatcaggcagccctggagaggaggtggccatccggcccagcactgccccccgaagtgtaaccaccaagaaaccacccctggcccagaagcccagcgtggcccccagacaggaccaccagcttgacaaaaaggatggcatctacccagctcaactcgtgaactactaggccccccaggggtccagcagggtggctggtgacaggcctgggcctctgcaactgccctgacaggaccgagaggccttgcccctccacctggtgcccaagcctcccgccccaccgtctggatcaatgtcctcaaggcccctggcccttactgagcctgcagggtcctgggccatgtgggtggtgcttctggatgtgagtctcttatttatctgcagaaggaactttggggtgcagccaggacccggtaggcctgagcctcaactcttcagaaaatagtgtttttaatattcctcttcagaaaatagtgtttttaatattccgagctagagct

SEQ ID NO: 141493 - DNA, 4777 bp, Homo sapiens
  Payload ID: 7823
  Gene Symbol: HYPK
  Gene Name: huntingtin interacting protein K
  Uniprot ID: Q9NX55
  ENST ID: ENST00000406925
  CDS Start-End: 4112-4501
tctttatcctcacctgaaactcatagctgtaaaccttgacaatccacaggggtccaaatacctcagccaggtaggaggcctcattgctgagaaagaatagagttcttaagctggtttagttaaatagggattatctgggggcatttactaccaattggtccatactggtaatcctcaaaagggtaccatactccctgtgcccttttccaccaaagatttagaattctattcatgtgagagccctaaggtctttggacatattttaaattctcaagtcattccccccacccccttcatctcatacagatcatctgacaaagtactattcttagaatttgtccctgtttgtggggagcttttctcactctagtcttgctctaaactttaaataatggtcccagacattgtcctgaccatccttccctgtcttgggcaccctcctttcatacctccacccttgacacctttacgcaccaagcaaaaagcacacaagcatacatgatgctagcactcagcattgctagagagatatctggtgtttggggttccattttactcaggccaggcaggcacagggtgtgattctgtccttgaaggattactgggaagggacaacagaagagatgggtattaacaatgagctaggtatttggcaggggcaaaaaaaggtcttagcatggagaatccaggtcctgtcccttacctctctctggaggacggctggacagtgcagagaaagtcagatacatgatatagcagctgatgacagaagcttgtaggaggccagagcggggttgctctggggagtaagtataattgctttagtctacaggctggtaatttcctccatttctacccccacttgtacttctgtctccccatcctttggtggggatagggaagcagagattcttttatcaaataattgagattagggaggtaatgaaacttgctatgcttttaaggcccccaaaacctggaatgctgtaggacatgtacccactgaggcggatgcaaggagcgatggagaggaaggagatgaggccacagaagcaaaggtgcagactgaggagcatcttgttaagcaggcagccagctgggtgtgtataatagtggaataggagcacagctcccacacctgccatgctgtagaatcctagggtggccagcaggacagccaggaaccagctacagtcttgagctgcacctgtctgcctaagggtggaaagtgggcaatggcttggagctccagcattttttttttttttgagttgggagtcttgctctgttgcccaggctggagtgcaatggtgtggtctcagctcactgcaacctccgcctcttgggttcaagtgattctcctacctcagcctcctgagtagctgggattacaggcacctaccaccatgtccagctaacttttatatttttactagagatggggtttcaccatgttggccaggctggtctcaaactcctgacctcatgatccacccacctcggcctcccaaagtgctgggattacaggcatgagccaccgtgcccagctggagctccaactcttttacccattaccaactactcccctgctctcagaagactggtgtgactagccatcctacttggcccacgcagtcatcacattcctaagcttttttgatactgctcagtgggaagctgtgggaccagtgctctgccgtgccttttgcccagccctttccatgtagtaatactagaaacctccccaggaaaagcctttagggttatgtgccccttaccagttcttgttccaggaatgggcaaaagctgtaataagcaccaactgcagtaggatgaatgcaaagcctccacagatgccaatgtaatgccatgctgcaagatgggcaccagtggaaaaatgtcaaattgttacttttttttttttttgagacagagtcttgctctgtcacccaggctagagtgcagtggtgtgatttcagctcactgcaacctctgcctcccgggttcaagtgattcttctgcctccacctcctgagcagctgggattacaggtgcgtgccaccatgcccggctaatattttgtatttttagtagagatggggtttcaccatgttagccaggattgtcttgatctcttgacctcgtgatccgcccgcctcagcctcccaaagtgctgggattacaggcgtgagccactgcacccggccattactcctcttcttacccacttgttatcttagaaaacttagcctactcctgccaagagtgtgggagggagagtacctgggaagagatgctcatcaggaatgcagaaggcaatagcacagagacctaacaggaacagcagcttgaggagccagaagctggttaggagggagaaagaaaaacagactcaggagaaaaggcaaaggacagtgaagagtgcctatggggaaaggcaaaagagaaaccaaaaatataggaaagaggacagacgagacaactaaggaggaaccaatcccaaatgagagggggttgggacaggcctactgcaccttattccaaattctaactcaaagatacttaatagcatctgggcaatgttttacagtttataaaggattgtgttaccaagataaccccactgttacctccattttagatgctagaagcacaaagtctggctcaaggttacacagcaagtacacgagaagcagggacttaaacctgttttctgtctttttacagtgctattacttcatcccggaatttcctttacccagcctatgtctactttccctcctctgtcccctccccacccagaaagtacacacaaacctattatgcagctgtgcccgcgggctggtgggggagtggaggtggaccagcaacacagcctgcagcaggtggaaggtggcggttcctgcacatactcggtacacagccccagagccactgagcactggacagtcagagaggccaaacaggtgggcacacaaccccgagggcatctggatctgggagtgtgtgtgagagaaatggcaggacaagtcataatgcatggaaaggtacctacttgtcacgggtatgaccactcatttgtctcctgcccccaaccgaaaccttttctatcttagggtttttccttttatctcttcccacctgacaacccgaccccctctcacttaccctgtgtgtcttgccccacaccctttccactactgtccttgacagcaggaggcagcagattgctgaggcccccacatggaggaggatgtagaacaggcggctgcaagtggatgcggtgagagagggccacctagagtggcagcagctggcacaaggagcaggcccacagcagcacacctgggagtagagcagatgcaaggcagcgaggtggagacttgctgaggaaaggcatacgttaatgtatgtgtgaggttaacccaggaggttgaattccaaaatttccccttcccctttcttccttttactcaggttctgtttcaagctgattccagccatttgggattgccgcccactgacaacttagtagggctttcattataagcaggcttgagatatctgacctttctctcgacctaaacacctggggctggaaacatggcgggagagatttacagattatacctggggcaacgaaccagaacgacattagaggagaaaagaggcctgtcgtttttattggcttctgcacgtcttcctccccagcttcggccactctccccttcgcaccctctcacctgacagaagggacttttcactaggacactgctgcctccgctgtgctgctgtgccaggcccagggaggtgccggggctggggccggccttggcacccaccatccttgtcccagggattaggcttaggtccaccagatggaaggcagatgagagcagcagttgcttctgtcctcagcccattggactgccactgtgttggggctgagcacccggtcccgggcagaatggagacgtccggaagagaacactgacctccaggttgcgcttctagaactggagcagaaagaaggtgtggcccagggccagccccgcctcctccccgggcggaagctgtgtcagttgccggaagtcggcgtgaggtggggcttatgcggcggcgtggtgaaatagatatggcgaccgagggggatgtggagctggagttggagactgagaccagtggaccagagcggcctccggagaagccacggaaacatgacagcggtgcggcggacttggagcgggtcaccgactatgcagaggagaaggagatccagagttccaatctggagacggccatgtctgtgattggagacagaaggtcccgggagcagaaagccaaacaggagcgggagaaagaactggcaaaagtcactatcaagaaggaagatctggagctaataatgactgagatggagatatctcgagcagcagcagaacgcagtttgcgggaacacatgggcaacgtggtagaggcgcttattgccctaaccaactgatgcgtgctttctcaaatatacctactggattaatttatggcaataaaatttttttttgtctttttcagttttatcatcttgggtcaagtagagtgtatactatatcctatgttgtggagaatttatatgttggagactaactgaatttaagtgacccattaaaatctagcacacctgtatgaaaaatcagtgtagaagaatacctcatgtgcagatgctaggtggcaggccagtctcattcatctgactagctctcaacagtattcaaggtacatc

SEQ ID NO: 141494 - DNA, 1712 bp, Homo sapiens
  Payload ID: 7823
  Gene Symbol: HYPK
  Gene Name: huntingtin interacting protein K
  ENST ID: ENST00000458412
  CDS Start-End: 1-249
atgcggcggcgtggtgaaatagatatggcgaccgagggggatgtggagctggagttggagactgagaccagtggaccagagcggcctccggagaagccacggaaacatgacagcggtgcggcggacttggagcgggtcaccgactatgcagaggagaaggagatccagagttccaatctggagacgggagaaagaactggcaaaagtcactatcaagaaggaagatctggagctaatagtgagtggtagtgcctaactagtgtatgcggaggggaggctattctgcttaatttgggttgtttcctgaaacaagcggagtcagtatatttggtggcacattaatgcctgggaacctatgtaacatgatttttttctgcagatgactgagatggagatatctcgagcagcagcagaacgcagtttgcgggaacacatgggcaacgtggtagaggcgcttattgccctaaccaactgatgcgtgctttctcaaatatacctactggattaatttatggcaataaaatttttttttgtctttttcagttttatcatcttgggtcaagtagagtgtatactatatcctatgttgtggagaatttatatgttggagactaactgaatttaagtgacccattaaaatctagcacacctgtatgaaaaatcagtgtagaagaatacctcatgtgcagatgctaggtggcaggccagtctcattcatctgactagctctcaacagtattcaaggtacatctggagtctcagcagagttactgtactcaaatggcatgtgtctccaagacagcttatgaatatctaaaaggccagctacctgcctaggagccactatatatatagatagatgtaggttatgaacccagttcataggccaccttgagttagaattttggtacctacaacatgcttgattttgagtgattaaaaaaaaataatttggctgggtgctgtggctcacacctctaatcccagcactttgggaggtcgaggcaggtagatcacgaggtcaggaattcaagaccagcctggccaacatgtgaaaccccgtctccactgaaaatagaaaaattagctgggcatggtggtgggcgcctataatcccagctattctggaggctgaggcaggaatcgcttgaaattggaaagcagaggttgcagtgagctgagatcacactactgtactactgtactccagcctgggggaaagagtgaaactccatctcaaaaaaaaaaaaaaaaaaaaaagcccgggcacagtggctcacacctgtaatcccagcactttgggaggctgaggcagtcggatcatgaggtcaggagttgaagacaagcctggccaacatggtgaaaccctgtctctactaaaaatacaaaaaaaataaaattagccaggcgtggtggtgcatgcctgtagtcccagctactcaggaggctgaagcagaagaattgcttgaaccagggaggcggaagttgcagtgagctgagattgtgccactgtactccagcctgggtgacagagcgagactgtctcaaaaacaaaacaacaaaaaagaatttaggggccaggcatggtggctcatgcctgtaatcccaacaccttgggaagctgaggcaagacgatcacttgagcccagcagtttgagaccagcttgggcaacacagtgagatttcgtctctaccgcgctccccccaccacc

SEQ ID NO: 141495 - DNA, 1051 bp, Homo sapiens
  Payload ID: 7823
  Gene Symbol: HYPK
  Gene Name: huntingtin interacting protein K
  Uniprot ID: Q9NX55
  ENST ID: ENST00000442995
  CDS Start-End: 177-566
agaaggcctcgcacaaaacactgtacaaacccgaaaggaagtctgagagacgaaccgccttcctccctgaagcttctagaactggagcagaaagaaggtgtggcccagggccagccccgcctcctccccgggcggaagctgtgtcagttgccggaagtcggcgtgaggtggggcttatgcggcggcgtggtgaaatagatatggcgaccgagggggatgtggagctggagttggagactgagaccagtggaccagagcggcctccggagaagccacggaaacatgacagcggtgcggcggacttggagcgggtcaccgactatgcagaggagaaggagatccagagttccaatctggagacggccatgtctgtgattggagacagaaggtcccgggagcagaaagccaaacaggagcgggagaaagaactggcaaaagtcactatcaagaaggaagatctggagctaataatgactgagatggagatatctcgagcagcagcagaacgcagtttgcgggaacacatgggcaacgtggtagaggcgcttattgccctaaccaactgatgcgtgctttctcaaatatacctactggattaatttatggcaataaaatttttttttgtctttttcagttttatcatcttgggtcaagtagagtgtatactatatcctatgttgtggagaatttatatgttggagactaactgaatttaagtgacccattaaaatctagcacacctgtatgaaaaatcagtgtagaagaatacctcatgtgcagatgctaggtggcaggccagtctcattcatctgactagctctcaacagtattcaaggtacatctggagtctcagcagagttactgtactcaaatggcatgtgtctccaagacagcttatgaatatctaaaaggccagctacctgcctaggagccactatatatatagatagatgtaggttatgaacccagttcataggccaccttgagttagaattttggtacctacaacatgcttgattttgagtgattaaaaaaaaataatttggctggg

SEQ ID NO: 141496 - DNA, 4564 bp, Homo sapiens
  Payload ID: 7823
  Gene Symbol: HYPK
  Gene Name: huntingtin interacting protein K
  ENST ID: ENST00000620261
  CDS Start-End: 2428-3033
tctttatcctcacctgaaactcatagctgtaaaccttgacaatccacaggggtccaaatacctcagccaggtaggaggcctcattgctgagaaagaatagagttcttaagctggtttagttaaatagggattatctgggggcatttactaccaattggtccatactggtaatcctcaaaagggtaccatactccctgtgcccttttccaccaaagatttagaattctattcatgtgagagccctaaggtctttggacatattttaaattctcaagtcattccccccacccccttcatctcatacagatcatctgacaaagtactattcttagaatttgtccctgtttgtggggagcttttctcactctagtcttgctctaaactttaaataatggtcccagacattgtcctgaccatccttccctgtcttgggcaccctcctttcatacctccacccttgacacctttacgcaccaagcaaaaagcacacaagcatacatgatgctagcactcagcattgctagagagatatctggtgtttggggttccattttactcaggccaggcaggcacagggtgtgattctgtccttgaaggattactgggaagggacaacagaagagatgggtattaacaatgagctaggtatttggcaggggcaaaaaaaggtcttagcatggagaatccaggtcctgtcccttacctctctctggaggacggctggacagtgcagagaaagtcagatacatgatatagcagctgatgacagaagcttgtaggaggccagagcggggttgctctggggagtaagtataattgctttagtctacaggctggtaatttcctccatttctacccccacttgtacttctgtctccccatcctttggtggggatagggaagcagagattcttttatcaaataattgagattagggaggtaatgaaacttgctatgcttttaaggcccccaaaacctggaatgctgtaggacatgtacccactgaggcggatgcaaggagcgatggagaggaaggagatgaggccacagaagcaaaggtgcagactgaggagcatcttgttaagcaggcagccagctgggtgtgtataatagtggaataggagcacagctcccacacctgccatgctgtagaatcctagggtggccagcaggacagccaggaaccagctacagtcttgagctgcacctgtctgcctaagggtggaaagtgggcaatggcttggagctccagcattttttttttttttgagttgggagtcttgctctgttgcccaggctggagtgcaatggtgtggtctcagctcactgcaacctccgcctcttgggttcaagtgattctcctacctcagcctcctgagtagctgggattacaggcacctaccaccatgtccagctaacttttatatttttactagagatggggtttcaccatgttggccaggctggtctcaaactcctgacctcatgatccacccacctcggcctcccaaagtgctgggattacaggcatgagccaccgtgcccagctggagctccaactcttttacccattaccaactactcccctgctctcagaagactggtgtgactagccatcctacttggcccacgcagtcatcacattcctaagcttttttgatactgctcagtgggaagctgtgggaccagtgctctgccgtgccttttgcccagccctttccatgtagtaatactagaaacctccccaggaaaagcctttagggttatgtgccccttaccagttcttgttccaggaatgggcaaaagctgtaataagcaccaactgcagtaggatgaatgcaaagcctccacagatgccaatgtaatgccatgctgcaagatgggcaccagtggaaaaatgtcaaattgttacttttttttttttttgagacagagtcttgctctgtcacccaggctagagtgcagtggtgtgatttcagctcactgcaacctctgcctcccgggttcaagtgattcttctgcctccacctcctgagcagctgggattacaggtgcgtgccaccatgcccggctaatattttgtatttttagtagagatggggtttcaccatgttagccaggattgtcttgatctcttgacctcgtgatccgcccgcctcagcctcccaaagtgctgggattacaggcgtgagccactgcacccggccattactcctcttcttacccacttgttatcttagaaaacttagcctactcctgccaagagtgtgggagggagagtacctgggaagagatgctcatcaggaatgcagaaggcaatagcacagagacctaacaggaacagcagcttgaggagccagaagctggttaggagggagaaagaaaaacagactcaggagaaaaggcaaaggacagtgaagagtgcctatggggaaaggcaaaagagaaaccaaaaatataggaaagaggacagacgagacaactaaggaggaaccaatcccaaatgagagggggttgggacaggcctactgcaccttattccaaattctaactcaaagatacttaatagcatctgggcaatgttttacagtttataaaggattgtgttaccaagataaccccactgttacctccattttagatgctagaagcacaaagtctggctcaaggttacacagcaagtacacgagaagcagggacttaaacctgttttctgtctttttacagtgctattacttcatcccggaatttcctttacccagcctatgtctactttccctcctctgtcccctccccacccagaaagtacacacaaacctattatgcagctgtgcccgcgggctggtgggggagtggaggtggaccagcaacacagcctgcagcaggtggaaggtggcggttcctgcacatactcggtacacagccccagagccactgagcactggacagtcagagaggccaaacaggtgggcacacaaccccgagggcatctggatctgggagtgtgtggagaaatggcaggacaagtcataatgcatggaaaggtacctacttgtcacgggtatgaccactcatttgtctcctgcccccaaccgaaaccttttctatcttagggtttttccttttatctcttcccacctgacaacccgaccccctctcacttaccctgtgtgtcttgccccacaccctttccactactgtccttgacagcaggaggcagcagattgctgaggcccccacatggaggaggatgtagaacaggcggctgcaagtggatgcggtgagagagggccacctagagtggcagcagctggcacaaggagcaggcccacagcagcacacctgggagtagagcagatgcaaggcagcgaggtggagacttgctgaggaaaggcatacgttaatgtatgtgtgaggttaacccaggaggttgaattccaaaatttccccttcccctttcttccttttactcaggttctgtttcaagctgattccagccatttgggattgccgcccactgacaacttagtagggctttcattataagcaggcttgagatatctgacctttctctcgacctaaacacctggggctggaaacatggcgggagagatttacagattatacctggggcaacgaaccagaacgacattagaggagaaaagaggcctgtcgtttttattggcttctgcacgtcttcctccccagcttcggccactctccccttcgcaccctctcacctgacagaagggacttttcactaggacactgctgcctccgctgtgctgctgtgccaggcccagggaggtgccggggctggggccggccttggcacccaccatccttgtcccagggattaggcttaggtccaccagatggaaggcagatgagagcagcagttgcttctgtcctcagcccattggactgccactgtgttggggctgagcacccggtcccgggcagaatggagacgtccggaagagaacactgacctccaggttgcgcttctagaactggagcagaaagaaggtgtggcccagggccagccccgcctcctccccgggcggaagctgtgtcagttgccggaagtcggcgtgaggtggggcttatgcggcggcgtggtgaaatagatatggcgaccgagggggatgtggagctggagttggagactgagaccagtggaccagagcggcctccggagaagccacggaaacatgacagcggtgcggcggacttggagcgggtcaccgactatgcagaggagaaggagatccagagttccaatctggagacggccatgtctgtgattggagacagaaggtcccgggagcagaaagccaaacaggagcgggagaaagaactggcaaaagtcactatcaagaaggaagatctggagctaataatgactgagatggagatatctcgagcagcagcagaacgcagtttgcgggaacacatgggcaacgtggtagaggcgcttattgccctaaccaactgatgcgtgctttctcaaatatacctactggattaatttatggcaataaaatttttttttgtctttttc

SEQ ID NO: 141497 - DNA, 501 bp, Homo sapiens
  Payload ID: 7824
  Gene Symbol: HYPM
  Gene Name: huntingtin interacting protein M
  Uniprot ID: O75409
  ENST ID: ENST00000341016
  CDS Start-End: 24-377
gagagccaaacccagcaaacatcatgtcagagaaaaagaactgtaagaactcgtctacaaataacaaccagactcaagacccttctagaaatgagctacaggtccctaggagcttcgtggaccgcgttgtgcaagatgaacgagacgtccaaagccagagttcctccacaataaataccctccttaccttgctcgattgccttgctgactacatcatggagcgggtaggcttggaggccagcaacaatggcagtatgcgcaacacttcacaagatagggagagagaagtggacaacaaccgtgagccccacagcgctgagagtgatgtgactcgctttttgtttgatgagatgcccaaatccaggaagaatgactgaagactgggtcccagagccttgaagggaacctcacaggcttagccagggcaaaaatgtgtcacagctgaggaatatctgctgttgtcatcaacaagtgctattaaaggatgtaaatccatgagta

SEQ ID NO: 141498 - DNA, 4087 bp, Homo sapiens
  Payload ID: 7825
  Gene Symbol: HAP1
  Gene Name: huntingtin-associated protein 1
  Uniprot ID: P54257
  ENST ID: ENST00000310778
  CDS Start-End: 11-2026
cagactcgagatgcgcccgaagaggttgggccggtgctgcgcggggagccggctcggacccggggacccagcagcactcacctgtgcaccttcgccctcagccagtcccgctccggagccctctgcgcagccgcaggcacggggcactggacagagagtaggatcccgagccacctctggatcccagttcctctcggaagcccgcaccggagctcgcccggcctcggaggctggagccaaggcaggagcccggcgcccgtccgcattctcggccatccaaggggatgtccggtctatgcccgacaattcggacgcgccgtggacccgcttcgtattccaagggccgtttggttcccgggccactggccgggggactggaaaggcagcgggcatctggaagacgccagccgcctacgttggccggcgacccggggtgtccggccctgagcgcgccgcctttattcgggagctggaggaagcactgtgtcctaacctacctccgccagtcaaaaagatcacccaggaagacgtcaaagtgatgttatatttgctggaggagcttctcccacctgtctgggagagcgttacctatgggatggtcctgcagagagagagggacctgaacactgcagctcgcatcggccagtccctggtgaaacagaacagtgttttgatggaggagaacagcaagctggaagccctgctgggctcagccaaggaggagattttatacctcagacaccaggtgaacttgcgggatgagctcctccagctctactcagattctgatgaggaggatgaggatgaagaagaggaggaggaagaaaaggaggcagaagaggaacaggaagaagaagaagcagaggaagacctgcagtgtgctcatccctgtgatgcccctaagctgatttcgcaggaggcattgctgcaccagcaccactgcccacagctggaagccttgcaggagaagctgaggctgctggaggaggagaatcatcagctgagagaagaggcctctcaactcgacactcttgaggatgaggaacagatgctcattctggagtgtgtggagcagttttcggaggccagccaacagatggctgagctgtcggaggtgctggtgctcaggctggaaaactatgaacggcagcagcaggaggtcgctcggctgcaggcccaggtgctgaagctgcagcagcgctgccggatgtatggggctgagactgaaaagttgcagaagcagctggcttcggagaaggaaatccagatgcagctccaggaagagagcgtgtgggtgggttcccagctgcaggacctgcgggagaagtacatggattgtgggggcatgctgattgagatgcaggaggaggtgaagaccctccgccagcaacccccagtgtccactgggtctgccacccattacccatacagcgtgcctctggagactcttcctggtttccaggagacgctggctgaggagctcagaacgtctctaaggaggatgatctcagaccctgtgtattttatggagaggaattatgagatgcccagaggggacacatccagcctaaggtatgattttcgctacagtgaggatcgagagcaggtgcgggggtttgaggctgaggaagggttgatgctggcagcggatatcatgcggggggaagatttcacgcctgcggaggagttcgtgccccaggaggagctgggggctgccaagaaggtgccggctgaggaaggggtgatggaagaggcagagctggtgtcagaggagaccgagggctgggaggaggtggaactggagctggatgaggcaacgcggatgaacgtggtgacatcagccctggaggccagcggcttgggcccttcacacctggacatgaattatgtcctccagcagctggccaactggcaagatgcccattacaggcggcagctgaggtggaagatgctccagaaaggtgagtgcccccacggggccctccctgccgccagccggacaagctgcagatcgtcgtgccgatgaaaagagagggtggataagctccccgagtgctcacctgccccagcctggctctacctgctgtgcttatttgcatggactttgcatatcatttgcatagacacctctgatccccttcagtgggaaccgtagtgtcagtgctcatttatgtggcatttgcttaggattccagatctccatccacttttctcctgggggctgggctgggggttagggctgggactgtgcccccacactgcgcctcagcttcccatctctgcccgcttgcttcccctgcccccaacccctgcctcctctatcccccaggctctccaactctgcagcagtggcagcagcagtcaaaacaaacacggggggcggtgggtgggatggtggagcagcccgggggctgacccaggctggaggacagggccagccaccctcccacggcctgggaggaagagaggccttctgggactgcccaggctatggggacaaaggccttcaccagcaagggccacagttggaacagtcccctgggtgtcagaaggtgggctagggcctcctgcagggttgtggggtggaacagggtctcctctccccagccagaaaccccaaagtctgggagctgcaccttccgagtgcaggccatgtgagccctgcctctttaaggagccgcaggacatgaaagatgaccttgtgacactcatgcacagcagccattgcacgtgcatcagctcccatcagcctcattccgtggcaggtgatgtgtccccattggttaggtgaggagggtgaggctcagagagctaaggacacttgtttggggccacacagccggggtagatctgagcccgtcctctctactcctgtgctgtagcaccttcactggcccatccctcccctctagtgctgtcctggtacccgtcccagcctgtccccattctcatggccctttggtcactgccgggtggaatagcactggcttcagcaggcgtgtcatgtaagcttgtgcaggttataaactgaaccatgacctttatggcgcatgcagggggcaacctgcataattatcaatggcgactttccgtgtccttctgatacagttgatcagacccctgcccaccgcccaggccaggcctgtggtcatcaatgccccagttcacatccacctgcttctcttccaggctttgctgttccccagcagcctgcagaggccccacagacagcttgaggcccctccttctgctgcctggccaagccccacacccgcagaccctccttcccatcctctgaaatgggaccctgtgtctgtcaccagcccaccctctgtgttcatgaacctgggctggagcttggggacccctccctgcccctggcttcctcttccatgttctgccctttcccacatgttggaggcttttccaacgtcttcagggacaggcggtaggaaccccggccctcgctctgcagctggtgcaaaagctgtggctgccaggtctgggccacatggcagcccagggggcaggagaagcccgggagaggcccactggctaccagactcagccctgagcagggaacagggcccagcttccaccggcagggagttgtgagcgccttcccaacaatgtgcccctcaccccttgatgcccatgctaatggtagccaccctggttcttgttgacttgagggacctggctgtcttccctgttcttcatcctttcttctcagtccctacctactgtttgtaaccacaagtgtctctgtgtgtgggtgggtgagggcccctctgcccagtggtgtgtctcctctccctccctccctcttctgccagtggcctgggggtgtccaggctcccatccgtggcccagcccctctcccctctgtcttgatccccccctccctgcccctggcttcctcttccatgttctgccctttcccacacctttgttcctcaatagctgggggctgggactgaggcctcctgcaggtacctgccccccttcacacagcacctctcaatctcctattgcttgtcagcctgtgtgcgtgtggtgcaggaaataaaggatctataccctcctg

SEQ ID NO: 141499 - DNA, 3931 bp, Homo sapiens
  Payload ID: 7825
  Gene Symbol: HAP1
  Gene Name: huntingtin-associated protein 1
  Uniprot ID: P54257
  ENST ID: ENST00000347901
  CDS Start-End: 11-1870
cagactcgagatgcgcccgaagaggttgggccggtgctgcgcggggagccggctcggacccggggacccagcagcactcacctgtgcaccttcgccctcagccagtcccgctccggagccctctgcgcagccgcaggcacggggcactggacagagagtaggatcccgagccacctctggatcccagttcctctcggaagcccgcaccggagctcgcccggcctcggaggctggagccaaggcaggagcccggcgcccgtccgcattctcggccatccaaggggatgtccggtctatgcccgacaattcggacgcgccgtggacccgcttcgtattccaagggccgtttggttcccgggccactggccgggggactggaaaggcagcgggcatctggaagacgccagccgcctacgttggccggcgacccggggtgtccggccctgagcgcgccgcctttattcgggagctggaggaagcactgtgtcctaacctacctccgccagtcaaaaagatcacccaggaagacgtcaaagtgatgttatatttgctggaggagcttctcccacctgtctgggagagcgttacctatgggatggtcctgcagagagagagggacctgaacactgcagctcgcatcggccagtccctggtgaaacagaacagtgttttgatggaggagaacagcaagctggaagccctgctgggctcagccaaggaggagattttatacctcagacaccaggtgaacttgcgggatgagctcctccagctctactcagattctgatgaggaggatgaggatgaagaagaggaggaggaagaaaaggaggcagaagaggaacaggaagaagaagaagcagaggaagacctgcagtgtgctcatccctgtgatgcccctaagctgatttcgcaggaggcattgctgcaccagcaccactgcccacagctggaagccttgcaggagaagctgaggctgctggaggaggagaatcatcagctgagagaagaggcctctcaactcgacactcttgaggatgaggaacagatgctcattctggagtgtgtggagcagttttcggaggccagccaacagatggctgagctgtcggaggtgctggtgctcaggctggaaaactatgaacggcagcagcaggaggtcgctcggctgcaggcccaggtgctgaagctgcagcagcgctgccggatgtatggggctgagactgaaaagttgcagaagcagctggcttcggagaaggaaatccagatgcagctccaggaagaggagactcttcctggtttccaggagacgctggctgaggagctcagaacgtctctaaggaggatgatctcagaccctgtgtattttatggagaggaattatgagatgcccagaggggacacatccagcctaaggtatgattttcgctacagtgaggatcgagagcaggtgcgggggtttgaggctgaggaagggttgatgctggcagcggatatcatgcggggggaagatttcacgcctgcggaggagttcgtgccccaggaggagctgggggctgccaagaaggtgccggctgaggaaggggtgatggaagaggcagagctggtgtcagaggagaccgagggctgggaggaggtggaactggagctggatgaggcaacgcggatgaacgtggtgacatcagccctggaggccagcggcttgggcccttcacacctggacatgaattatgtcctccagcagctggccaactggcaagatgcccattacaggcggcagctgaggtggaagatgctccagaaaggtgagtgcccccacggggccctccctgccgccagccggacaagctgcagatcgtcgtgccgatgaaaagagagggtggataagctccccgagtgctcacctgccccagcctggctctacctgctgtgcttatttgcatggactttgcatatcatttgcatagacacctctgatccccttcagtgggaaccgtagtgtcagtgctcatttatgtggcatttgcttaggattccagatctccatccacttttctcctgggggctgggctgggggttagggctgggactgtgcccccacactgcgcctcagcttcccatctctgcccgcttgcttcccctgcccccaacccctgcctcctctatcccccaggctctccaactctgcagcagtggcagcagcagtcaaaacaaacacggggggcggtgggtgggatggtggagcagcccgggggctgacccaggctggaggacagggccagccaccctcccacggcctgggaggaagagaggccttctgggactgcccaggctatggggacaaaggccttcaccagcaagggccacagttggaacagtcccctgggtgtcagaaggtgggctagggcctcctgcagggttgtggggtggaacagggtctcctctccccagccagaaaccccaaagtctgggagctgcaccttccgagtgcaggccatgtgagccctgcctctttaaggagccgcaggacatgaaagatgaccttgtgacactcatgcacagcagccattgcacgtgcatcagctcccatcagcctcattccgtggcaggtgatgtgtccccattggttaggtgaggagggtgaggctcagagagctaaggacacttgtttggggccacacagccggggtagatctgagcccgtcctctctactcctgtgctgtagcaccttcactggcccatccctcccctctagtgctgtcctggtacccgtcccagcctgtccccattctcatggccctttggtcactgccgggtggaatagcactggcttcagcaggcgtgtcatgtaagcttgtgcaggttataaactgaaccatgacctttatggcgcatgcagggggcaacctgcataattatcaatggcgactttccgtgtccttctgatacagttgatcagacccctgcccaccgcccaggccaggcctgtggtcatcaatgccccagttcacatccacctgcttctcttccaggctttgctgttccccagcagcctgcagaggccccacagacagcttgaggcccctccttctgctgcctggccaagccccacacccgcagaccctccttcccatcctctgaaatgggaccctgtgtctgtcaccagcccaccctctgtgttcatgaacctgggctggagcttggggacccctccctgcccctggcttcctcttccatgttctgccctttcccacatgttggaggcttttccaacgtcttcagggacaggcggtaggaaccccggccctcgctctgcagctggtgcaaaagctgtggctgccaggtctgggccacatggcagcccagggggcaggagaagcccgggagaggcccactggctaccagactcagccctgagcagggaacagggcccagcttccaccggcagggagttgtgagcgccttcccaacaatgtgcccctcaccccttgatgcccatgctaatggtagccaccctggttcttgttgacttgagggacctggctgtcttccctgttcttcatcctttcttctcagtccctacctactgtttgtaaccacaagtgtctctgtgtgtgggtgggtgagggcccctctgcccagtggtgtgtctcctctccctccctccctcttctgccagtggcctgggggtgtccaggctcccatccgtggcccagcccctctcccctctgtcttgatccccccctccctgcccctggcttcctcttccatgttctgccctttcccacacctttgttcctcaatagctgggggctgggactgaggcctcctgcaggtacctgccccccttcacacagcacctctcaatctcctattgcttgtcagcctgtgtgcgtgtggtgcaggaaataaaggatctataccctcctg

SEQ ID NO: 141500 - DNA, 3880 bp, Homo sapiens
  Payload ID: 7825
  Gene Symbol: HAP1
  Gene Name: huntingtin-associated protein 1
  Uniprot ID: P54257
  ENST ID: ENST00000341193
  CDS Start-End: 11-1819
cagactcgagatgcgcccgaagaggttgggccggtgctgcgcggggagccggctcggacccggggacccagcagcactcacctgtgcaccttcgccctcagccagtcccgctccggagccctctgcgcagccgcaggcacggggcactggacagagagtaggatcccgagccacctctggatcccagttcctctcggaagcccgcaccggagctcgcccggcctcggaggctggagccaaggcaggagcccggcgcccgtccgcattctcggccatccaaggggatgtccggtctatgcccgacaattcggacgcgccgtggacccgcttcgtattccaagggccgtttggttcccgggccactggccgggggactggaaaggcagcgggcatctggaagacgccagccgcctacgttggccggcgacccggggtgtccggccctgagcgcgccgcctttattcgggagctggaggaagcactgtgtcctaacctacctccgccagtcaaaaagatcacccaggaagacgtcaaagtgatgttatatttgctggaggaggtgtgtactgccttcctgatccagcttctcccacctgtctgggagagcgttacctatgggatggtcctgcagagagagagggacctgaacactgcagctcgcatcggccagtccctggtgaaacagaacagtgttttgatggaggagaacagcaagctggaagccctgctgggctcagccaaggaggagattttatacctcagacaccaggtgaacttgcgggatgagctcctccagctctactcagattctgatgaggaggatgaggatgaagaagaggaggaggaagaaaaggaggcagaagaggaacaggaagaagaagaagcagaggaagacctgcagtgtgctcatccctgtgatgcccctaagctgatttcgcaggaggcattgctgcaccagcaccactgcccacagctggaagccttgcaggagaagctgaggctgctggaggaggagaatcatcagctgagagaagaggcctctcaactcgacactcttgaggatgaggaacagatgctcattctggagtgtgtggagcagttttcggaggccagccaacagatggctgagctgtcggaggtgctggtgctcaggctggaaaactatgaacggcagcagcaggaggtcgctcggctgcaggcccaggtgctgaagctgcagcagcgctgccggatggagactcttcctggtttccaggagacgctggctgaggagctcagaacgtctctaaggaggatgatctcagaccctgtgtattttatggagaggaattatgagatgcccagaggggacacatccagcctaaggtatgattttcgctacagtgaggatcgagagcaggtgcgggggtttgaggctgaggaagggttgatgctggcagcggatatcatgcggggggaagatttcacgcctgcggaggagttcgtgccccaggaggagctgggggctgccaagaaggtgccggctgaggaaggggtgatggaagaggcagagctggtgtcagaggagaccgagggctgggaggaggtggaactggagctggatgaggcaacgcggatgaacgtggtgacatcagccctggaggccagcggcttgggcccttcacacctggacatgaattatgtcctccagcagctggccaactggcaagatgcccattacaggcggcagctgaggtggaagatgctccagaaaggtgagtgcccccacggggccctccctgccgccagccggacaagctgcagatcgtcgtgccgatgaaaagagagggtggataagctccccgagtgctcacctgccccagcctggctctacctgctgtgcttatttgcatggactttgcatatcatttgcatagacacctctgatccccttcagtgggaaccgtagtgtcagtgctcatttatgtggcatttgcttaggattccagatctccatccacttttctcctgggggctgggctgggggttagggctgggactgtgcccccacactgcgcctcagcttcccatctctgcccgcttgcttcccctgcccccaacccctgcctcctctatcccccaggctctccaactctgcagcagtggcagcagcagtcaaaacaaacacggggggcggtgggtgggatggtggagcagcccgggggctgacccaggctggaggacagggccagccaccctcccacggcctgggaggaagagaggccttctgggactgcccaggctatggggacaaaggccttcaccagcaagggccacagttggaacagtcccctgggtgtcagaaggtgggctagggcctcctgcagggttgtggggtggaacagggtctcctctccccagccagaaaccccaaagtctgggagctgcaccttccgagtgcaggccatgtgagccctgcctctttaaggagccgcaggacatgaaagatgaccttgtgacactcatgcacagcagccattgcacgtgcatcagctcccatcagcctcattccgtggcaggtgatgtgtccccattggttaggtgaggagggtgaggctcagagagctaaggacacttgtttggggccacacagccggggtagatctgagcccgtcctctctactcctgtgctgtagcaccttcactggcccatccctcccctctagtgctgtcctggtacccgtcccagcctgtccccattctcatggccctttggtcactgccgggtggaatagcactggcttcagcaggcgtgtcatgtaagcttgtgcaggttataaactgaaccatgacctttatggcgcatgcagggggcaacctgcataattatcaatggcgactttccgtgtccttctgatacagttgatcagacccctgcccaccgcccaggccaggcctgtggtcatcaatgccccagttcacatccacctgcttctcttccaggctttgctgttccccagcagcctgcagaggccccacagacagcttgaggcccctccttctgctgcctggccaagccccacacccgcagaccctccttcccatcctctgaaatgggaccctgtgtctgtcaccagcccaccctctgtgttcatgaacctgggctggagcttggggacccctccctgcccctggcttcctcttccatgttctgccctttcccacatgttggaggcttttccaacgtcttcagggacaggcggtaggaaccccggccctcgctctgcagctggtgcaaaagctgtggctgccaggtctgggccacatggcagcccagggggcaggagaagcccgggagaggcccactggctaccagactcagccctgagcagggaacagggcccagcttccaccggcagggagttgtgagcgccttcccaacaatgtgcccctcaccccttgatgcccatgctaatggtagccaccctggttcttgttgacttgagggacctggctgtcttccctgttcttcatcctttcttctcagtccctacctactgtttgtaaccacaagtgtctctgtgtgtgggtgggtgagggcccctctgcccagtggtgtgtctcctctccctccctccctcttctgccagtggcctgggggtgtccaggctcccatccgtggcccagcccctctcccctctgtcttgatccccccctccctgcccctggcttcctcttccatgttctgccctttcccacacctttgttcctcaatagctgggggctgggactgaggcctcctgcaggtacctgccccccttcacacagcacctctcaatctcctattgcttgtcagcctgtgtgcgtgtggtgcaggaaataaaggatctataccctcctg

SEQ ID NO: 141501 - DNA, 5683 bp, Homo sapiens
  Payload ID: 7825
  Gene Symbol: HAP1
  Gene Name: huntingtin-associated protein 1
  Uniprot ID: P54257
  ENST ID: ENST00000393939
  CDS Start-End: 11-1795
cagactcgagatgcgcccgaagaggttgggccggtgctgcgcggggagccggctcggacccggggacccagcagcactcacctgtgcaccttcgccctcagccagtcccgctccggagccctctgcgcagccgcaggcacggggcactggacagagagtaggatcccgagccacctctggatcccagttcctctcggaagcccgcaccggagctcgcccggcctcggaggctggagccaaggcaggagcccggcgcccgtccgcattctcggccatccaaggggatgtccggtctatgcccgacaattcggacgcgccgtggacccgcttcgtattccaagggccgtttggttcccgggccactggccgggggactggaaaggcagcgggcatctggaagacgccagccgcctacgttggccggcgacccggggtgtccggccctgagcgcgccgcctttattcgggagctggaggaagcactgtgtcctaacctacctccgccagtcaaaaagatcacccaggaagacgtcaaagtgatgttatatttgctggaggagcttctcccacctgtctgggagagcgttacctatgggatggtcctgcagagagagagggacctgaacactgcagctcgcatcggccagtccctggtgaaacagaacagtgttttgatggaggagaacagcaagctggaagccctgctgggctcagccaaggaggagattttatacctcagacaccaggtgaacttgcgggatgagctcctccagctctactcagattctgatgaggaggatgaggatgaagaagaggaggaggaagaaaaggaggcagaagaggaacaggaagaagaagaagcagaggaagacctgcagtgtgctcatccctgtgatgcccctaagctgatttcgcaggaggcattgctgcaccagcaccactgcccacagctggaagccttgcaggagaagctgaggctgctggaggaggagaatcatcagctgagagaagaggcctctcaactcgacactcttgaggatgaggaacagatgctcattctggagtgtgtggagcagttttcggaggccagccaacagatggctgagctgtcggaggtgctggtgctcaggctggaaaactatgaacggcagcagcaggaggtcgctcggctgcaggcccaggtgctgaagctgcagcagcgctgccggatggagactcttcctggtttccaggagacgctggctgaggagctcagaacgtctctaaggaggatgatctcagaccctgtgtattttatggagaggaattatgagatgcccagaggggacacatccagcctaaggtatgattttcgctacagtgaggatcgagagcaggtgcgggggtttgaggctgaggaagggttgatgctggcagcggatatcatgcggggggaagatttcacgcctgcggaggagttcgtgccccaggaggagctgggggctgccaagaaggtgccggctgaggaaggggtgatggaagaggcagagctggtgtcagaggagaccgagggctgggaggaggtggaactggagctggatgaggcaacgcggatgaacgtggtgacatcagccctggaggccagcggcttgggcccttcacacctggacatgaattatgtcctccagcagctggccaactggcaagatgcccattacaggcggcagctgaggtggaagatgctccagaaaggtgagtgcccccacggggccctccctgccgccagccggacaagctgcagatcgtcgtgccgatgaaaagagagggtggataagctccccgagtgctcacctgccccagcctggctctacctgctgtgcttatttgcatggactttgcatatcatttgcatagacacctctgatccccttcagtgggaaccgtagtgtcagtgctcatttatgtggcatttgcttaggattccagatctccatccacttttctcctgggggctgggctgggggttagggctgggactgtgcccccacactgcgcctcagcttcccatctctgcccgcttgcttcccctgcccccaacccctgcctcctctatcccccaggctctccaactctgcagcagtggcagcagcagtcaaaacaaacacggggggcggtgggtgggatggtggagcagcccgggggctgacccaggctggaggacagggccagccaccctcccacggcctgggaggaagagaggccttctgggactgcccaggctatggggacaaaggccttcaccagcaagggccacagttggaacagtcccctgggtgtcagaaggtgggctagggcctcctgcagggttgtggggtggaacagggtctcctctccccagccagaaaccccaaagtctgggagctgcaccttccgagtgcaggccatgtgagccctgcctctttaaggagccgcaggacatgaaagatgaccttgtgacactcatgcacagcagccattgcacgtgcatcagctcccatcagcctcattccgtggcaggtgatgtgtccccattggttaggtgaggagggtgaggctcagagagctaaggacacttgtttggggccacacagccggggtagatctgagcccgtcctctctactcctgtgctgtagcaccttcactggcccatccctcccctctagtgctgtcctggtacccgtcccagcctgtccccattctcatggccctttggtcactgccgggtggaatagcactggcttcagcaggcgtgtcatgtaagcttgtgcaggttataaactgaaccatgacctttatggcgcatgcagggggcaacctgcataattatcaatggcgactttccgtgtccttctgatacagttgatcagacccctgcccaccgcccaggccaggcctgtggtcatcaatgccccagttcacatccacctgcttctcttccaggctttgctgttccccagcagcctgcagaggccccacagacagcttgaggcccctccttctgctgcctggccaagccccacacccgcagaccctccttcccatcctctgaaatgggaccctgtgtctgtcaccagcccaccctctgtgttcatgaacctgggctggagcttggggacccctccctgcccctggcttcctcttccatgttctgccctttcccacatgttggaggcttttccaacgtcttcagggacaggcggtaggaaccccggccctcgctctgcagctggtgcaaaagctgtggctgccaggtctgggccacatggcagcccagggggcaggagaagcccgggagaggcccactggctaccagactcagccctgagcagggaacagggcccagcttccaccggcagggagttgtgagcgccttcccaacaatgtgcccctcaccccttgatgcccatgctaatggtagccaccctggttcttgttgacttgagggacctggctgtcttccctgttcttcatcctttcttctcagtccctacctactgtttgtaaccacaagtgtctctgtgtgtgggtgggtgagggcccctctgcccagtggtgtgtctcctctccctccctccctcttctgccagtggcctgggggtgtccaggctcccatccgtggcccagcccctctcccctctgtcttgatccccccctccctgcccctggcttcctcttccatgttctgccctttcccacacctttgttcctcaatagctgggggctgggactgaggcctcctgcaggtacctgccccccttcacacagcacctctcaatctcctattgcttgtcagcctgtgtgcgtgtggtgcaggaaataaaggatctataccctcctggcccagcctccagctgtctctctagggagtgtgtgtgtgcacttggcagggcgaagttgtagagaaagggtggatgctaatattgaagtatgtgccgaggactcctattaaatacgccgtttaatcatagcagcagctcctagagggcggtgggtgatgtcataagtgtctgttggatggagaaactcaggccagagtaggttaagtgatgccctcaccagcagatcatggctagtgtggagctgggatttgagctcatgcttccctgatcctttcaccccagagactgactcagtggcctggctgtgaaagataggatgggagagagtcacccactgtcttagggtgaagtccccagagcagacctggaacagggtttaggaacaagtatagtcgccctccgtatcctcaggctctgcatccgtggagtcaactaaccacagatagaaaatatttgggggaggctgggtgcagtggctcatgcctgtaatcctagcactttgggaggccgaggtgggtggatcatttgaggtcaggagttcgagaccagcctggccaacatggtgaaaccccgtctccactaaaaatacaaaaattagctgggcgtggtggtgggtgcctgtaatcccagctacttgggaggctgaggcaggaggatcacttgaacccaggaggcagaggttgcagtgagcggagatcatgccactgcactccagtctgggcaacaacagcgagactccatttgaaaacacaagaaaatatctgggggaggccaggcgcggtggctcatgcctgtaatcccagcactttgggaggctgaggtgggtggatcacttgaggtcaggagttcgagaccagcctggtcaacatggtgaaaccccgtctctactaaaaatacaaaaaaaattagctgggcatggtggcagcccctgtaatcccagctacttgggaggctgaggtgagaggatcacttgagcttggaaggttgaggttgcagtgagctgaggttgcaccactgtactccaacctgggtgacagagtaagaccctgtctcaaaaaaagagaaaagaaaatgacagacaaaccagacatgggggaaattgccagctttgataaagctttgaaggaaacggagatgcaggagaacaccttgtggaccagagaccactgagcaggagaagcagtgaaatttcctaaaatctggaggattccctgcccctgttatcttcaagtccccagtggtgatgtggaagaaaagcaacctgcaaggtggatgcaagccacaagctgctctgtgaacctgggcacctcacacagatgccactggcctgtgggtctctgaggggacccgcaaatgggactgccaaattctctggtttgctccaggatattatagaaaattatttatatgaatagtaaaaataaaacacactttgtggcccccctgccaaaagaatatcattgagaagattattgctgtggctaaccgggtctcagtcctgctgggaactctgggggacagtagaatatatctcagagtagcctgggtgaggtggctcacacctgtaatcccagcacattgggagggcgaggcaggtggatcacctgaggtcaggagttcgagaccagcctgaccaatggagaaaccccgtctccactaaagatacaaaattaactgggcatggtggcacacatgcctgtaatcccagctactcgggaggctgagacaggagaatcgcttgaatccaggaggtggaggttgcggtgagctgagattgcaccattacaccccagcctgggcaataagagtgaaactccgtctcaagg

SEQ ID NO: 141502 - DNA, 487 bp, Homo sapiens
  Payload ID: 7825
  Gene Symbol: HAP1
  Gene Name: huntingtin-associated protein 1
  ENST ID: ENST00000442364
  CDS Start-End: 1-222
tacagtgaggatcgagagcaggtgcgggggtttgaggctgaggaagggttgatgctggcagcggatatcatgcggggggaagatttcacgcctgcggaggagttcgtgccccaggaggagctgggggctgccaagaagcagctggccaactggcaagatgcccattacaggcggcagctgaggtggaagatgctccagaaagagccccagccgaggacctaagatgggtagagaaaacactttccctcctctacagccctcaggtggcgggtagctcaaggtaatggtgtcaacaggcacaagaacaatgatggaatggagtgagacaccagcaatgcctgcaccagccactcatgagcaattatttacaaatatttattgggttcctcctattcttgccaccggggatacagaagggaggagggacttgtcacgctcccagtttcctgttttgcccgagaggcagacaataaactggcaaacaaaa

SEQ ID NO: 141503 - DNA, 324 bp, Homo sapiens
  Payload ID: 7825
  Gene Symbol: HAP1
  Gene Name: huntingtin-associated protein 1
  ENST ID: ENST00000455021
  CDS Start-End: 1-121
gaattatgagatgcccagaggggacacatccagcctaagagccccagccgaggacctaagatgggtagagaaaacactttccctcctctacagccctcaggtggcgggtagctcaaggtaatggtgtcaacaggcacaagaacaatgatggaatggagtgagacaccagcaatgcctgcaccagccactcatgagcaattatttacaaatatttattgggttcctcctattcttgccaccggggatacagaagggaggagggacttgtcacgctcccagtttcctgttttgcccgagaggcagacaataaactggcaaacaaaa

SEQ ID NO: 141504 - DNA, 601 bp, Homo sapiens
  Payload ID: 7825
  Gene Symbol: HAP1
  Gene Name: huntingtin-associated protein 1
  ENST ID: ENST00000458656
  CDS Start-End: 1-336
gcggatatcatgcggggggaagatttcacgcctgcggaggagttcgtgccccaggaggagctgggggctgccaagaaggtgccggctgaggaaggggtgatggaagaggcagagctggtgtcagaggagaccgagggctgggaggaggtggaactggagctggatgaggcaacgcggatgaacgtggtgacatcagccctggaggccagcggcttgggcccttcacacctggacatgaattatgtcctccagcagctggccaactggcaagatgcccattacaggcggcagctgaggtggaagatgctccagaaagagccccagccgaggacctaagatgggtagagaaaacactttccctcctctacagccctcaggtggcgggtagctcaaggtaatggtgtcaacaggcacaagaacaatgatggaatggagtgagacaccagcaatgcctgcaccagccactcatgagcaattatttacaaatatttattgggttcctcctattcttgccaccggggatacagaagggaggagggacttgtcacgctcccagtttcctgttttgcccgagaggcagacaataaactggcaaacaaaa

SEQ ID NO: 141505 - DNA, 2935 bp, Homo sapiens
  Payload ID: 7826
  Gene Symbol: HUS1
  Gene Name: HUS1 checkpoint clamp component
  Uniprot ID: O60921
  ENST ID: ENST00000258774
  CDS Start-End: 25-867
gccgcggctgcgccatccgcggccatgaagtttcgggccaagatcgtggacggggcctgtctgaaccacttcacacgaatcagtaacatgatagccaagcttgccaaaacctgcaccctccgcatcagccctgataagcttaacttcatcctttgtgacaagctggctaatggaggagtgagcatgtggtgtgagctggaacaggagaacttcttcaacgaatttcaaatggagggtgtctctgcagaaaacaatgagatttatttagagctaacatcggaaaacttatctcgagccttgaagactgcccagaatgccagggctttgaaaatcaaactgactaataaacactttccctgcctcacggtctccgtggagctgttatctatgtcaagcagtagccgcattgtgacccatgacatccccataaaggtgattcctaggaaattgtggaaggacttacaagaaccggtggtcccagatcctgatgttagtatttatttaccagtcttgaagactatgaagagtgttgtggaaaaaatgaaaaacatcagcaatcaccttgttattgaagcaaacctagatggagaattgaatttgaaaatagaaactgaattagtatgtgttacaactcattttaaagatcttggaaatcctccattagcctctgaaagcacccatgaggacagaaacgtggaacacatggctgaagtgcacatagatattaggaagctcctacagtttcttgctggacaacaagtaaatcccacaaaggccttatgcaatattgtgaataacaagatggtgcattttgatctgcttcatgaagacgtgtcccttcagtatttcatccctgcgctgtcctagcaccctgtcgctggagttggcatgcagagactttgtcaggatgggagaggccgcaggtgttgtgttctgatcactggtctgtgccctcacagcaccgcacatcgacacactgtacttatttgtccctctctaacattttaactaaaagttgattcaacaacacacagttggataaacatatcacttcatgttgctcatgtctgttttgctttgtttttaagacactgaaaagaaaagctagaatttatttattcagactttaaagaacaatttctcattgatgttgtgaaaatcgtcatgtatttagacttggtgtagtagccagaattcgtaaagctgttgcctgggagcttggtactttccctccaggcagaggctctagctcagcacggcctgtagcgcacagtcagtcttgcatttcagtgtgttcaccccgctgctcctgccccttggagcccagtgacagaaagaacagcctctgtcaccccgccgccactgccttggttactcagagcactgtggggtgtcacagctgcagcatttggagtctctctcttgctgaggactcaagcccacctgagtccactcccctcttgatgcctagagagctggcccagccaacacagctcttagctgggagctccttctgccattccaactagtttcttcctggggccagttttgggtttaggttgtaattccttatatttctttcttccacagtgtatcggatctgtcgttctggaaagaagacccttctatttagagtagaaacaaacgaaacttctaaggtatcatctgtgttaagtgatgagaccatatttctttgatgtttctgaacatcaaagctgattcagtactggtagatgtgctcattctccctgaaacatacccatcatatttcctattataattacatctcattgtcctgtggaggtggacatgataaacattatcttttgttttcttgttttgttttgtttgagacggtctcattctgtcacccagactggagtgcagtgccacaatcatggctcaccgcattgacctccttggctcaaggcatcctcccacctcagcttcctgactagctgggactactggtgtgcaccaccacacccagctaattttcaatttttcatagagacagggtctcactgtgttgtccaggctggtcttgaactcctgggctcaagccacccgcccacctgggcctcccaaagtgctgggattacaggcatcagccatcacacccatccataaacattatattaatgtcacattacaaaactgagacctaagttgcttaggataaaatgaaattggaagactagctaacatgaaaatttatattttggctttttcatgttttttgataaaaccagtgtatttgaatgattcttttgatgtttagtaatggttttttgtttgttttttggtttttttttttgagacggagtctcactctgtcgccagtctggagtgctagtggcgcgatcttggcttactgcagcctccacttcccaagttcaagcgattctcctgcctcagcctcccgagtagctgggactacaggcgcatgccaccacgcccggctaatttttgtatttttagtagagacggagtttcactgtgttggccaggatggtctcgatctcgacctcgtgatcacccaccttggcctctcaaagtgctgggattacaggcgtgagccaccacgcctggcctatgtttaataatgttgaaataggatggaatattttgttaaattaacattttaaaattagaagacaccgttttaatttttaaacccttcctcctctcattgtaacgaaattaattccagctgcagtgagaaaacttaaaaatcatgatacaaaatgaaacaatatctgaaagtagttttataaaactgaaattgctgttaaagagaatgtgttagtgacttaaccatttgctctatgtgatgtttattatcaaatacatataattttgaagattttaatgaatggcttaagattttatctttgtgtagaatgtggctaaagaaaccttagttgagattcaa

SEQ ID NO: 141506 - DNA, 579 bp, Homo sapiens
  Payload ID: 7826
  Gene Symbol: HUS1
  Gene Name: HUS1 checkpoint clamp component
  ENST ID: ENST00000446009
  CDS Start-End: 145-579
acagaggcccgccgcggctgcgccatccgcggccatgaagtttcgggccaagatcgtggacggggcctgtctgaaccacttcacacgtgagcagggaggccggagaggagcgagggaggaacggaaggaagcagaatcagtaacatgatagccaagcttgccaaaacctgcaccctccgcatcagccctgataagcttaacttcatcctttgtgacaagctggctaatggaggagtgagcatgtggtgtgagctggaacaggagaacttcttcaacgaatttcaaatggagggtgtctctgcagaaaacaatgagatttatttagagctaacatcggaaaacttatctcgagccttgaagactgcccagaatgccagggctttgaaaatcaaactgactaataaacactttccctgcctcacggtctccgtggagctgttatctatgtcaagcagtagccgcattgtgacccatgacatccccataaaggtgattcctaggaaattgtggaaggacttacaagaaccggtggtcccagatcctgatgttagtatttatttaccagtcttgaagactatg

SEQ ID NO: 141507 - DNA, 1304 bp, Homo sapiens
  Payload ID: 7826
  Gene Symbol: HUS1
  Gene Name: HUS1 checkpoint clamp component
  Uniprot ID: O60921
  ENST ID: ENST00000458191
  CDS Start-End: 156-935
acagaggcccgccgcggctgcgccatccgcggccatgaagtttcgggccaagatcgtggacggggcctgtctgaaccacttcacacgtgagcagggaggccggagaggagcgagggaggaacggaaggaagcagtgagcgcgcggaatcagtaacatgatagccaagcttgccaaaacctgcaccctccgcatcagccctgataagcttaacttcatcctttgtgacaagctggctaatggaggagtgagcatgtggtgtgagctggaacaggagaacttcttcaacgaatttcaaatggagggtgtctctgcagaaaacaatgagatttatttagagctaacatcggaaaacttatctcgagccttgaagactgcccagaatgccagggctttgaaaatcaaactgactaataaacactttccctgcctcacggtctccgtggagctgttatctatgtcaagcagtagccgcattgtgacccatgacatccccataaaggtgattcctaggaaattgtggaaggacttacaagaaccggtggtcccagatcctgatgttagtatttatttaccagtcttgaagactatgaagagtgttgtggaaaaaatgaaaaacatcagcaatcaccttgttattgaagcaaacctagatggagaattgaatttgaaaatagaaactgaattagtatgtgttacaactcattttaaagatcttggaaatcctccattagcctctgaaagcacccatgaggacagaaacgtggaacacatggctgaagtgcacatagatattaggaagctcctacagtttcttgctggacaacaagtaaatcccacaaaggccttatgcaatattgtgaataacaagatggtgcattttgatctgcttcatgaagacgtgtcccttcagtatttcatccctgcgctgtcctagcaccctgtcgctggagttggcatgcagagactttgtcaggatgggagaggccgcagtgtatcggatctgtcgttctggaaagaagacccttctatttagagtagaaacaaacgaaacttctaaggtatcatctgtgttaagtgatgagaccatatttctttgatgtttctgaacatcaaagctgattcagtactggtagatgtgctcattctccctgaaacatacccatcatatttcctattataattacatctcattgtcctgtggaggtggacatgataaacattatcttttgttttcttgttttgttttgtttgagacggtctcattctgtcacccagactggagtgcagtgccacaatcatggct

SEQ ID NO: 141508 - DNA, 2121 bp, Homo sapiens
  Payload ID: 7826
  Gene Symbol: HUS1
  Gene Name: HUS1 checkpoint clamp component
  Uniprot ID: O60921
  ENST ID: ENST00000436444
  CDS Start-End: 63-905
ctcagggcgcgacgcttttctgttacccacagaggcccgccgcggctgcgccatccgcggccatgaagtttcgggccaagatcgtggacggggcctgtctgaaccacttcacacgaatcagtaacatgatagccaagcttgccaaaacctgcaccctccgcatcagccctgataagcttaacttcatcctttgtgacaagctggctaatggaggagtgagcatgtggtgtgagctggaacaggagaacttcttcaacgaatttcaaatggagggtgtctctgcagaaaacaatgagatttatttagagctaacatcggaaaacttatctcgagccttgaagactgcccagaatgccagggctttgaaaatcaaactgactaataaacactttccctgcctcacggtctccgtggagctgttatctatgtcaagcagtagccgcattgtgacccatgacatccccataaaggtgattcctaggaaattgtggaaggacttacaagaaccggtggtcccagatcctgatgttagtatttatttaccagtcttgaagactatgaagagtgttgtggaaaaaatgaaaaacatcagcaatcaccttgttattgaagcaaacctagatggagaattgaatttgaaaatagaaactgaattagtatgtgttacaactcattttaaagatcttggaaatcctccattagcctctgaaagcacccatgaggacagaaacgtggaacacatggctgaagtgcacatagatattaggaagctcctacagtttcttgctggacaacaagtaaatcccacaaaggccttatgcaatattgtgaataacaagatggtgcattttgatctgcttcatgaagacgtgtcccttcagtatttcatccctgcgctgtcctagcaccctgtcgctggagttggcatgcagagactttgtcaggatgggagaggccgcaggtgttgtgttctgatcactggtctgtgccctcacagcaccgcacatcgacacactgtacttatttgtccctctctaacattttaactaaaagttgattcaacaacacacagttggataaacatatcacttcatgttgctcatgtctgttttgctttgtttttaagacactgaaaagaaaagctagaatttatttattcagactttaaagaacaatttctcattgatgttgtgaaaatcgtcatgtatttagacttggtgtagtagccagaattcgtaaagctgttgcctgggagcttggtactttccctccaggcagaggctctagctcagcacggcctgtagcgcacagtcagtcttgcatttcagtgtgttcaccccgctgctcctgccccttggagcccagtgacagaaagaacagcctctgtcaccccgccgccactgccttggttactcagagcactgtggggtgtcacagctgcagcatttggagtctctctcttgctgaggactcaagcccacctgagtccactcccctcttgatgcctagagagctggcccagccaacacagctcttagctgggagctccttctgccattccaactagtttcttcctggggccagttttgggtttaggttgtaattccttatatttctttcttccacagtgtatcggatctgtcgttctggaaagaagacccttctatttagagtagaaacaaacgaaacttctaaggtatcatctgtgttaagtgatgagaccatatttctttgatgtttctgaacatcaaagctgattcagtactggtagatgtgctcattctccctgaaacatacccatcatatttcctattataattacatctcattgtcctgtggaggtggacatgataaacattatcttttgttttcttgttttgttttgtttgagacggtctcattctgtcacccagactggagtgcagtgccacaatcatggctcaccgcattgacctccttggctcaaggcatcctcccacctcagcttcctgactagctgggactactggtgtgcaccaccacacccagctaattttcaatttttcatagagacagggtctcactgtgttgtccaggagttggagaccagcctggccaacatggtgaaaccacgtctctact

SEQ ID NO: 141509 - DNA, 1058 bp, Homo sapiens
  Payload ID: 7826
  Gene Symbol: HUS1
  Gene Name: HUS1 checkpoint clamp component
  ENST ID: ENST00000442024
  CDS Start-End: 1-316
tttagagctaacatcggaaaacttatctcgagccttgaagactgcccagaatgccagggctttgaaaatcaaactgactaataaacactttccctgcctcacggtctccgtggagctgttatctatgtcaagcagtagccgcattgtgacccatgacatccccataaaggtgattcctaggaaattgtggaaggacttacaagaaccggtggtcccagatcctgatgttagtatttatttaccagtcttgaagactatgaagagtgttgtggaaaaaatgaaaaacatcagcaatcaccttgttccatccaattaaaagaactgattggttgttggggtgggtagaggagcttcaaaggaaaggagtcccttgtgacctgtggagacagtccccgggcagcaagagcaggagtagaagaggggtgcccgatggtatatgaggggatggcagaagtctggtagcctgggcgtgtggagtttggctcagccatcctcagtcctggtaacccaacagcagccccagacccttctggatttggacatttcattttccaacatgttattgaagcaaacctagatggagaattgaatttgaaaatagaaactgaattagtatgtgttacaactcattttaaagatcttggaaatcctccattaggtaagttttctagtgggttatattttgctttggataagttaattgtttcagataacctacctgttgaggtctcttcatgtaaaaaggttgaaattcagttgactttgtttcatgcttgggtgaagaacaaaggaattgagactggactatgtatccctgtggtgtagtggggcagttagccaccagggggagaagctgtgccaccaagtagctgacagatctgtgcagggtctccatcctctgtagaattcggatcaagttacataacctccaagatcccttccagctattcaattcctgtcctactcctaaagatttctatttctcacctggcatggattcagaaaggtagatacatttgttcttatattctcctccttcagttacttccatatgtatg

SEQ ID NO: 141510 - DNA, 627 bp, Homo sapiens
  Payload ID: 7826
  Gene Symbol: HUS1
  Gene Name: HUS1 checkpoint clamp component
  ENST ID: ENST00000432627
  CDS Start-End: 77-627
aagatcgtggacggggcctgtctgaaccacttcacactaattccttattttaacccctgctttaggaatcagtaacatgatagccaagcttgccaaaacctgcaccctccgcatcagccctgataagcttaacttcatcctttgtgacaagctggctaatggaggagtgagcatgtggtgtgagctggaacaggagaacttcttcaacgaatttcaaatggagggtgtctctgcagaaaacaatgagatttatttagagctaacatcggaaaacttatctcgagccttgaagactgcccagaatgccagggctttgaaaatcaaactgactaataaacactttccctgcctcacggtctccgtggagctgttatctatgtcaagcagtagccgcattgtgacccatgacatccccataaaggtgattcctaggaaattgtggaaggacttacaagaaccggtggtcccagatcctgatgttagtatttatttaccagtcttgaagactatgaagagtgttgtggaaaaaatgaaaaacatcagcaatcaccttgttattgaagcaaacctagatggagaattgaatttgaaaatagaaactgaattagtatgtgttacaactcattt

SEQ ID NO: 141511 - DNA, 774 bp, Homo sapiens
  Payload ID: 7826
  Gene Symbol: HUS1
  Gene Name: HUS1 checkpoint clamp component
  ENST ID: ENST00000433977
  CDS Start-End: 91-573
agaaattctgcaaaataagttggtctctaggatacataatgtgcattttagtaattccttattttaacccctgctttaggaatcagtaacatgatagccaagcttgccaaaacctgcaccctccgcatcagccctgataagcttaacttcatcctttgtgacaagctggctaatggaggagtgagcatgtggtgtgagctggaacaggagaacttcttcaacgaatttcaaatggagggtgtctctgcagaaaacaatgagatttatttagagctaacatcggaaaacttatctcgagccttgaagactgcccagaatgccagggctttgaaaatcaaactgactaataaacactttccctgcctcacggtctccgtggagctgttatctatgtcaagcagtagccgcattgtgacccatgacatccccataaaggtgattcctaggaaattgtggaaggacttacaagaaccggtggtcccagatcctgatgacttgatcttttcctcagccggtcaggagcgatatctggatgtgcacgaaagccaagaagagaagaatttcatggcttagggctaacatggggtaacggtcatgccgatggttaaccctagagctcctgaaagtaaagatgatgccaaagggcccatttcctcttgctcacaatttgtttaagaagaaagtacagaaatatgctgggttagtatttatttaccagtcttgaagactatgaagagtgttgtggaaaaaatgaaaaacatcagcaatcacctt

SEQ ID NO: 141512 - DNA, 1125 bp, Homo sapiens
  Payload ID: 7826
  Gene Symbol: HUS1
  Gene Name: HUS1 checkpoint clamp component
  Uniprot ID: O60921
  ENST ID: ENST00000432325
  CDS Start-End: 156-935
acagaggcccgccgcggctgcgccatccgcggccatgaagtttcgggccaagatcgtggacggggcctgtctgaaccacttcacacgtgagcagggaggccggagaggagcgagggaggaacggaaggaagcagtgagcgcgcggaatcagtaacatgatagccaagcttgccaaaacctgcaccctccgcatcagccctgataagcttaacttcatcctttgtgacaagctggctaatggaggagtgagcatgtggtgtgagctggaacaggagaacttcttcaacgaatttcaaatggagggtgtctctgcagaaaacaatgagatttatttagagctaacatcggaaaacttatctcgagccttgaagactgcccagaatgccagggctttgaaaatcaaactgactaataaacactttccctgcctcacggtctccgtggagctgttatctatgtcaagcagtagccgcattgtgacccatgacatccccataaaggtgattcctaggaaattgtggaaggacttacaagaaccggtggtcccagatcctgatgttagtatttatttaccagtcttgaagactatgaagagtgttgtggaaaaaatgaaaaacatcagcaatcaccttgttattgaagcaaacctagatggagaattgaatttgaaaatagaaactgaattagtatgtgttacaactcattttaaagatcttggaaatcctccattagcctctgaaagcacccatgaggacagaaacgtggaacacatggctgaagtgcacatagatattaggaagctcctacagtttcttgctggacaacaagtaaatcccacaaaggccttatgcaatattgtgaataacaagatggtgcattttgatctgcttcatgaagacgtgtcccttcagtatttcatccctgcgctgtcctagcaccctgtcgctggagttggcatgcagagactttgtcaggatgggagaggccgcaggtgttgtgttctgatcactggtctgtgccctcacagcaccgcacatcgacacactgtacttatttgtccctctctaacattttaactaaaagttgattcaacaacacacagttggataaacatatcacttcatg

SEQ ID NO: 141513 - DNA, 1025 bp, Homo sapiens
  Payload ID: 7827
  Gene Symbol: HUS1B
  Gene Name: HUS1 checkpoint clamp component B
  Uniprot ID: Q8NHY5
  ENST ID: ENST00000380907
  CDS Start-End: 20-856
ctgccttccctgtggcatcatgaagtttcgcgccaagatcaccggcaaaggctgtctagagctgttcattcacgtcagcggcaccgtcgcgaggctagcgaaggtctgcgtgctccgcgtgcgccctgacagcctgtgcttcggccccgcgggttccggcggcctccacgaggccaggctgtggtgcgaggtgcggcagggggccttccagcagtttcgcatggaaggtgtctcggaagatctcgatgagatccacctggagctgacggcggagcacctgtcccgggcggcgagaagcgcagcgggcgcgtcctccctgaagctgcagctgacccacaagcgccgcccctccctcacggtggcggtggagctggtctcgtccctgggccgcgctcgcagcgtggtgcacgatctgcccgtgcgggtgcttcccaggagagtgtggcgggactgcctgccgcccagcctgcgcgcctccgacgcgagcatccgcctgccgcgctggaggacgctgaggagcatcgtggagaggatggcgaacgtgggcagtcacgtgctggtggaagcaaacctcagtggcaggatgaccctgagtatagagacggaggtggtgtccattcaaagttattttaaaaatcttggaaaccctccccagtcggctgtgggtgtgcctgaaaacagagacctggagagcatggtgcaagtgcgggtggacaatcggaagcttctgcagtttttggagggacagcaaatacatcctacgacggccctgtgcaatatttgggacaatactcttcttcagcttgttttggttcaagaagatgtctctcttcagtatttcattcctgccttgtaaaaattcagccagcttagattttttttttaaggttttgatcttttcaaaactaaaacagaccctgagttaattgggttgaaaatttggaccttcactgacttatgcagggcgtatattttgttgagcccttcctcctttgcaaaatttatattaaagcattggtaaaaca

SEQ ID NO: 141514 - DNA, 5607 bp, Homo sapiens
  Payload ID: 7828
  Gene Symbol: HAPLN1
  Gene Name: hyaluronan and proteoglycan link protein 1
  Uniprot ID: P10915
  ENST ID: ENST00000274341
  CDS Start-End: 852-1916
atccaaggatacaatagcagttgtttgttaagagaaatttaaactcaacaccaatactgagtccagtaaaccagaaaatatgcttctggtgatttgggtggaaggccatctccagtttaagaagctttatgtgccactatcatcattgtctgttatccttgatctcctttggtgaggggaaggcgggaaagagaggacctctccgacccttggatttttcttttaagcagaggctaataaaacaaagcgcaaactgactgtcctgaggagtctgctcacaccgctgccccgcagatcattccacagaccccttgtcccatcccttctggacagacccaggactgatgagggttcgggttcgggaggtgtggtgtggtgggggcttgtgtggctgtagcggccggctttcctaaaccccagagcgggatactcgggatctgagcagaggggaaagtcatctaagaggctgctgctttacaaggtctgggcacagagctgcccctcccttcctccctgaagtttgcatgaagtgcacattaggctgtaattaggggatttgggaggagaactttcctggtgacgctttgcttttcttctgctcttggtgagaaagtgcctccttcttcccaggatcaggacctctgccatccagcgccacaaagagacattctgcacacacactcacacacgcacacacacacacactctcacactcgcccagagacaaacttaaggtgaggagaaagagcgctagcttcacttgatctccagcttccaacttaagcagaacttgagagcatccgaactcctggatttcaggacaagtgaagaagattctttgggctataaagatgaagagtctacttcttctggtgctgatttcaatctgctgggctgatcatctttcagacaactatactctggatcatgacagagctattcacatccaagcagaaaatggcccccatctacttgtggaagcagagcaagccaaggtgttttcacacagaggtggcaatgttacactgccatgtaaattttatcgagaccctacagcatttggctcaggaatccataaaatccgaattaagtggaccaagctaacttcggattacctcaaggaagtggatgtttttgtttccatgggataccacaaaaaaacctatggaggctaccagggtagagtgtttctgaagggaggcagtgatagtgatgcttctctggtcatcacagacctcactctggaagattatgggagatataagtgtgaggtgattgaaggattagaagatgatactgttgtggtagcactggacttacaaggtgtggtattcccttactttccacgactggggcgctacaatctcaattttcacgaggcgcagcaggcgtgtctggaccaggatgctgtgatcgcctccttcgaccagctgtacgacgcctggcggggcgggctggactggtgcaatgccggctggctcagtgatggctctgtgcaatatcccatcacaaagcccagagagccctgtggggggcagaacacagtgcccggagtcaggaactacggattttgggataaagataaaagcagatatgatgttttctgttttacatccaatttcaatggccgtttttactatctgatccaccccaccaaactgacctatgatgaagcggtgcaagcttgtctcaatgatggtgctcagattgcaaaagtgggccagatatttgctgcctggaaaattctcggatatgaccgctgtgatgcgggctggttggcggatggcagcgtccgctaccccatctctaggccaagaaggcgctgcagtcctactgaggctgcagtgcgcttcgtgggtttcccagataaaaagcataagctgtatggtgtctactgcttcagagcatacaactgaatgtgcccttagagcgcatcagttttaaagtcattaagaacatgtgaaaggtgttttttttttccaatatgaactcatgcaagttaccaaaactgtgataacccttttttacttactgtaaagagtcattttcataaagatcaattcattgatttgttttttgtaaagctatcattcaatatatattataaattaatataaatttaagggaagctctatgtaaggagacttagagccaaactgtttaagctgtatcatcccaacaaagtatcctttcatgaacggggcatgcaatagcttaagaattgctaggattaaattaaggaaagtaaagctactcagagcagcaggttccacaagcacaaactttacacatttgtacaattttgaaatgcactacaataaacaaattagagcaacacatttgaaatacaggcttctttacataaactgagaggttatacaaaactcagtttcacaagggaacaatctatacctttctaaaagttaatatttcaagtctctaataggcagaatattttactctttaaaatcctgcctttctgaccaaaaaaaaaaaaaaaaattcatatggattccaatccatagtaacaagcacagttaaaactcctcaataatcccatttatatgaagcatgacacataaataagcagataatatttaaccaatgaaaaagacttctaccttcttataattaaaattacacatgtctaagaggaattgttttatcttttgagtagctttaccgagttgtatttaaattctaagggccatttgctaagcagcatttagcatctactcagggcagttatatagataaactgctggacagaaaaattgtaaaatttagcagcttgattttctgttagcctatgaaatgttattgtcctataaaaataactttaaactgatttaatatttcatatttacattatatgaaaatcaattacattataaaaggaatccctaatgcagaaacaaagatgcaactttcaaaattcttattattcctatttgtatatacacgagagaacccaaccagtgcctgtgtttggggggaaaagtcaacagtgtagttctaaaccttatcccaaacagaaaatgtggttaatgatgtcactttccttgctggtcatcattaggcttaaattaaatgctgaagctgtcatcaaagagtttacactaaaatcttcagggctttaaataaaaggttaagtccagcttccaaacacaattttccacattagcagctccaatcttcttaaataaagctctgttttcctatatttttatgactgctgagaccccacagggaccaatatttgtattcaaattacatttcatggtttcccattgtttcacaatgagttctaataaatgggatttactataataatccaagtatgacatagccggtatgctttcatgaatgtttttatgtagattttcctcccatgaacatgagtaaataaatctgtttcctgaatggattgtggttgcatttaaagctctgtaataattctaataaatttactctatagagttctgtgtgtggaaggtatagaacaattggaagtccatgaaaccataactataatcatatattattcagacaaaatattgtaataaaagtaggtcctttctttcatcaaaaacatatctgaaaattttcagatgctttaatattaaaagatgacaatgttatgtatgcacatttttaagttaggttggatatgcaaactgtacaaaactataaatccaaagagtttgtaaagtttaaactcaaacactggtggtataaatagaacttgcacttctaaattaaggaagatacctaaatggtctaggatgagatgatatattatttaaagaggggactatctcccaaataacaactttaacacctcaaatatgggggctagctcattgaaagaagtccatacttgaactattattatgtatgttccgataattttgttgaaaatacaagtgggaacaaatttctattgaagcaaacatctaattttcagttatgtccagaactctactttataatgttaaatgtagtagtatttcttaacttttaaatacttactactataggaattggtgctgatcaaaatctctggagtgactgttagctgattaaaatctataccacttacacatcatttttccattcgtgtaaaaaacaaaaaatcttaacacagtgaatactgctgagcagaattttttcttctcattttgctcaaaggaccagaatttccatgccctttatactcatacttgaatgagtctttttaatgttctcattttgctgtttttccaccaaatgtctattttcctacttcattccccaagatgtctcactgagcaggtctgaaaaagaaaggttattctaatacaattcctaacagaaagttggtacaacactggctaattcagaaatcgctcctcagacttagattccaagagtatcaaagagattagatgggaggctgggccaggaacccttgttttaatgtatttgtccataattaacactggtgaccatataaggaacaaagtatatctgcacatttcactgagacatctacattggaaaacccaaacaaaaagaagcaattcaaataaaaagacaacataagaacgaaaataagttggtcacattaacactggaagccatctttaagtgagtgctgtcatattgtgtcacagtaatttttagccaaatatggcgtttgtaaatttaaactttctctcatggaaagggggctggtacctgtcaaagtgttattttatgcaacaatatagtcactttttattttggcaattagaagtagactcaaaggagattacaatttggttgctggcagccattctgggtttcttgattttagtactccaaagaatatggtggtctcatggagtagctgaccactaaggaggggaggattaaaagggaatcacttatcagtttttagcataggatgcattaagaaatatcaacggataactgacatcgttttgttaagaagttaactgtatcgtagctcactactgccagagcggcaatggatgtacaacgaaagagatgaaaaatacaaaagttattaagccacctgattaaaagaaaaccaatatttaaaggcatttaatagatatcaagtataactttgaggagaagaatcaatctgtattaccaaaaaaaaaatgttttgattttctgtaagatacaatgaactggtacattaaaagtcaattttgtgttactgcagtatcttttaattcttctgagttgtagaatcttagctatttttctttgtgtcaaactctgtcaatacattatttccaagaaaggcatttaattcattcttgttctgatacatttgacttcaaattgtaaatacgtacaattttcatttcctagtactcttgcaaagtcaaaaaaaaaaaaagagcatttatatggtgtcgctaaatcaactatagtattatcccaaaatatattgacttttttctctttgtatatgactcaaagcataattaattttgcccaccagttcagcaatcccagaaatctattgtgttgttgattagattaacacattttaaatgctttataacttaatcatgagtgctgaattaaaaaaaggtttttcttttcata

SEQ ID NO: 141515 - DNA, 799 bp, Homo sapiens
  Payload ID: 7828
  Gene Symbol: HAPLN1
  Gene Name: hyaluronan and proteoglycan link protein 1
  ENST ID: ENST00000508307
  CDS Start-End: 203-799
gtggatccgctgactgcagagaccctacctggcactctaagttggtgcgtcagcattttaggttgaaatgaatgaaaaatcaatcaggatgactgcagtggtagcgtgcacaactctaacctagtttgttcataattttcaactattcaccgtagacccaagcagtatgtaagatgtgaagaagattctttgggctataaagatgaagagtctacttcttctggtgctgatttcaatctgctgggctgatcatctttcagacaactatactctggatcatgacagagctattcacatccaagcagaaaatggcccccatctacttgtggaagcagagcaagccaaggtgttttcacacagaggtggcaatgttacactgccatgtaaattttatcgagaccctacagcatttggctcaggaatccataaaatccgaattaagtggaccaagctaacttcggattacctcaaggaagtggatgtttttgtttccatgggataccacaaaaaaacctatggaggctaccagggtagagtgtttctgaagggaggcagtgatagtgatgcttctctggtcatcacagacctcactctggaagattatgggagatataagtgtgaggtgattgaaggattagaagatgatactgttgtggtagcactggacttacaaggtgtggtattcccttactttccacgactggggcgctacaatctcaattttcacgaggcgcagcaggcgtgtctggaccaggatgctgtgatcgcctccttcgaccagctgtacgacgcctggcgg

SEQ ID NO: 141516 - DNA, 1145 bp, Homo sapiens
  Payload ID: 7828
  Gene Symbol: HAPLN1
  Gene Name: hyaluronan and proteoglycan link protein 1
  ENST ID: ENST00000514416
  CDS Start-End: 241-726
gactgcatgaagtgcattggagagaacagaagtttctgctgctaaaaaccattaatatattatttttatttttattatgacttagtataactaggtaccacagtaaatcgatgatcataaaacttttcattgtatgtagtacaaaatcagaattgacacatatttaaaaatcttcctatgccttctcagagtctggtgactttttaaaatatgttgaagaagattctttgggctataaagatgaagagtctacttcttctggtgctgatttcaatctgctgggctgatcatctttcagacaactatactctggatcatgacagagctattcacatccaagcagaaaatggcccccatctacttgtggaagcagagcaagccaaggtgttttcacacagaggtggcaatgttacactgccatgtaaattttatcgagaccctacagcatttggctcaggaatccataaaatccgaattaagtggaccaagctaacttcggattacctcaaggaagtggatgtttttgtttccatgggataccacaaaaaaacctatggaggctaccagggtagagtgtttctgaagggaggcagtgatagtgatgcttctctggtcatcacagacctcactctggaagattatgggagatataagtgtgaggtgattgaaggattagaagatgatactgttgtggtagcactggacttacaaggtatgtatctataagtcatgttcaacgtataaatggtcattaatagttgctttttttttcatgaagagtaatgtctagtggttaacacagtaataaagtgaaaaaccaaagtccttgcctggcatcttattcttttgtattctacagtctgcctatgattccagctttcatgtttgaaatgcatacacaatgcttatgtgcaaaattgaagctatttgtaactaggagaaacgtgcagtggaactgaattaacagttttcagatactgccttatgttattcaaaatcatctaaattccattatatggttattgagaaattcagactgtgtactttttttattttgtttctaaaattatctcagtttcaaaataatggcatgttttgtaaaggacatctgctaactaaaatatatgtaattgtattctgtaaaa

SEQ ID NO: 141517 - DNA, 823 bp, Homo sapiens
  Payload ID: 7828
  Gene Symbol: HAPLN1
  Gene Name: hyaluronan and proteoglycan link protein 1
  ENST ID: ENST00000504713
  CDS Start-End: 315-823
aataagtgaattaggttctggagtagaggctctcctacaaggacctccaggaacagactcagagctctttaataagtatcccagggagtcaggctttcttggaaaaaacaaattagtgtgagaagccagtactgtgcaatttcagttttaaaaatagccggtattgtcaaggctgctgtgtgcatgagagaaatagaaggtccttgttaattttcgtgtcagcttccacattaaaaccaagaagctccactgaaatccttgcctggcaaatactgcaaaggttataagtgaagaagattctttgggctataaagatgaagagtctacttcttctggtgctgatttcaatctgctgggctgatcatctttcagacaactatactctggatcatgacagagctattcacatccaagcagaaaatggcccccatctacttgtggaagcagagcaagccaaggtgttttcacacagaggtggcaatgttacactgccatgtaaattttatcgagaccctacagcatttggctcaggaatccataaaatccgaattaagtggaccaagctaacttcggattacctcaaggaagtggatgtttttgtttccatgggataccacaaaaaaacctatggaggctaccagggtagagtgtttctgaagggaggcagtgatagtgatgcttctctggtcatcacagacctcactctggaagattatgggagatataagtgtgaggtgattgaaggattagaagatgatactgttgtggtagcactggacttacaaggtgtggtattcccttactttccacgactggggcgcta

SEQ ID NO: 141518 - DNA, 989 bp, Homo sapiens
  Payload ID: 7828
  Gene Symbol: HAPLN1
  Gene Name: hyaluronan and proteoglycan link protein 1
  ENST ID: ENST00000510978
  CDS Start-End: 215-989
ggtagcaggaattgttcaaagctgccgtcttcggctcttaaaggcagctacagtaactttctgaacagattgggttaaatatttttacagacccattctatgatgataaggcggtaataagttgtgcagtgcaacactccaaagggttccaaatctcacaagcctctttgtatgtgatgctctcgcagtgaagaagattctttgggctataaagatgaagagtctacttcttctggtgctgatttcaatctgctgggctgatcatctttcagacaactatactctggatcatgacagagctattcacatccaagcagaaaatggcccccatctacttgtggaagcagagcaagccaaggtgttttcacacagaggtggcaatgttacactgccatgtaaattttatcgagaccctacagcatttggctcaggaatccataaaatccgaattaagtggaccaagctaacttcggattacctcaaggaagtggatgtttttgtttccatgggataccacaaaaaaacctatggaggctaccagggtagagtgtttctgaagggaggcagtgatagtgatgcttctctggtcatcacagacctcactctggaagattatgggagatataagtgtgaggtgattgaaggattagaagatgatactgttgtggtagcactggacttacaaggtgtggtattcccttactttccacgactggggcgctacaatctcaattttcacgaggcgcagcaggcgtgtctggaccaggatgctgtgatcgcctccttcgaccagctgtacgacgcctggcggggcgggctggactggtgcaatgccggctggctcagtgatggctctgtgcaatatcccatcacaaagcccagagagccctgtggggggcagaacacagtgcccggagtcaggaactacggattttgggataaagataaaagcagatatgatgttttctgttttacatccaatttcaatg

SEQ ID NO: 141519 - DNA, 560 bp, Homo sapiens
  Payload ID: 7828
  Gene Symbol: HAPLN1
  Gene Name: hyaluronan and proteoglycan link protein 1
  ENST ID: ENST00000515590
  CDS Start-End: 102-560
ccgaactcctggatttcaggacaagcgccccttctctgattcctgtaaacaagcagagagcacatcacaactctgtgaagaagattctttgggctataaagatgaagagtctacttcttctggtgctgatttcaatctgctgggctgatcatctttcagacaactatactctggatcatgacagagctattcacatccaagcagaaaatggcccccatctacttgtggaagcagagcaagccaaggtgttttcacacagaggtggcaatgttacactgccatgtaaattttatcgagaccctacagcatttggctcaggaatccataaaatccgaattaagtggaccaagctaacttcggattacctcaaggaagtggatgtttttgtttccatgggataccacaaaaaaacctatggaggctaccagggtagagtgtttctgaagggaggcagtgatagtgatgcttctctggtcatcacagacctcactctggaagattatgggagatataagtgtgaggtgattgaaggattagaagatgatactgttgtggtagca

SEQ ID NO: 141520 - DNA, 568 bp, Homo sapiens
  Payload ID: 7828
  Gene Symbol: HAPLN1
  Gene Name: hyaluronan and proteoglycan link protein 1
  ENST ID: ENST00000503117
  CDS Start-End: 22-568
aagattctttgggctataaagatgaagagtctacttcttctggtgctgatttcaatctgctgggctgatcatctttcagacaactatactctggatcatgacagagctattcacatccaagaaaatggcccccatctacttgtggaagcagagcaagccaaggtgttttcacacagaggtggcaatgttacactgccatgtaaattttatcgagaccctacagcatttggctcaggaatccataaaatccgaattaagtggaccaagctaacttcggattacctcaaggaagtggatgtttttgtttccatgggataccacaaaaaaacctatggaggctaccagggtagagtgtttctgaagggaggcagtgatagtgatgcttctctggtcatcacagacctcactctggaagattatgggagatataagtgtgaggtgattgaaggattagaagatgatactgttgtggtagcactggacttacaaggtgtggtattcccttactttccacgactggggcgctacaatctcaattttcacgaggcgcagcaggcgtgtctggacc

SEQ ID NO: 141521 - DNA, 1771 bp, Homo sapiens
  Payload ID: 7829
  Gene Symbol: HAPLN2
  Gene Name: hyaluronan and proteoglycan link protein 2
  Uniprot ID: Q9GZV7
  ENST ID: ENST00000255039
  CDS Start-End: 408-1430
ttgccattacccacagaataaagaaaggggccctgttattcaacaataggggaaaagacagagacaatgggaaattgtgcttccgatggggtggggactgagaaggaaaggacagacagacagacagacagggggttgtacagaagaggtccggtttcttgaagcagctggaagtcctggatagttcccacctgaaagtctgtttgcaaaggcaatgcgcactcaggcaccagagggcagaggggctcaagttccagggttttaaggtgcttggaactcccaggagcctggcaaaccttcatccagaacctcttcctcaagcaagacaaaaagctgctaagcactgctccctccgtctctgtgaagagaccagcttctaacagacggtgccgggctgaccccccatcatgccaggctggctcaccctccccacactctgccgcttccttctttgggccttcaccatcttccacaaagcccaaggagacccagcatcccacccgggcccccactacctcctgccccccatccacgaggtcattcactctcatcgtggggccacggccacgctgccctgcgtcctgggcaccacgcctcccagctacaaggtgcgctggagcaaggtggagcctggggagctccgggaaacgctgatcctcatcaccaacggactgcacgcccgggggtatgggcccctgggagggcgcgccaggatgcggagggggcatcgactagacgcctccctggtcatcgcgggcgtgcgcctggaggacgagggccggtaccgctgcgagctcatcaacggcatcgaggacgagagcgtggcgctgaccttgagcttggagggtgtggtgtttccgtaccaacccagccggggccggtaccagttcaattactacgaggcgaagcaggcgtgcgaggagcaggacggacgcctggccacctactcccagctctaccaggcttggaccgagggtctggactggtgtaacgcgggctggctgctcgagggctccgtgcgctaccctgtgctcaccgcacgcgccccgtgcggcggccgaggccggcccgggatccgcagctacggaccccgcgaccggatgcgcgaccgctacgacgccttctgcttcacctccgcgctggcgggccaagtgttcttcgtgcccgggcggctgacgctgtctgaagcccacgcggcgtgccggcgacgcggcgccgtggtggccaaggttgggcacctctacgccgcctggaagttttcggggctagaccagtgcgacggcggctggctggctgacggcagtgtgcgcttcccaatcaccacgccgaggccgcgctgcggggggctcccggatcccggagtgcgcagtttcggcttccccaggccccaacaggcagcctatgggacctactgctacgccgagaattaggcgcccaccgtgtcccctccagcgcgcgcgaagaagcttgggagtcgtggcgggggtctctcgccacccctttccggagagcctcccctccctccagacccggagcggcctctccagacctgccttcccagccgggggctgcgggcctcggaccccggctggcccggcggcggggaggggaggcgggggcgcctccggcggcgagatgcagaggtgaccctcggacccgctgccgttcgcgaaccctagcagaggactcagccaccgccggggggagggtgaggcggccgggggcattaactgacctctgagtacagcaataaaataacctggggatcttt

SEQ ID NO: 141522 - DNA, 882 bp, Homo sapiens
  Payload ID: 7829
  Gene Symbol: HAPLN2
  Gene Name: hyaluronan and proteoglycan link protein 2
  ENST ID: ENST00000456112
  CDS Start-End: 327-882
gggggttgtacagaagaggtccggtttcttgaagcagctggaagtcctggatagttcccacctgaaagtctgtttgcaaaggcaatgcgcactcaggcaccagagggcagaggacagaagcttttcctcaaaggtgcaaaaggagcaactgtgttgaacaggggctcaagttccagggttttaaggtgcttggaactcccaggagcctggcaaaccttcatccagaacctcttcctcaagcaagacaaaaagctgctaagcactgctccctccgtctctgtgaagagaccagcttctaacagacggtgccgggctgaccccccatcatgccaggctggctcaccctccccacactctgccgcttccttctttgggccttcaccatcttccacaaagcccaaggagacccagcatcccacccgggcccccactacctcctgccccccatccacgaggtcattcactctcatcgtggggccacggccacgctgccctgcgtcctgggcaccacgcctcccagctacaaggtgcgctggagcaaggtggagcctggggagctccgggaaacgctgatcctcatcaccaacggactgcacgcccgggggtatgggcccctgggagggcgcgccaggatgcggagggggcatcgactagacgcctccctggtcatcgcgggcgtgcgcctggaggacgagggccggtaccgctgcgagctcatcaacggcatcgaggacgagagcgtggcgctgaccttgagcttggagggtgtggtgtttccgtaccaacccagccggggccggtaccagttcaattactacgaggcgaagcaggcgtgcgaggagcaggacggacgcctggccacctactcccagctctaccagg

SEQ ID NO: 141523 - DNA, 1980 bp, Homo sapiens
  Payload ID: 7830
  Gene Symbol: HAPLN3
  Gene Name: hyaluronan and proteoglycan link protein 3
  Uniprot ID: Q96S86
  ENST ID: ENST00000359595
  CDS Start-End: 216-1298
aaaggtgcgcgtgttcctttaaggggctggtctggcgggagcgcgggggtttttctgctgccgcttcctttctgcccttttaatttccccgaaatcagactgctgccttggaccgggacagctcgcggcccccgagagctctagccgtcgaggagctgcctggggacgtttgccctggggccccagcctggcccgggtcaccctggcatgaggagatgggcctgttgctcctggtcccgttgctcctgctgcccggctcctacggactgcccttctacaacggcttctactactccaacagcgccaacgaccagaacctaggcaacggtcatggcaaagacctccttaatggagtgaagctggtggtggagacacccgaggagaccctgttcacctaccaaggggccagtgtgatcctgccctgccgctaccgctacgagccggccctggtctccccgcggcgtgtgcgtgtcaaatggtggaagctgtcggagaacggggccccagagaaggacgtgctggtggccatcgggctgaggcaccgctcctttggggactaccaaggccgcgtgcacctgcggcaggacaaagagcatgacgtctcgctggagatccaggatctgcggctggaggactatgggcgttaccgctgtgaggtcattgacgggctggaggatgaaagcggtctggtggagctggagctgcggggtgtggtctttccttaccagtcccccaacgggcgctaccagttcaacttccacgagggccagcaggtctgtgcagagcaggctgcggtggtggcctcctttgagcagctcttccgggcctgggaggagggcctggactggtgcaacgcgggctggctgcaggatgccacggtgcagtaccccatcatgttgccccggcagccctgcggtggcccgggcctggcacctggcgtgcgaagctacggcccccgccaccgccgcctgcaccgctatgatgtattctgcttcgctactgccctcaaggggcgggtgtactacctggagcaccctgagaagctgacgctgacagaggcaagggaggcctgccaggaagatgatgccacgatcgccaaggtgggacagctctttgccgcctggaagttccatggcctggaccgctgcgacgctggctggctggcagatggtagcgtccgctaccctgtggttcacccgcatcctaactgtgggcccccagagcctggggtccgaagctttggcttccccgacccgcagagccgcttgtacggtgtttactgctaccgccagcactaggacctggggccctcccctgccgcattccctcactggctgtgtatttattgagtggttcgttttcccttgtgggttggagccattttaactgtttttatacttctcaatttaaattttctttaaacatttttttactattttttgtaaagcaaacagaacccaatgcctccctttgctcctggatgccccactccaggaatcatgcttgctcccctgggccatttgcggttttgtgggcttctggagggttccccgccatccaggctggtctccctcccttaaggaggttggtgcccagagtgggcggtggcctgtctagaatgccgccgggagtccgggcatggtgggcacagttctccctgcccctcagcctgggggaagaagagggcctcgggggcctccggagctgggctttgggcctctcctgcccacctctacttctctgtgaagccgctgaccccagtctgcccactgaggggctagggctggaagccagttctaggcttccaggcgaaagctgagggaaggaagaaactcccctccccgttccccttcccctctcggttccaaagaatctgttttgttgtcatttgtttctcctgtttccctgtgtggggaggggccctcaggtgtgtgtactttggacaataaatggtgctatgactgccttccgccatcccca

SEQ ID NO: 141524 - DNA, 3071 bp, Homo sapiens
  Payload ID: 7830
  Gene Symbol: HAPLN3
  Gene Name: hyaluronan and proteoglycan link protein 3
  ENST ID: ENST00000558770
  CDS Start-End: 121-681
cagactgctgccttggaccgggacagctcgcggcccccgagagctctagccgtcgaggagctgcctggggacgtttgccctggggccccagcctggcccgggtcaccctggcatgaggagatgggcctgttgctcctggtcccgttgctcctgctgcccggctcctacggactgcccttctacaacggcttctactactccaacagcgccaacgaccagaacctaggcaacggtcatggcaaagacctccttaatggagtgaagctggtggtggagacacccgaggagaccctgttcacctaccaaggggccagtgtgatcctgccctgccgctaccgctacgagccggccctggtctccccgcggcgtgtgcgtgtcaaatggtggaagctgtcggagaacggggccccagagaaggacgtgctggtggccatcgggctgaggcaccgctcctttggggactaccaaggccgcgtgcacctgcggcaggacaaagagcatgacgtctcgctggagatccaggatctgcggctggaggactatgggcgttaccgctgtgaggtcattgacgggctggaggatgaaagcggtctggtggagctggagctgcggggatggggctgtgtgtcctcacatctctcccacatgttagggaggcagttcggggatagaggaaggtgacctgactttagccccagcccgtcccagctatgacatgtgggtaaatgcctcatcccccttagagccctgggcctctcaggtgtaaaatggggtatcacaatctttcctcctttacctccctcagaggcaatgaggataagatgtatgtccttaaaatgcgttctctgtctttgccaccagtgtccacatggcttacatggtggctcagaggggccgcattcctcattcttgaagttggggtggcagtggagttggggagaacctgcaagagtcattggtctggggtctgcaggggcagcctagagaaacagggagccctcaccccattcccggggcttcaagggctaggaatttggggtggaaccaggcatgaaatagtccccctgcaaacacacgtagaggctgcaagctgactgtcagggcccatgggcttctctgccgcccaacctggctttgcccaggtgcctggcttccggccctggtgagatcggaggtttggggctcaggctgttcctgggtccttggccacacggaggagattccaaagtgtccttcccagacccctagggtcacctccactccctaaggtttcattgacttggtagagactacatctcagaagtttaaaaactttttattagagtaaaatttcaaacacgaacatatcttttcagggcctgtggcctctatcagaccctgaccacaaggagagaaaccgcctgccccagacctccctgcccttgagcctcctttatggaaggcccttccccaaccctctccccacggcctctagggcctctccttctcctgaaaatcatctgccacacgtggaaagttccttgcattttcctaggaaatttccacattcataataacgtagacgatcgggtcccagctaacgagtggggagctgggagtcaaacctggcccctagagcccaaagcccgggcctgtctggagaagatggcacagcctcactgggggtctggcgacagccttgcggattaggttggggacattgttggggacattaatggactaattaattaccttaactcatggatgttttctgagtactgctgtgaaccagctgagtcccaggagagaggcggcaacggacaggaggtgtggtctttccttaccagtcccccaacgggcgctaccagttcaacttccacgagggccagcaggtctgtgcagagcaggctgcggtggtggcctcctttgagcagctcttccgggcctgggaggagggcctggactggtgcaacgcgggctggctgcaggatgccacggtgcagtaccccatcatgttgccccggcagccctgcggtggcccgggcctggcacctggcgtgcgaagctacggcccccgccaccgccgcctgcaccgctatgatgtattctgcttcgctactgccctcaaggggcgggtgtactacctggagcaccctgagaagctgacgctgacagaggcaagggaggcctgccaggaagatgatgccacgatcgccaaggtgggacagctctttgccgcctggaagttccatggcctggaccgctgcgacgctggctggctggcagatggtagcgtccgctaccctgtggttcacccgcatcctaactgtgggcccccagagcctggggtccgaagctttggcttccccgacccgcagagccgcttgtacggtgtttactgctaccgccagcactaggacctggggccctcccctgccgcattccctcactggctgtgtatttattgagtggttcgttttcccttgtgggttggagccattttaactgtttttatacttctcaatttaaattttctttaaacatttttttactattttttgtaaagcaaacagaacccaatgcctccctttgctcctggatgccccactccaggaatcatgcttgctcccctgggccatttgcggttttgtgggcttctggagggttccccgccatccaggctggtctccctcccttaaggaggttggtgcccagagtgggcggtggcctgtctagaatgccgccgggagtccgggcatggtgggcacagttctccctgcccctcagcctgggggaagaagagggcctcgggggcctccggagctgggctttgggcctctcctgcccacctctacttctctgtgaagccgctgaccccagtctgcccactgaggggctagggctggaagccagttctaggcttccaggcgaaagctgagggaaggaagaaactcccctccccgttccccttcccctctcggttccaaagaatctgttttgttgtcatttgtttctcctgtttccctgtgtggggaggggccctcaggtgtgtgtactttggacaataaatggtgctatgactgccttccgcc

SEQ ID NO: 141525 - DNA, 801 bp, Homo sapiens
  Payload ID: 7830
  Gene Symbol: HAPLN3
  Gene Name: hyaluronan and proteoglycan link protein 3
  ENST ID: ENST00000562281
  CDS Start-End: 123-801
atcagactgctgccttggaccgggacagctcgcggcccccgagagctctagccgtcgaggagctgcctggggacgtttgccctggggccccagcctggcccgggtcaccctggcatgaggagatgggcctgttgctcctggtcccgttgctcctgctgcccggctcctacggactgcccttctacaacggcttctactactccaacagcgccaacgaccagaacctaggcaacggtcatggcaaagacctccttaatggagtgaagctggtggtggagacacccgaggagaccctgttcacctaccaaggggccagtgtgatcctgccctgccgctaccgctacgagccggccctggtctccccgcggcgtgtgcgtgtcaaatggtggaagctgtcggagaacggggccccagagaaggacgtgctggtggccatcgggctgaggcaccgctcctttggggactaccaaggccgcgtgcacctgcggcaggacaaagagcatgacgtctcgctggagatccaggatctgcggctggaggactatgggcgttaccgctgtgaggtcattgacgggctggaggatgaaagcggtctggtggagctggagctgcgggctgagtcccaggagagaggcggcaacggacaggaggtgtggtctttccttaccagtcccccaacgggcgctaccagttcaacttccacgagggccagcaggtctgtgcagagcaggctgcggtggtggcctcctttgagcagctcttccgggcctgggaggagggcctggactggtgcaacgcggg

SEQ ID NO: 141526 - DNA, 1547 bp, Homo sapiens
  Payload ID: 7830
  Gene Symbol: HAPLN3
  Gene Name: hyaluronan and proteoglycan link protein 3
  ENST ID: ENST00000562889
  CDS Start-End: 140-1408
gtctggcgggagcgcgggggtttttctgctgccgcttcctttctgcccttttaatttccccgaaatcagactgctgccttggaccgggacagctcgcggcccccgagagctctagccgtcgaggagctgcctggggacgatgaggaaatggaggcacagagaggtgaacttgcccgaagtcactcagcaggatgcagtgtgtccagctccaataccgagcccaggtctgagtgcccagacaggactccagaagatttggggaactatccactgccaagtttgccctggggccccagcctggcccgggtcaccctggcatgaggagatgggcctgttgctcctggtcccgttgctcctgctgcccggctcctacggactgcccttctacaacggcttctactactccaacagcgccaacgaccagaacctaggcaacggtcatggcaaagacctccttaatggagtgaagctggtggtggagacacccgaggagaccctgttcacctaccaaggggccagtgtgatcctgccctgccgctaccgctacgagccggccctggtctccccgcggcgtgtgcgtgtcaaatggtggaagctgtcggagaacggggccccagagaaggacgtgctggtggccatcgggctgaggcaccgctcctttggggactaccaaggccgcgtgcacctgcggcaggacaaagagcatgacgtctcgctggagatccaggatctgcggctggaggactatgggcgttaccgctgtgaggtcattgacgggctggaggatgaaagcggtctggtggagctggagctgcggggtgtggtctttccttaccagtcccccaacgggcgctaccagttcaacttccacgagggccagcaggtctgtgcagagcaggctgcggtggtggcctcctttgagcagctcttccgggcctgggaggagggcctggactggtgcaacgcgggctggctgcaggatgccacggtgcagtaccccatcatgttgccccggcagccctgcggtggcccgggcctggcacctggcgtgcgaagctacggcccccgccaccgccgcctgcaccgctatgatgtattctgcttcgctactgccctcaaggggcgggtgtactacctggagcaccctgagaagctgacgctgacagaggcaagggaggcctgccaggaagatgatgccacgatcgccaaggtgggacagctctttgccgcctggaagttccatggcctggaccgctgcgacgctggctggctggcagatggtagcgtccgctaccctgtggttcacccgcatcctaactgtgggcccccagagcctggggtccgaagctttggcttccccgacccgcagagccgcttgtacggtgtttactgctaccgccagcactaggacctggggccctcccctgccgcattccctcactggctgtgtatttattgagtggttcgttttcccttgtgggttggagccattttaactgtttttatacttctcaatttaaattttctttaaacatttttttactatt

SEQ ID NO: 141527 - DNA, 3449 bp, Homo sapiens
  Payload ID: 7831
  Gene Symbol: HAPLN4
  Gene Name: hyaluronan and proteoglycan link protein 4
  Uniprot ID: Q86UW8
  ENST ID: ENST00000291481
  CDS Start-End: 65-1273
ccgggtgtgcggggagcgcagtccgggtgcgtaggggccgctcggcgggggccgcgcgggcaagatggtgtgcgctcgggcggccctcggtcccggcgcgctctgggccgcggcctggggcgtcctgctgctcacagcccctgcgggggcgcagcgtggccggaagaaggtcgtgcacgtgctggagggtgagtcgggctcggtagtggtacagacagcgcctgggcaggtggtaagccaccgtggtggcaccatcgtcttgccctgccgctaccactatgaggcagccgcccacggtcacgacggcgtccggctcaagtggacaaaggtggtggacccgctggccttcaccgacgtcttcgtggcactaggcccccagcaccgggcattcggcagctaccgtgggcgggctgagctgcagggcgacgggcctggggatgcctccctggtcctccgcaacgtcacgctgcaagactacgggcgctatgagtgcgaagtcaccaatgagctggaagatgacgctggcatggtcaagctggacctggaaggcgtggtctttccctaccacccccgtggaggccgatacaagctgaccttcgcggaggcgcagcgcgcgtgcgccgagcaggacggcatcctggcatctgcagaacagctgcacgcggcctggcgcgacggcctggactggtgcaacgcgggctggttgcgcgacggctcagtgcaataccccgtgaaccggccccgggagccctgcggcggcctgggggggaccgggagtgcagggggcggcggtgatgccaacgggggcctgcgcaactacgggtatcgccataacgccgaggaacgctacgacgccttctgcttcacgtccaacctgccggggcgcgtgttcttcctgaagccgctgcgacctgtacccttctccggagctgcgcgcgcgtgtgctgcgcgtggcgcggccgtggccaaggtggggcagctgttcgccgcgtggaagctgcagctgctagaccgctgcaccgcgggttggctggccgatggcagtgcgcgctaccccatcgtgaacccgcgagcgcgctgcggaggccgcaggcctggtgtgcgcagcctcggcttcccggacgccacccgacggctcttcggcgtctactgctaccgcgctccaggagcaccggacccggcacctggcggctggggctggggctgggcgggcggcggcggctgggcagggggcgcgcgcgatcctgctgcctggacccctctgcacgtctaggctgggagtaggcggacagccagggcgcttgaccactggtctagagccctgtggtcccctggagcctggccacgcccttgaagccctggacactggccacattccctgtggtcccttacaaactaactgtgcccctggggtccctgaagactggctagtcctggcagaacagtactttggagttccctggagcctggccagccctcacctcttctggatagaggattcccccaactccccaactttctccatgagggtcacgccccctgaggacctcaggaggccagcagaacccgcaggctcctgaagactggccacgcctcctgagaccacttggaaacagaccaactgcccccgtggtcgcctggtggctggacccccgggattgactagagaccggccgtacaccttctgcatctcactggagactgaacactagtcccttgcggtcacgtgggacactgggcgcctcctcctccccctcctcctcacctggagagactacaggaacttcagggtcactccccgtggtcacatggaggttgtgggccgaggcgcttattttcccttatggtgacctgagtcctggagactcccattctccccctctccctgagagtcccctgcagtttctgggtaacagggcacacccctctagtttcatgggcgagcacccccatctgccacctcagactgacacacagccagctggctcacttactgggggccacgtcccacccctcagatatttctttgaagggagagcaaacccaccctgtcctctgacgtccctttcccaactgtcaccaaacagaccatcttcccaggcctggggaccggtaagatccatgtcactagttatgcagagcagttgccttgggtcccactgtcaccaaggcaaccagtcctgctgctacctgtcacctagagtcacacaccccttccctcatcaggcacacccatgaagacagtgcctccctcctccagctgtaaccatggataccacacatttctcatctcattggcccccaccccagagacctccacctcaacttctggctgtccctaccctgactcaccgccatggagatcaccctccccgaagctgtcgccagggtgacccaacatccagttctccggctctcaccatggaaacaaactgtccctgtccccaggcccactccagttccagaccaccctccatgctccacccccaggcggtttggaccccaccactgttgccatggtgaccaaactctggagtccgaggtaacagaacacctgtccccctaggcttttccttgtggacaacggggccctgttcaccaagctgttgccatagagactgtcaacgttgtcctcatgacaaccagacttccagttctcaggaacttctcattgtgggccagaagtcctgggtgcctcctactagggctaccctactgcaccccatcaggggcctgatggctgccccttccccagacagggctggacttctggagctgctaagccaccctccgtttgcacgttaactctatgccggatagcagctgtgcacgagacaatcttgcaacacccgggcatgtttgtcgtcgtcctacaaatgaggaaaccgagcctatggcgtgccctggtctgttgagatatgcaagcactgagctcctcttttgtcctctgagaccccatctccattctcacccagttcctctctccttccctgacccccacccacatttccctccttagagatccaggagggatggaatgttctttaaaattcaacacccaccaggctctaagcggcgatctgtgctaagaggtcaggacccagccgaagtcctcggcgttgacaggcagctggggggacatgatccatggacaaggccatcccggccgtgggagaccccagtcccgaagtcttgcctgcaggagtactggggtccccctggggccctctttactgtcacgtcatctctaggaaacctatctctgagttttgggaccaggtcggtttgggtttgaattctgcctcttcttgctcactgtgtgaccaagtgacaaactccttctgaacctgtgttctcccactgtaccagggctgttctgtggtccccgtgagtgccaagcatacagtaggggctcaataaatccttgtttcttttgatgaatgagaaaa

SEQ ID NO: 141528 - DNA, 3009 bp, Homo sapiens
  Payload ID: 7832
  Gene Symbol: HABP2
  Gene Name: hyaluronan binding protein 2
  Uniprot ID: Q14520
  ENST ID: ENST00000351270
  CDS Start-End: 97-1779
cctgaatccttggagactgacatttttcccccctaaaggcatagacaacaaaagaaattttattgagaggaaaacacaagtccttaaactgcaaagatgtttgccaggatgtctgatctccatgttctgctgttaatggctctggtgggaaagacagcctgtgggttctccctgatgtctttattggaaagcctggacccagactggacccctgaccagtatgattacagctacgaggattataatcaggaagagaacaccagtagcacacttacccacgctgagaatcctgactggtactacactgaggaccaagctgatccatgccagcccaacccctgtgaacacggtggggactgcctcgtccatgggagcaccttcacatgcagctgcctggctcctttctctgggaataagtgtcagaaagtgcaaaatacgtgcaaggacaacccatgtggccggggccaatgtctcattacccagagtcctccctactaccgctgtgtctgtaaacacccttacacaggtcccagctgctcccaagtggttcctgtatgcaggccaaacccctgccagaatggggctacctgctcccggcataagcggagatccaagttcacctgtgcctgtcccgaccagttcaaggggaaattctgtgaaataggttctgatgactgctatgttggcgatggctactcttaccgagggaaaatgaataggacagtcaaccagcatgcgtgcctttactggaactcccacctcctcttgcaggagaattacaacatgtttatggaggatgctgaaacccatgggattggggaacacaatttctgcagaaacccagatgcggacgaaaagccctggtgctttattaaagttaccaatgacaaggtgaaatgggaatactgtgatgtctcagcctgctcagcccaggacgttgcctacccagaggaaagccccactgagccatcaaccaagcttccggggtttgactcctgtggaaagactgagatagcagagaggaagatcaagagaatctatggaggctttaagagcacggcgggcaagcacccatggcaggcgtccctccagtcctcgctgcctctgaccatctccatgccccagggccacttctgtggtggggcgctgatccacccctgctgggtgctcactgctgcccactgcaccgacataaaaaccagacatctaaaggtggtgctaggggaccaggacctgaagaaagaagaatttcatgagcagagctttagggtggagaagatattcaagtacagccactacaatgaaagagatgagattccccacaatgatattgcattgctcaagttaaagccagtggatggtcactgtgctctagaatccaaatacgtgaagactgtgtgcttgcctgatgggtcctttccctctgggagtgagtgccacatctctggctggggtgttacagaaacaggaaaagggtcccgccagctcctggatgccaaagtcaagctgattgccaacactttgtgcaactcccgccaactctatgaccacatgattgatgacagtatgatctgtgcaggaaatcttcagaaacctgggcaagacacctgccagggtgactctggaggccccctgacctgtgagaaggacggcacctactacgtctatgggatagtgagctggggcctggagtgtgggaagaggccaggggtctacacccaagttaccaaattcctgaattggatcaaagccaccatcaaaagtgaaagtggcttctaaggtactgtcttctggacctcagagcccactctccttggcaccctgacaccgggaggcctcatggccaacaatggacacctccagagcctccaggggaccacacagtagactatccctactctaagcagagacaactgccacccagcctgggccttcccagaccagcatttgcacaatatcaccaggcttcttctgcctcccttggtaacccaaggaatgatggaatcaacacaacatagtatgtttgctttccttacccaattgtaccttctagaaaatcagtgttcacagagactgcctccaccacaggcatcctgcaaatgcagactccagaatccccagcatcagcgggaaccaccatcacatctttattcctcagcccagacactcgaggcactcaacagaatcagccatccacgtctaggtatcagagaggaccacaaatacaacattctccatctgctttcagagttattattttaataaaggaagatctgggatgggctggtgggccattccagcttgccgaaatcaaagccatctgaagcctgtctctggtgaacaaacttcctctctggcctctcaggaatcagggtggacatggctcacaacagcagggccttcttctttttgacgtgcagaatctcagtggcatctgggttcacctccccactctgatgatctccagcctccactgcttctgccccccgctgctgaaatcaaacataccccaagttaaaatgaagctcccccacccccactcccggccccggttcccacaggacacgctaagaagcacagggagcatttaacaggctcaccctccctttccttttcccctcttctaccctccccaagaaaaagggccttcaaggcaggaatgagaaagcaaagccaatctctcatttagacctggcttctttcttctgaacaaagtagggttcaaaatgcagactgtcatatccagcgagtccctgaccctttctgcgaatgtaacgagcaagcagtcagcacagcctgggctgccctggcccgggattgatgtagccccggtaggtttgcctctgcagaactaatggctgtgacttcagagaaagccctgcaggaagtttaacctgcgtgtcatctgcctggtcatctcagacccatgaaattaggcgccttgtttgagctgcgtttcacacttctttagagctagctgacctttggccaaaaataaactttgaaaag

SEQ ID NO: 141529 - DNA, 2972 bp, Homo sapiens
  Payload ID: 7832
  Gene Symbol: HABP2
  Gene Name: hyaluronan binding protein 2
  Uniprot ID: Q14520
  ENST ID: ENST00000542051
  CDS Start-End: 135-1739
catagaaaccactaacgaaaattaactgtttactttttcactgtctgcccatctcctcctcaaccagttcacatctgcctccttcatccccacatcaccaatgcctggctcacagcagagcttctttctccctgatgtctttattggaaagcctggacccagactggacccctgaccagtatgattacagctacgaggattataatcaggaagagaacaccagtagcacacttacccacgctgagaatcctgactggtactacactgaggaccaagctgatccatgccagcccaacccctgtgaacacggtggggactgcctcgtccatgggagcaccttcacatgcagctgcctggctcctttctctgggaataagtgtcagaaagtgcaaaatacgtgcaaggacaacccatgtggccggggccaatgtctcattacccagagtcctccctactaccgctgtgtctgtaaacacccttacacaggtcccagctgctcccaagtggttcctgtatgcaggccaaacccctgccagaatggggctacctgctcccggcataagcggagatccaagttcacctgtgcctgtcccgaccagttcaaggggaaattctgtgaaataggttctgatgactgctatgttggcgatggctactcttaccgagggaaaatgaataggacagtcaaccagcatgcgtgcctttactggaactcccacctcctcttgcaggagaattacaacatgtttatggaggatgctgaaacccatgggattggggaacacaatttctgcagaaacccagatgcggacgaaaagccctggtgctttattaaagttaccaatgacaaggtgaaatgggaatactgtgatgtctcagcctgctcagcccaggacgttgcctacccagaggaaagccccactgagccatcaaccaagcttccggggtttgactcctgtggaaagactgagatagcagagaggaagatcaagagaatctatggaggctttaagagcacggcgggcaagcacccatggcaggcgtccctccagtcctcgctgcctctgaccatctccatgccccagggccacttctgtggtggggcgctgatccacccctgctgggtgctcactgctgcccactgcaccgacataaaaaccagacatctaaaggtggtgctaggggaccaggacctgaagaaagaagaatttcatgagcagagctttagggtggagaagatattcaagtacagccactacaatgaaagagatgagattccccacaatgatattgcattgctcaagttaaagccagtggatggtcactgtgctctagaatccaaatacgtgaagactgtgtgcttgcctgatgggtcctttccctctgggagtgagtgccacatctctggctggggtgttacagaaacaggaaaagggtcccgccagctcctggatgccaaagtcaagctgattgccaacactttgtgcaactcccgccaactctatgaccacatgattgatgacagtatgatctgtgcaggaaatcttcagaaacctgggcaagacacctgccagggtgactctggaggccccctgacctgtgagaaggacggcacctactacgtctatgggatagtgagctggggcctggagtgtgggaagaggccaggggtctacacccaagttaccaaattcctgaattggatcaaagccaccatcaaaagtgaaagtggcttctaaggtactgtcttctggacctcagagcccactctccttggcaccctgacaccgggaggcctcatggccaacaatggacacctccagagcctccaggggaccacacagtagactatccctactctaagcagagacaactgccacccagcctgggccttcccagaccagcatttgcacaatatcaccaggcttcttctgcctcccttggtaacccaaggaatgatggaatcaacacaacatagtatgtttgctttccttacccaattgtaccttctagaaaatcagtgttcacagagactgcctccaccacaggcatcctgcaaatgcagactccagaatccccagcatcagcgggaaccaccatcacatctttattcctcagcccagacactcgaggcactcaacagaatcagccatccacgtctaggtatcagagaggaccacaaatacaacattctccatctgctttcagagttattattttaataaaggaagatctgggatgggctggtgggccattccagcttgccgaaatcaaagccatctgaagcctgtctctggtgaacaaacttcctctctggcctctcaggaatcagggtggacatggctcacaacagcagggccttcttctttttgacgtgcagaatctcagtggcatctgggttcacctccccactctgatgatctccagcctccactgcttctgccccccgctgctgaaatcaaacataccccaagttaaaatgaagctcccccacccccactcccggccccggttcccacaggacacgctaagaagcacagggagcatttaacaggctcaccctccctttccttttcccctcttctaccctccccaagaaaaagggccttcaaggcaggaatgagaaagcaaagccaatctctcatttagacctggcttctttcttctgaacaaagtagggttcaaaatgcagactgtcatatccagcgagtccctgaccctttctgcgaatgtaacgagcaagcagtcagcacagcctgggctgccctggcccgggattgatgtagccccggtaggtttgcctctgcagaactaatggctgtgacttcagagaaagccctgcaggaagtttaacctgcgtgtcatctgcctggtcatctcagacccatgaaattaggcgccttgtttgagctgcgtttcacacttctttagagctagctgacctttggccaaaaataaactttgaaaagaaa

SEQ ID NO: 141530 - DNA, 2615 bp, Homo sapiens
  Payload ID: 7833
  Gene Symbol: HABP4
  Gene Name: hyaluronan binding protein 4
  Uniprot ID: Q5JVS0
  ENST ID: ENST00000375249
  CDS Start-End: 76-1317
tgggtcctggccgccggcttcgctgagacgcgctcgcgtgggctgccctcccgggcccgcagtggtcgcggcggcatgaagggcgctctggggagtcccgtggctgccgctggcgccgcgatgcaggagagtttcggctgcgtggtggccaaccgcttccatcagctgctggacgacgagtcggacccgttcgacatcctgcgcgaggccgagcgccggcgccagcagcagctgcagcgcaagaggcgcgacgaggcggcggcggcggccggggccggtccccgcggcggcaggagcccagccggggcctcgggccacagagccggcgcgggcggccggagggagtcgcagaaggagcgcaagagcctcccggcgcccgtcgctcagcggcccgatagccccgggggcggcctgcaggcgccgggccagaagcggactcctagaagaggggagcagcaaggatggaatgacagccgtgggccggaggggatgctcgaaagagctgagcggagatcctacagggaataccgaccctatgagacagagaggcaggcagacttcacagctgagaagtttccagatgaaaaaccaggtgataggtttgatcgagacagaccgttgagaggacgtggaggcccgagagggggtatgcgcggcagaggcagaggtggccctgggaacagagtttttgacgcttttgaccagagaggaaagcgagaatttgaaagatatggtgggaatgacaaaatagcagtcagaactgaagacaacatgggtggatgtggagttcgaacctggggatcgggtaaagataccagtgatgtggagccaactgcaccgatggaggaacccacagtggtggaggagtcccagggcaccccggaagaggagtctccagccaaagttcctgagttggaggtagaagaagaaacccaagttcaagagatgactttagatgagtggaaaaatcttcaagaacagaccagaccaaagcctgagtttaacatccggaaaccagaatccactgttccttccaaagccgtggtgattcacaagtcaaaatacagagatgatatggtaaaagatgactatgaggacgattcccatgttttccggaaacccgccaatgacatcacatcccagctggagattaattttggtaacctccctcgtcctgggcgtggagccagaggaggcacccggggaggccggggaaggatcaggagggcagagaactatggacccagagcagaagtggtgatgcaagatgttgcccccaacccagatgacccggaagatttccctgcgctgtcttgaaagagccctgtttcccagcaccgcggagctgcactgcacacctgtggggagacttttccagctgggccaagggagtcagactctaagaacaatagatgttgcttttcccgtgtcatgtaaatttgttgcacttttttgggctgagctgttagaggggcttctccagaggctcgagagcaggccatttcccaagaagatgaagaatggtgactgtgtttttattgaaggaatttcaaatgaagaataatgtttaaaatgtgtatatagagatagtatagactcctccgcggaagcatggagggaaaggaggttgtaaaatagactccatggagactcttaggaagcagtagattcccgggggctgtgcctttagcgttagaggaaacacatagagctggaactgttaatggaaagcagtcacagctgagttttcggagaccaagaaattaaaatacaattgcacttactgtttacttgtaaatgttatcttctctcctggaatattttgagttctggttttcacttaaccaatcatttaaaaatcgctattgtgtagccactggccaccactctgtgacacagaatcagagaaagcgttgatttttaatggtgatttaaactacctcgtggtttctgtgtgtgtgcacacacacatctagtgtttgggtggtttttaggaagaatattaagtatgtgacttcaaaaaccatgttatttaacctgccaatcaaatggaaagggatcatggcaaaagcaaataccgcatccttttcttccgcagaactagagtcagagttcggcagctgcgtacaaaggcctctgccctcggcttgagcaaaagttgtaaataactagtatttattaagcacttataagcagtttttctcacttagtcctggctccagttctagagttcctctttattgcttttggtgaaagtttggggttgggggtacacctcagaggttcagtaattcacctggagtcccaccctgaacagagctggacccagagccacacacgcccgggaacacacactgtgctggggaggaagtgggcctaggagggcctgcaggtccaggcagctgtagagctgctagaagctggggtgttgctctccccgctttctcatagacacagaggtactgtctgcctgttgtcacacagttcatatgctcgcttgagatggaatctgaaccttggtcccaggatctgtgctttttcccactttgccacactgtctaaggtggctttgaactggaacccaagtgcaaataaaggttggtattcgctcctga

SEQ ID NO: 141531 - DNA, 2304 bp, Homo sapiens
  Payload ID: 7833
  Gene Symbol: HABP4
  Gene Name: hyaluronan binding protein 4
  Uniprot ID: Q5JVS0
  ENST ID: ENST00000375251
  CDS Start-End: 80-1006
ggcatgggtcctggccgccggcttcgctgagacgcgctcgcgtgggctgccctcccgggcccgcagtggtcgcggcggcatgaagggcgctctggggagtcccgtggctgccgctggcgccgcgatgcaggagagtttcggctgcgtggtggccaaccgcttccatcagctgctggacgacgagtcggacccgttcgacatcctgcgcgaggccgagcgccggcgccagcagcagctgcagcgcaagaggcgcgacgaggcggcggcggcggccggggccggtccccgcggcggcaggagcccagccggggcctcgggccacagagccggcgcgggcggccggagggagtcgcagaaggagcgcaagagcctcccggcgcccgtcgctcagcggcccgatagccccgggggcggcctgcaggcgccgggccagaagcggactcctagaagaggggagcagcaaggatggaatgacagccgtgggccggaggggatgctcgaaagagctgagcggagatcctacagggaataccgaccctatgagacagagaggcaggcagacttcacagctgagaagtttccagatgaaaaagttcctgagttggaggtagaagaagaaacccaagttcaagagatgactttagatgagtggaaaaatcttcaagaacagaccagaccaaagcctgagtttaacatccggaaaccagaatccactgttccttccaaagccgtggtgattcacaagtcaaaatacagagatgatatggtaaaagatgactatgaggacgattcccatgttttccggaaacccgccaatgacatcacatcccagctggagattaattttggtaacctccctcgtcctgggcgtggagccagaggaggcacccggggaggccggggaaggatcaggagggcagagaactatggacccagagcagaagtggtgatgcaagatgttgcccccaacccagatgacccggaagatttccctgcgctgtcttgaaagagccctgtttcccagcaccgcggagctgcactgcacacctgtggggagacttttccagctgggccaagggagtcagactctaagaacaatagatgttgcttttcccgtgtcatgtaaatttgttgcacttttttgggctgagctgttagaggggcttctccagaggctcgagagcaggccatttcccaagaagatgaagaatggtgactgtgtttttattgaaggaatttcaaatgaagaataatgtttaaaatgtgtatatagagatagtatagactcctccgcggaagcatggagggaaaggaggttgtaaaatagactccatggagactcttaggaagcagtagattcccgggggctgtgcctttagcgttagaggaaacacatagagctggaactgttaatggaaagcagtcacagctgagttttcggagaccaagaaattaaaatacaattgcacttactgtttacttgtaaatgttatcttctctcctggaatattttgagttctggttttcacttaaccaatcatttaaaaatcgctattgtgtagccactggccaccactctgtgacacagaatcagagaaagcgttgatttttaatggtgatttaaactacctcgtggtttctgtgtgtgtgcacacacacatctagtgtttgggtggtttttaggaagaatattaagtatgtgacttcaaaaaccatgttatttaacctgccaatcaaatggaaagggatcatggcaaaagcaaataccgcatccttttcttccgcagaactagagtcagagttcggcagctgcgtacaaaggcctctgccctcggcttgagcaaaagttgtaaataactagtatttattaagcacttataagcagtttttctcacttagtcctggctccagttctagagttcctctttattgcttttggtgaaagtttggggttgggggtacacctcagaggttcagtaattcacctggagtcccaccctgaacagagctggacccagagccacacacgcccgggaacacacactgtgctggggaggaagtgggcctaggagggcctgcaggtccaggcagctgtagagctgctagaagctggggtgttgctctccccgctttctcatagacacagaggtactgtctgcctgttgtcacacagttcatatgctcgcttgagatggaatctgaaccttggtcccaggatctgtgctttttcccactttgccacactgtctaaggtggctttgaactggaacccaagtgcaaataaaggttggtattcgctcctga

SEQ ID NO: 141532 - DNA, 2087 bp, Homo sapiens
  Payload ID: 7834
  Gene Symbol: HAS1
  Gene Name: hyaluronan synthase 1
  Uniprot ID: Q92839
  ENST ID: ENST00000222115
  CDS Start-End: 36-1772
cggagagaagagagagcccggccagacccactgcgatgagacagcaggacgcgcccaagcccactcctgcagcctgccgctgctccggcctggcccggagggtgctgaccatcgccttcgccctgctcatcctgggcctcatgacctgggcctacgccgccggggtgccgctggcctccgatcgctacggcctcctggccttcggcctctacggggccttcctttcagcgcacctggtggcgcagagcctcttcgcgtacctggagcaccggcgggtggcggcggcggcgcgggggccgctggatgcagccaccgcgcgcagtgtggcgctgaccatctccgcctaccaggaggaccccgcgtacctgcgccagtgcctggcgtccgcccgcgccctgctgtacccgcgcgcgcggctgcgcgtcctcatggtggtggatggcaaccgcgccgaggacctctacatggtcgacatgttccgcgaggtcttcgctgacgaggaccccgccacgtacgtgtgggacggcaactaccaccagccctgggaacccgcggcggcgggcgcggtgggcgccggagcctatcgggaggtggaggcggaggatcctgggcggctggcagtggaggcgctggtgaggactcgcaggtgcgtgtgcgtggcgcagcgctggggcggcaagcgcgaggtcatgtacacagccttcaaggcgctcggagattcggtggactacgtgcaggtctgtgactcggacacaaggttggaccccatggcactgctggagctcgtgcgggtactggacgaggacccccgggtaggggctgttggtggggacgtgcggatccttaaccctctggactcctgggtcagcttcctaagcagcctgcgatactgggtagccttcaatgtggagcgggcttgtcagagctacttccactgtgtatcctgcatcagcggtcctctaggcctatataggaataacctcttgcagcagtttcttgaggcctggtacaaccagaagttcctgggtacccactgtacttttggggatgaccggcacctcaccaaccgcatgctcagcatgggttatgctaccaagtacacctccaggtcccgctgctactcagagacgccctcgtccttcctgcggtggctgagccagcagacacgctggtccaagtcgtacttccgtgagtggctgtacaacgcgctctggtggcaccggcaccatgcgtggatgacctacgaggcggtggtctccggcctgttccccttcttcgtggcggccactgtgctgcgtctgttctacgcgggccgcccttgggcgctgctgtgggtgctgctgtgcgtgcagggcgtggcactggccaaggcggccttcgcggcctggctgcggggctgcctgcgcatggtgcttctgtcgctctacgcgcccctctacatgtgtggcctcctgcctgccaagttcctggcgctagtcaccatgaaccagagtggctggggcacctcgggccggcggaagctggccgctaactacgtccctctgctgcccctggcgctctgggcgctgctgctgcttgggggcctggtccgcagcgtagcacacgaggccagggccgactggagcggcccttcccgcgcagccgaggcctaccacttggccgcgggggccggcgcctacgtgggctactgggtggccatgttgacgctgtactgggtgggcgtgcggaggctttgccggcggcggaccgggggctaccgcgtccaggtgtgagtccagccacgcggatgccgcctcaagggtcttcaggggaggccagaggagagctgctgggccccgagccacgaacttgctgggtggttctctgggcctcagtttccctcctctgcaaaacgagggggtcagcccaagattcttcagtctggactatattgggactgggacttctgggtctccagggagggtatttattggtcagggtgtgggatctgaggagtggagggaaagggtcctgctttctcctcgttcttatttaatctccatttctactgtgtgatcaggatgtaataaagaattttatttattttc

SEQ ID NO: 141533 - DNA, 2110 bp, Homo sapiens
  Payload ID: 7834
  Gene Symbol: HAS1
  Gene Name: hyaluronan synthase 1
  ENST ID: ENST00000540069
  CDS Start-End: 62-1795
gccacagagaggctgggagagcaagccggagagaagagagagcccggccagacccactgcgatgagacaggacgcgcccaagcccactcctgcagcctgccgctgctccggcctggcccggagggtgctgaccatcgccttcgccctgctcatcctgggcctcatgacctgggcctacgccgccggggtgccgctggcctccgatcgctacggcctcctggccttcggcctctacggggccttcctttcagcgcacctggtggcgcagagcctcttcgcgtacctggagcaccggcgggtggcggcggcggcgcgggggccgctggatgcagccaccgcgcgcagtgtggcgctgaccatctccgcctaccaggaggaccccgcgtacctgcgccagtgcctggcgtccgcccgcgccctgctgtacccgcgcgcgcggctgcgcgtcctcatggtggtggatggcaaccgcgccgaggacctctacatggtcgacatgttccgcgaggtcttcgctgacgaggaccccgccacgtacgtgtgggacggcaactaccaccagccctgggaacccgcggcggcgggcgcggtgggcgccggagcctatcgggaggtggaggcggaggatcctgggcggctggcagtggaggcgctggtgaggactcgcaggtgcgtgtgcgtggcgcagcgctggggcggcaagcgcgaggtcatgtacacagccttcaaggcgctcggagattcggtggactacgtgcaggtctgtgactcggacacaaggttggaccccatggcactgctggagctcgtgcgggtactggacgaggacccccgggtaggggctgttggtggggacgtgcggatccttaaccctctggactcctgggtcagcttcctaagcagcctgcgatactgggtagccttcaatgtggagcgggcttgtcagagctacttccactgtgtatcctgcatcagcggtcctctaggcctatataggaataacctcttgcagcagtttcttgaggcctggtacaaccagaagttcctgggtacccactgtacttttggggatgaccggcacctcaccaaccgcatgctcagcatgggttatgctaccaagtacacctccaggtcccgctgctactcagagacgccctcgtccttcctgcggtggctgagccagcagacacgctggtccaagtcgtacttccgtgagtggctgtacaacgcgctctggtggcaccggcaccatgcgtggatgacctacgaggcggtggtctccggcctgttccccttcttcgtggcggccactgtgctgcgtctgttctacgcgggccgcccttgggcgctgctgtgggtgctgctgtgcgtgcagggcgtggcactggccaaggcggccttcgcggcctggctgcggggctgcctgcgcatggtgcttctgtcgctctacgcgcccctctacatgtgtggcctcctgcctgccaagttcctggcgctagtcaccatgaaccagagtggctggggcacctcgggccggcggaagctggccgctaactacgtccctctgctgcccctggcgctctgggcgctgctgctgcttgggggcctggtccgcagcgtagcacacgaggccagggccgactggagcggcccttcccgcgcagccgaggcctaccacttggccgcgggggccggcgcctacgtgggctactgggtggccatgttgacgctgtactgggtgggcgtgcggaggctttgccggcggcggaccgggggctaccgcgtccaggtgtgagtccagccacgcggatgccgcctcaagggtcttcaggggaggccagaggagagctgctgggccccgagccacgaacttgctgggtggttctctgggcctcagtttccctcctctgcaaaacgagggggtcagcccaagattcttcagtctggactatattgggactgggacttctgggtctccagggagggtatttattggtcagggtgtgggatctgaggagtggagggaaagggtcctgctttctcctcgttcttatttaatctccatttctactgtgtgatcaggatgtaataaagaattttatttattttc

SEQ ID NO: 141534 - DNA, 760 bp, Homo sapiens
  Payload ID: 7834
  Gene Symbol: HAS1
  Gene Name: hyaluronan synthase 1
  ENST ID: ENST00000594621
  CDS Start-End: 1-645
atgttccgcgaggtcttcgctgacgaggaccccgccacgtacgtgtgggacggcaactaccaccagccctgggaacccgcggcggcgggcgcggtgggcgccggagcctatcgggaggtggaggcggaggatcctgggcggctggcagtggaggcgctggtgaggactcgcaggtgcgtgtgcgtggcgcagcgctggggcggcaagcgcgaggtcatgtacacagccttcaaggcgctcggagattcggtggactacgtgcaggtctgtgactcggacacaaggttggaccccatggcactgctggagctcgtgcgggtactggacgaggacccccgggtaggggctgttggtggggacgtgcggatccttaaccctctggactcctgggtcagcttcctaagcagcctgcgatactgggtagccttcaatgtggagcgggcttgtcagagctacttccactgtgtatcctgcatcagcggtcctctagaatcctgcccaggccccagggagcacgcgatgatgccctcattcctcgcccccgtgcaggtacacctccaggtcccgctgctactcagagacgccctcgtccttcctgcggtggctgagccagcagacacgctggtccaagtcgtacttccgtgagtggctgtacaacgcgctctggtggcaccggcaccatgcgtggatgacctacgaggcggtggtctccggcctgttccccttcttcgtggcggccactgtgctgcgtctgttctac

SEQ ID NO: 141535 - DNA, 654 bp, Homo sapiens
  Payload ID: 7834
  Gene Symbol: HAS1
  Gene Name: hyaluronan synthase 1
  ENST ID: ENST00000601667
  CDS Start-End: 1-421
gcgcgaggtcatgtacacagccttcaaggcgctcggagattcggtggactacgtgcaggtctgtgactcggacacaaggttggaccccatggcactgctggagctcgtgcgggtactggacgaggacccccgggtaggggctgttggtggggacgtgcggatccttaaccctctggactcctgggtcagcttcctaagcagcctgcgatactgggtagccttcaatgtggagcgggcttgtcagagctacttccactgtgtatcctgcatcagcggtcctctaggcctatataggaataacctcttgcagcagtttcttgaggcctggtacaaccagaagttcctgggtacccactgtacttttggggatgaccggcacctcaccaaccgcatgctcagcatgggttatgctaccaagtaagctgaggggaccaggtggtcgggtacacctccaggtcccgctgctactcagagacgccctcgtccttcctgcggtggctgagccagcagacacgctggtccaagtcgtacttccgtgagtggctgtacaacgcgctctggtggcaccggcaccatgcgtggatgacctacgaggcggtggtctccggcctgttccccttcttcgtggcggccactgtgctgcgtctgttctac

SEQ ID NO: 141536 - DNA, 2086 bp, Homo sapiens
  Payload ID: 7834
  Gene Symbol: HAS1
  Gene Name: hyaluronan synthase 1
  ENST ID: ENST00000601714
  CDS Start-End: 14-1771
gcgcccgggactcatgccccttcctttcccctctcgctcccagcaggacgcgcccaagcccactcctgcagcctgccgctgctccggcctggcccggagggtgctgaccatcgccttcgccctgctcatcctgggcctcatgacctgggcctacgccgccggggtgccgctggcctccgatcgctacggcctcctggccttcggcctctacggggccttcctttcagcgcacctggtggcgcagagcctcttcgcgtacctggagcaccggcgggtggcggcggcggcgcgggggccgctggatgcagccaccgcgcgcagtgtggcgctgaccatctccgcctaccaggaggaccccgcgtacctgcgccagtgcctggcgtccgcccgcgccctgctgtacccgcgcgcgcggctgcgcgtcctcatggtggtggatggcaaccgcgccgaggacctctacatggtcgacatgttccgcgaggtcttcgctgacgaggaccccgccacgtacgtgtgggacggcaactaccaccagccctgggaacccgcggcggcgggcgcggtgggcgccggagcctatcgggaggtggaggcggaggatcctgggcggctggcagtggaggcgctggtgaggactcgcaggtgcgtgtgcgtggcgcagcgctggggcggcaagcgcgaggtcatgtacacagccttcaaggcgctcggagattcggtggactacgtgcaggtctgtgactcggacacaaggttggaccccatggcactgctggagctcgtgcgggtactggacgaggacccccgggtaggggctgttggtggggacgtgcggatccttaaccctctggactcctgggtcagcttcctaagcagcctgcgatactgggtagccttcaatgtggagcgggcttgtcagagctacttccactgtgtatcctgcatcagcggtcctctaggcctatataggaataacctcttgcagcagtttcttgaggcctggtacaaccagaagttcctgggtacccactgtacttttggggatgaccggcacctcaccaaccgcatgctcagcatgggttatgctaccaagtacacctccaggtcccgctgctactcagagacgccctcgtccttcctgcggtggctgagccagcagacacgctggtccaagtcgtacttccgtgagtggctgtacaacgcgctctggtggcaccggcaccatgcgtggatgacctacgaggcggtggtctccggcctgttccccttcttcgtggcggccactgtgctgcgtctgttctacgcgggccgcccttgggcgctgctgtgggtgctgctgtgcgtgcagggcgtggcactggccaaggcggccttcgcggcctggctgcggggctgcctgcgcatggtgcttctgtcgctctacgcgcccctctacatgtgtggcctcctgcctgccaagttcctggcgctagtcaccatgaaccagagtggctggggcacctcgggccggcggaagctggccgctaactacgtccctctgctgcccctggcgctctgggcgctgctgctgcttgggggcctggtccgcagcgtagcacacgaggccagggccgactggagcggcccttcccgcgcagccgaggcctaccacttggccgcgggggccggcgcctacgtgggctactgggtggccatgttgacgctgtactgggtgggcgtgcggaggctttgccggcggcggaccgggggctaccgcgtccaggtgtgagtccagccacgcggatgccgcctcaagggtcttcaggggaggccagaggagagctgctgggccccgagccacgaacttgctgggtggttctctgggcctcagtttccctcctctgcaaaacgagggggtcagcccaagattcttcagtctggactatattgggactgggacttctgggtctccagggagggtatttattggtcagggtgtgggatctgaggagtggagggaaagggtcctgctttctcctcgttcttatttaatctccatttctactgtgtgatcaggatgtaataaagaattttatttattttc

SEQ ID NO: 141537 - DNA, 4190 bp, Homo sapiens
  Payload ID: 7835
  Gene Symbol: HAS2
  Gene Name: hyaluronan synthase 2
  Uniprot ID: Q92819
  ENST ID: ENST00000303924
  CDS Start-End: 539-2197
gaagtcaagacgtctggaaagaattacccagtcctggcttcgagcagcccattgaaccagagacttgaaacagccccagccaaagacttttctcccaattctgcgcttcctgggttctgctgagtcttccacaggctttttttttttttttttttttttttaagacgaaaaagagattttctgttatcgggggcagaaagactgaagcccaaaaaaaaaaaaaaaaaaaaaagaaaagaaaagaaaaaagaaaagttaatttatttttaaagcataatttttttaagaattagactgaagtgcaacggaaacataaagagaatattagtgaaattattttttaaagtggggaagaatcaaacatttaagactcccctatcctttttaaatgttgtttttaaatttcttattttttttggccggtcgtctcaaattcatctgatctcttattacctcaattttggaaactgcccgccaccgaccctccgggaccacacagacaggctgaggacgactttatgaccaagagctgaacaagatgcattgtgagaggtttctatgtatcctgagaataattggaaccacactctttggagtctctctcctccttggaatcacagctgcttatattgttggctaccagtttatccaaacggataattactatttctcttttggactgtatggtgcctttttggcatcacacctcatcatccaaagcctgtttgcctttttggagcaccgaaaaatgaaaaaatccctagaaacccccataaagttgaacaaaacagttgccctttgcatcgctgcctatcaagaagatccagactacttaaggaaatgtttgcaatctgtgaaaaggctaacctaccctgggattaaagttgtcatggtcatagatgggaactcagaagatgacctttacatgatggacatcttcagtgaagtcatgggcagagacaaatcagccacttatatctggaagaacaacttccacgaaaagggtcccggtgagacagatgagtcacataaagaaagctcgcaacacgtaacgcaattggtcttgtccaacaaaagtatctgcatcatgcaaaaatggggtggaaaaagagaagtcatgtacacagccttcagagcactgggacgaagtgtggattatgtacaggtttgtgattcagacactatgcttgacccagcctcatctgtggagatggtaaaagttttagaagaagatcccatggttggaggtgttgggggagatgtccagattttaaacaagtacgattcctggatctcattcctcagcagtgtaagatattggatggcttttaatatagaaagggcctgtcagtcttattttgggtgtgttcagtgcattagtggacctctgggaatgtacagaaactccttgttgcatgagtttgtggaagattggtacaatcaagaatttatgggcaaccaatgtagctttggtgatgacaggcatctcacgaaccgggtgctgagcctgggctatgcaacaaaatacacagctcgatctaagtgccttactgaaacacctatagaatatctcagatggctaaaccagcagacccgttggagcaagtcctacttccgagaatggctgtacaatgcaatgtggtttcacaaacatcacttgtggatgacctacgaagcgattatcactggattctttcctttctttctcattgccacagtaatccagctcttctaccggggtaaaatttggaacattctcctcttcttgttaactgtccagctagtaggtctcataaaatcatcttttgccagctgccttagaggaaatatcgtcatggtcttcatgtctctctactcagtgttatacatgtcgagtttacttcccgccaagatgtttgcaattgcaacaataaacaaagctgggtggggcacatcaggaaggaaaaccattgttgttaatttcataggactcattccagtatcagtttggtttacaatcctcctgggtggtgtgattttcaccatttataaggagtctaaaaggccattttcagaatccaaacagacagttctaattgttggaacgttgctctatgcatgctattgggtcatgcttttgacgctgtatgtagttctcatcaataagtgtggcaggcggaagaagggacaacaatatgacatggtgcttgatgtatgatcttccatgttttgacgtttgcagtcacacacaacaccttagttcctctaggggctgtacagtattgtggcatcagataatgccaccaaaggagacatatcactgctgctgggacttgaacaaagacatttatatgggtttattttcattctgccaaagtaaaacaatacatcaacaagaagaaactcagatttaacctgttatttctatgaaaatgggatgaattctttgtttatgcactttttccttactgtgcatccgcctgaaagtgttttgccctatatacctcactagccatgctttatgtgggttatcatggaagaaaaggattttggaaactcaaggaaaagttctttcaacctatacaacctaacttatggactgttttgatagatgataattttttttttttaggaaggattttctttttaactttaccaaatgaaatgccaaaggaagttttaaaggccgttggctgtgctgtattttgatataattgtactgtgtttttaaattttgtatgccaatcttaaagacaaattttgcatattctctattttacttttctgccaaaataaacctgttcttccttttttaaaataaaataagttcttaaaaaatttatacttaaaaaatcctgcccaaaatgtgaagcttggttgactgatgttcatgatagaaagaataaaatgtttctctctctctaccttttaaaattgaatagtttatttctgtgaaagaagtatttaaactttcaatattttaactttttgtttttatttcttttagaaaaggccaatatacctatcacactttggaagtaaaaatacacactttcgtgtgtacctaaaaaaaaaatcgttgaaaatcaaggccaaaggtagtgcaattttttcattaagatttaaaaaaaagggaatgatagtctttgaaagaaaacagtaggcatccagcactggacaaaacatgggtatcaaagatgaataatctttggagattctggcagtgttttcccagaacaagtcaagtggaaagtggagaaattatctgtataattttggacacatacaatgcagtttatcaaaggttttgttctgtggcctgaatttactgggtcctacctacacattgaacatgttttgcctgtcttttttttttttttcaacttgccagttcactttacatgttagtataatgtttacacgggtgagttggataaattataaaacatataaattcaaaattggcagatagaatcaccaagtatctatcctcttttactttcaaatgaggaattttgtttttctgaattacacagatcatcacttcctatttcctgttctggacctgtataaaaatgtctacacagtagaagtgacatcaaggtttaataagtatatcaatgattggcacatataaaaattgttgaaccacatactctgaacttggctaatttagttactgcaaggcctccattatccagttttattttttacacgattgaccttgccttgtagctggtgctgtgtagacctgtgttgaaaacacaatcggaatatatgaataattgaataaacagcattatggtgaggcagagacacatggagaagtgttaaaaaaaaaatgggcttcctgcctttctgcctcttttttatgcagtcatctatgttacatctatcctgcctaagaaaaagctgcacatcctaccttcagagtacaaaaaggtacatctgagactcaagactctcactgattggagagcttgtggaaaacaaaacacaccatgccaataaatgagatgaaaacttgagtttgcctttttaactatttatgttctaagttaagctttgataacattcaaatgtcaaattctctcattcttataaaaagttgaattaattgcctgtatttattttagcaattattcaatgtatttccagtataggatgtatagtataattaattttttgtaaataaaatatttttgataaga

SEQ ID NO: 141538 - DNA, 1163 bp, Homo sapiens
  Payload ID: 7836
  Gene Symbol: HAS3
  Gene Name: hyaluronan synthase 3
  Uniprot ID: O00219
  ENST ID: ENST00000219322
  CDS Start-End: 61-906
ggaggggcatggagccgccgcgggcctgctgagctccggagcgcggcagccggcggcacgatgccggtgcagctgacgacagccctgcgtgtggtgggcaccagcctgtttgccctggcagtgctgggtggcatcctggcagcctatgtgacgggctaccagttcatccacacggaaaagcactacctgtccttcggcctgtacggcgccatcctgggcctgcacctgctcattcagagcctttttgccttcctggagcaccggcgcatgcgacgtgccggccaggccctgaagctgccctccccgcggcggggctcggtggcactgtgcattgccgcataccaggaggaccctgactacttgcgcaagtgcctgcgctcggcccagcgcatctccttccctgacctcaaggtggtcatggtggtggatggcaaccgccaggaggacgcctacatgctggacatcttccacgaggtgctgggcggcaccgagcaggccggcttctttgtgtggcgcagcaacttccatgaggcaggcgagggtgagacggaggccagcctgcaggagggcatggaccgtgtgcgggatgtggtgcgggccagcaccttctcgtgcatcatgcagaagtggggaggcaagcgcgaggtcatgtacacggccttcaaggccctcggcgattcggtggactacatccaggtgtgcgactctgacactgtgctggatccagcctgcaccatcgagatgcttcgagtcctggaggaggatccccaagtagggggagtcgggggagatgtccagcccccagggaaaggtatggcagtagaggatgaccaggtccaagctgcccaggtcagagctacggaagcatggtccgttcaccaacgccacgtttctagagagcagtgagctgattctccaatggtgagcaggggactacatgtgaactgggacctgcaggccaatgtatccctgaggaaaagtccacaagaacaattcaagaaactagtaagaaacaatgggcagaaagctgtgggacgaaagcacagcaggcttctgggaggctggagatcctttctctcaagggcaggattattcccacctgccacagttcacatgccacaaataacatctcaccttcagtcaagaaaaacgcaaaggaaaaa

SEQ ID NO: 141539 - DNA, 4220 bp, Homo sapiens
  Payload ID: 7836
  Gene Symbol: HAS3
  Gene Name: hyaluronan synthase 3
  Uniprot ID: O00219
  ENST ID: ENST00000306560
  CDS Start-End: 157-1818
gagtgcgttcgcggctgctttgacctggtgggcgccgcctccggcactgcaccgaggcggggcgccagcgcccaggttgctgggctggccttggcgcccccttcccctacccagagcgcaggcaggcaggggggtcccgccgcgccccttcagcatatgccggtgcagctgacgacagccctgcgtgtggtgggcaccagcctgtttgccctggcagtgctgggtggcatcctggcagcctatgtgacgggctaccagttcatccacacggaaaagcactacctgtccttcggcctgtacggcgccatcctgggcctgcacctgctcattcagagcctttttgccttcctggagcaccggcgcatgcgacgtgccggccaggccctgaagctgccctccccgcggcggggctcggtggcactgtgcattgccgcataccaggaggaccctgactacttgcgcaagtgcctgcgctcggcccagcgcatctccttccctgacctcaaggtggtcatggtggtggatggcaaccgccaggaggacgcctacatgctggacatcttccacgaggtgctgggcggcaccgagcaggccggcttctttgtgtggcgcagcaacttccatgaggcaggcgagggtgagacggaggccagcctgcaggagggcatggaccgtgtgcgggatgtggtgcgggccagcaccttctcgtgcatcatgcagaagtggggaggcaagcgcgaggtcatgtacacggccttcaaggccctcggcgattcggtggactacatccaggtgtgcgactctgacactgtgctggatccagcctgcaccatcgagatgcttcgagtcctggaggaggatccccaagtagggggagtcgggggagatgtccagatcctcaacaagtacgactcatggatttccttcctgagcagcgtgcggtactggatggccttcaacgtggagcgggcctgccagtcctactttggctgtgtgcagtgtattagtgggcccttgggcatgtaccgcaacagcctcctccagcagttcctggaggactggtaccatcagaagttcctaggcagcaagtgcagcttcggggatgaccggcacctcaccaaccgagtcctgagccttggctaccgaactaagtataccgcgcgctccaagtgcctcacagagacccccactaagtacctccggtggctcaaccagcaaacccgctggagcaagtcttacttccgggagtggctctacaactctctgtggttccataagcaccacctctggatgacctacgagtcagtggtcacgggtttcttccccttcttcctcattgccacggttatacagcttttctaccggggccgcatctggaacattctcctcttcctgctgacggtgcagctggtgggcattatcaaggccacctacgcctgcttccttcggggcaatgcagagatgatcttcatgtccctctactccctcctctatatgtccagccttctgccggccaagatctttgccattgctaccatcaacaaatctggctggggcacctctggccgaaaaaccattgtggtgaacttcattggcctcattcctgtgtccatctgggtggcagttctcctgggagggctggcctacacagcttattgccaggacctgttcagtgagacagagctagccttccttgtctctggggctatactgtatggctgctactgggtggccctcctcatgctatatctggccatcatcgcccggcgatgtgggaagaagccggagcagtacagcttggcttttgctgaggtgtgacatggcccccaagcagagcgggtaaagtgcaatgggtaagggagggaaggggaatggaagagaaaagacagggtgggagggaggagggagtgctgtgttttagtctcttaatggtccaaaggacaaatctaaaatgcaaagaacggtgatgtagtatggcctgacagctctgtttagaggaggcaacactgatcccccagatgcagggctgcaggggattctgtgttttcagactgcctgtctgcttgcatctgcacataggcagtagcctcctcctgggctccagagggcactcagaagttgtgctaaaccaagttaagtcccattcagtggcaacttgtgataggtacctgagtgacggcaacctgcggaaggaggttctcccagcccatctgaacacaaccagaggtggcaggagaatttctactgagcgagctgggccggttagtgtatgtcacccccaccccacccctaagtagtcatcaatgcaataagattgcgcctgagatacaaggcccagaagcctgatctttgggcatcagaaaacagggtccaggaatggtgctttatgtgagataccccactccacatcaacattccagggatgagccaaaccagcagggagttagcactgaactgcttttaaaagtgcacattaaaaaggaaagtttgccaggaggaacaaagagattgtggtggtgctaaaggaggccataagctacacagaggccttgggtgttccacctggaaactgctcagacgtctagatgggttcttagcttgtctgtgatctctgctggggagataaaaagattaagccccaacatgttcagaaaagaagtgaagtcttgggtattttaacctgtatactcttgaattcctctcaaattcagctctgatctgaggctaagacacactccccacttcactttcttcaaagccacattttttgaggtatcactgcagtcacctcttctaccctcatcatcataggtaaggttttcaaggtggcaattggggcggagccccggctcttatagaagcttcagcaggaggcaagcgtgttctcagcacatatgggaactatgaggagcctctgatcaaattggctacaatcttggagctgcttggacggattccttggcagccgggttagcatgtgtgactttcaggctactgttcttgacaatcatctccaatggaaagcttttcagtgttcccaaagtgaactctcaaatccaaaatggttatctttgagaccatccattctcctcagtggcttctccagggaattcttacagccaagttgtgacagtcactgcatttgcctgcttctttccagaaaccaaactaggagatgaaactggttcctacatcctaaggttcttgctttctctctcatgcctcctgaggctgtttttggctgttttccctctgctgcttttggggaatgaggggaagccattttccagtgacttgcaatccaggctgttctcagcgttttgagtttaaaacctgggatcctgactaagcctttgacttaagggttgcttgcttgccctccaaatgtcctttctcagaggggccagctaacccgtgcagaaccagcactaaggtggacagcagacaagagggcaagcctctagtgtaccaagtgcttcctacaaagacgcaaggtgtgctctgagccacagatgggcaaaccctggtgctttccttcatctcccacgaactcaagggttttccaggtgtagctaacagttgccacatcacacagacctcgagtttctggtaagactgctggttgacatcagacccaacccatgaaggctggaaggcagcaggcatttgctaaggcagctgatccaggcaatcgttctgctggccaagaagttaaactattttgagcattagaatggaggaaatccggtcagccaagtgcagagttcagacttcgctaagggcttgtttttcttcagcatttacttgaagattaatgtaggatgacaggctctcctggctgtcctaccatcagctctgccttgcactgtggtcgtcaactttcctcaaatcaaaaacaggcaggtacaggtagtgggctcacaacgtttgacctcgactggtttttctaagttattttgtacatttttcagcagcaaaaccaaactgggtcttcagctttatccccgtttcttgcaagggaagagcctttatacaattggacgcattttggtttttcctcattgagaattcaaatcctcttttgtattgtttctacaataatttgtaaacatatttatttttacctgcttttttttttttttttaattttcaggtcaagttttttatactgcacttatttgtcaaaataaagattctcacatatgccggttatctcgaaa

SEQ ID NO: 141540 - DNA, 2170 bp, Homo sapiens
  Payload ID: 7836
  Gene Symbol: HAS3
  Gene Name: hyaluronan synthase 3
  Uniprot ID: O00219
  ENST ID: ENST00000569188
  CDS Start-End: 225-1886
cttaaagtcatcagcgccccactgcggaattcaaagctaagctgtcacaattgttaacaccttctttgaccagcctttttacatttgacaattctcttcagcgcctctttcctgccagcaggaaggttttgctgccttggctttcgggagccccctagacagcgaactgccccttcgcgtgcagaagtcggggaagagtgctctcagctcgccttccttgcaggatgccggtgcagctgacgacagccctgcgtgtggtgggcaccagcctgtttgccctggcagtgctgggtggcatcctggcagcctatgtgacgggctaccagttcatccacacggaaaagcactacctgtccttcggcctgtacggcgccatcctgggcctgcacctgctcattcagagcctttttgccttcctggagcaccggcgcatgcgacgtgccggccaggccctgaagctgccctccccgcggcggggctcggtggcactgtgcattgccgcataccaggaggaccctgactacttgcgcaagtgcctgcgctcggcccagcgcatctccttccctgacctcaaggtggtcatggtggtggatggcaaccgccaggaggacgcctacatgctggacatcttccacgaggtgctgggcggcaccgagcaggccggcttctttgtgtggcgcagcaacttccatgaggcaggcgagggtgagacggaggccagcctgcaggagggcatggaccgtgtgcgggatgtggtgcgggccagcaccttctcgtgcatcatgcagaagtggggaggcaagcgcgaggtcatgtacacggccttcaaggccctcggcgattcggtggactacatccaggtgtgcgactctgacactgtgctggatccagcctgcaccatcgagatgcttcgagtcctggaggaggatccccaagtagggggagtcgggggagatgtccagatcctcaacaagtacgactcatggatttccttcctgagcagcgtgcggtactggatggccttcaacgtggagcgggcctgccagtcctactttggctgtgtgcagtgtattagtgggcccttgggcatgtaccgcaacagcctcctccagcagttcctggaggactggtaccatcagaagttcctaggcagcaagtgcagcttcggggatgaccggcacctcaccaaccgagtcctgagccttggctaccgaactaagtataccgcgcgctccaagtgcctcacagagacccccactaagtacctccggtggctcaaccagcaaacccgctggagcaagtcttacttccgggagtggctctacaactctctgtggttccataagcaccacctctggatgacctacgagtcagtggtcacgggtttcttccccttcttcctcattgccacggttatacagcttttctaccggggccgcatctggaacattctcctcttcctgctgacggtgcagctggtgggcattatcaaggccacctacgcctgcttccttcggggcaatgcagagatgatcttcatgtccctctactccctcctctatatgtccagccttctgccggccaagatctttgccattgctaccatcaacaaatctggctggggcacctctggccgaaaaaccattgtggtgaacttcattggcctcattcctgtgtccatctgggtggcagttctcctgggagggctggcctacacagcttattgccaggacctgttcagtgagacagagctagccttccttgtctctggggctatactgtatggctgctactgggtggccctcctcatgctatatctggccatcatcgcccggcgatgtgggaagaagccggagcagtacagcttggcttttgctgaggtgtgacatggcccccaagcagagcgggtaaagtgcaatgggtaagggagggaaggggaatggaagagaaaagacagggtgggagggaggagggagtgctgtgttttagtctcttaatggtccaaaggacaaatctaaaatgcaaagaacggtgatgtagtatggcctgacagctctgtttagaggaggcaacactgatcccccagatgcagggctgcaggggattctgtgttttcagactgcctgtctgcttgcatctgcacataggcagtagcctcctcctgggctcc

SEQ ID NO: 141541 - DNA, 900 bp, Homo sapiens
  Payload ID: 7836
  Gene Symbol: HAS3
  Gene Name: hyaluronan synthase 3
  ENST ID: ENST00000566118
  CDS Start-End: 108-900
aatgaattaggaggcggacgccggtgcggggctccaggctggctggggtacccctcccccgcaccttctacgacctcccgggggtttgcacctgtccgggcaccaagatgccggtgcagctgacgacagccctgcgtgtggtgggcaccagcctgtttgccctggcagtgctgggtggcatcctggcagcctatgtgacgggctaccagttcatccacacggaaaagcactacctgtccttcggcctgtacggcgccatcctgggcctgcacctgctcattcagagcctttttgccttcctggagcaccggcgcatgcgacgtgccggccaggccctgaagctgccctccccgcggcggggctcggtggcactgtgcattgccgcataccaggaggaccctgactacttgcgcaagtgcctgcgctcggcccagcgcatctccttccctgacctcaaggtggtcatggtggtggatggcaaccgccaggaggacgcctacatgctggacatcttccacgaggtgctgggcggcaccgagcaggccggcttctttgtgtggcgcagcaacttccatgaggcaggcgagggtgagacggaggccagcctgcaggagggcatggaccgtgtgcgggatgtggtgcgggccagcaccttctcgtgcatcatgcagaagtggggaggcaagcgcgaggtcatgtacacggccttcaaggccctcggcgattcggtggactacatccaggtgtgcgactctgacactgtgctggatccagcctgcaccatcgagatgcttcgagtcctggaggaggatccccaagtagggggagtcgggggagatgtccagatcctcaacaagtacgactcatggatttccttcctgagcagcgtgcggtactgga

SEQ ID NO: 141542 - DNA, 2872 bp, Homo sapiens
  Payload ID: 7837
  Gene Symbol: HMMR
  Gene Name: hyaluronan-mediated motility receptor (RHAMM)
  Uniprot ID: O75330
  ENST ID: ENST00000353866
  CDS Start-End: 328-2457
gggaagtgcgcttgcgcaaatgctaggttacacttgagtaactccgggaatgactgggtgggtggggcggggaacagtaacggtctcctattggatggcagcctaaactcgcaggccagctaattggacgcaatcagaacccagcattctttcttcgtgttcctgtgcgggattggtgtgcccaggggtttggctttccaattggctaacgccggggtgggtggggaatgtggggagatttgaatttgaaaccggtagggagtgataatccgcattcagttgtcgaggagtgccagtcaccttcagtttctggagctggccgtcaacatgtcctttcctaaggcgcccttgaaacgattcaatgacccttctggttgtgcaccatctccaggtgcttatgatgttaaaactttagaagtattgaaaggaccagtatcctttcagaaatcacaaagatttaaacaacaaaaagaatctaaacaaaatcttaatgttgacaaagatactaccttgcctgcttcagctagaaaagttaagtcttcggaatcaaagattcgtgttcttctacaggaacgtggtgcccaggacaggcggatccaggatctggaaactgagttggaaaagatggaagcaaggctaaatgctgcactaagggaaaaaacatctctctctgcaaataatgctacactggaaaaacaacttattgaattgaccaggactaatgaactactaaaatctaagttttctgaaaatggtaaccagaagaatttgagaattctaagcttggagttgatgaaacttagaaacaaaagagaaacaaagatgaggggtatgatggctaagcaagaaggcatggagatgaagctgcaggtcacccaaaggagtctcgaagagtctcaagggaaaatagcccaactggagggaaaacttgtttcaatagagaaagaaaagattgatgaaaaatctgaaacagaaaaactcttggaatacatcgaagaaattagttgtgcttcagatcaagtggaaaaatacaagctagatattgcccagttagaagaaaatttgaaagagaagaatgatgaaattttaagccttaagcagtctcttgaggagaatattgttatattatctaaacaagtagaagatctaaatgtgaaatgtcagctgcttgaaaaagaaaaagaagaccatgtcaacaggaatagagaacacaacgaaaatctaaatgcagagatgcaaaacttaaaacagaagtttattcttgaacaacaggaacgtgaaaagcttcaacaaaaagaattacaaattgattcacttctgcaacaagagaaagaattatcttcgagtcttcatcagaagctctgttcttttcaagaggaaatggttaaagagaagaatctgtttgaggaagaattaaagcaaacactggatgagcttgataaattacagcaaaaggaggaacaagctgaaaggctggtcaagcaattggaagaggaagcaaaatctagagctgaagaattaaaactcctagaagaaaagctgaaagggaaggaggctgaactggagaaaagtagtgctgctcatacccaggccaccctgcttttgcaggaaaagtatgacagtatggtgcaaagccttgaagatgttactgctcaatttgaaagctataaagcgttaacagccagtgagatagaagatcttaagctggagaactcatcattacaggaaaaagcggccaaggctgggaaaaatgcagaggatgttcagcatcagattttggcaactgagagctcaaatcaagaatatgtaaggatgcttctagatctgcagaccaagtcagcactaaaggaaacagaaattaaagaaatcacagtttcttttcttcaaaaaataactgatttgcagaaccaactcaagcaacaggaggaagactttagaaaacagctggaagatgaagaaggaagaaaagctgaaaaagaaaatacaacagcagaattaactgaagaaattaacaagtggcgtctcctctatgaagaactatataataaaacaaaaccttttcagctacaactagatgcttttgaagtagaaaaacaggcattgttgaatgaacatggtgcagctcaggaacagctaaataaaataagagattcatatgctaaattattgggtcatcagaatttgaaacaaaaaatcaagcatgttgtgaagttgaaagatgaaaatagccaactcaaatcggaagtatcaaaactccgctgtcagcttgctaaaaaaaaacaaagtgagacaaaacttcaagaggaattgaataaagttctaggtatcaaacactttgatccttcaaaggcttttcatcatgaaagtaaagaaaattttgccctgaagaccccattaaaagaaggcaatacaaactgttaccgagctcctatggagtgtcaagaatcatggaagtaaacatctgagaaacctgttgaagattatttcattcgtcttgttgttattgatgttgctgttattatatttgacatgggtattttataatgttgtatttaattttaactgccaatccttaaatatgtgaaaggaacattttttaccaaagtgtcttttgacattttattttttcttgcaaatacctcctccctaatgctcacctttatcacctcattctgaaccctttcgctggctttccagcttagaatgcatctcatcaacttaaaagtcagtatcatattattatcctcctgttctgaaaccttagtttcaagagtctaaaccccagattcttcagcttgatcctggaggtcttttctagtctgagcttctttagctaggctaaaacaccttggcttgttattgcctctacttt

SEQ ID NO: 141543 - DNA, 2988 bp, Homo sapiens
  Payload ID: 7837
  Gene Symbol: HMMR
  Gene Name: hyaluronan-mediated motility receptor (RHAMM)
  Uniprot ID: O75330
  ENST ID: ENST00000358715
  CDS Start-End: 37-2211
gccagtcaccttcagtttctggagctggccgtcaacatgtcctttcctaaggcgcccttgaaacgattcaatgacccttctggttgtgcaccatctccaggtgcttatgatgttaaaactttagaagtattgaaaggaccagtatcctttcagaaatcacaaagatttaaacaacaaaaagaatctaaacaaaatcttaatgttgacaaagatactaccttgcctgcttcagctagaaaagttaagtcttcggaatcaaaggaatctcaaaagaatgataaagatttgaagatattagagaaagagattcgtgttcttctacaggaacgtggtgcccaggacaggcggatccaggatctggaaactgagttggaaaagatggaagcaaggctaaatgctgcactaagggaaaaaacatctctctctgcaaataatgctacactggaaaaacaacttattgaattgaccaggactaatgaactactaaaatctaagttttctgaaaatggtaaccagaagaatttgagaattctaagcttggagttgatgaaacttagaaacaaaagagaaacaaagatgaggggtatgatggctaagcaagaaggcatggagatgaagctgcaggtcacccaaaggagtctcgaagagtctcaagggaaaatagcccaactggagggaaaacttgtttcaatagagaaagaaaagattgatgaaaaatctgaaacagaaaaactcttggaatacatcgaagaaattagttgtgcttcagatcaagtggaaaaatacaagctagatattgcccagttagaagaaaatttgaaagagaagaatgatgaaattttaagccttaagcagtctcttgaggagaatattgttatattatctaaacaagtagaagatctaaatgtgaaatgtcagctgcttgaaaaagaaaaagaagaccatgtcaacaggaatagagaacacaacgaaaatctaaatgcagagatgcaaaacttaaaacagaagtttattcttgaacaacaggaacgtgaaaagcttcaacaaaaagaattacaaattgattcacttctgcaacaagagaaagaattatcttcgagtcttcatcagaagctctgttcttttcaagaggaaatggttaaagagaagaatctgtttgaggaagaattaaagcaaacactggatgagcttgataaattacagcaaaaggaggaacaagctgaaaggctggtcaagcaattggaagaggaagcaaaatctagagctgaagaattaaaactcctagaagaaaagctgaaagggaaggaggctgaactggagaaaagtagtgctgctcatacccaggccaccctgcttttgcaggaaaagtatgacagtatggtgcaaagccttgaagatgttactgctcaatttgaaagctataaagcgttaacagccagtgagatagaagatcttaagctggagaactcatcattacaggaaaaagcggccaaggctgggaaaaatgcagaggatgttcagcatcagattttggcaactgagagctcaaatcaagaatatgtaaggatgcttctagatctgcagaccaagtcagcactaaaggaaacagaaattaaagaaatcacagtttcttttcttcaaaaaataactgatttgcagaaccaactcaagcaacaggaggaagactttagaaaacagctggaagatgaagaaggaagaaaagctgaaaaagaaaatacaacagcagaattaactgaagaaattaacaagtggcgtctcctctatgaagaactatataataaaacaaaaccttttcagctacaactagatgcttttgaagtagaaaaacaggcattgttgaatgaacatggtgcagctcaggaacagctaaataaaataagagattcatatgctaaattattgggtcatcagaatttgaaacaaaaaatcaagcatgttgtgaagttgaaagatgaaaatagccaactcaaatcggaagtatcaaaactccgctgtcagcttgctaaaaaaaaacaaagtgagacaaaacttcaagaggaattgaataaagttctaggtatcaaacactttgatccttcaaaggcttttcatcatgaaagtaaagaaaattttgccctgaagaccccattaaaagaaggcaatacaaactgttaccgagctcctatggagtgtcaagaatcatggaagtaaacatctgagaaacctgttgaagattatttcattcgtcttgttgttattgatgttgctgttattatatttgacatgggtattttataatgttgtatttaattttaactgccaatccttaaatatgtgaaaggaacattttttaccaaagtgtcttttgacattttattttttcttgcaaatacctcctccctaatgctcacctttatcacctcattctgaaccctttcgctggctttccagcttagaatgcatctcatcaacttaaaagtcagtatcatattattatcctcctgttctgaaaccttagtttcaagagtctaaaccccagattcttcagcttgatcctggaggtcttttctagtctgagcttctttagctaggctaaaacaccttggcttgttattgcctctactttgattctgataatgctcacttggtcctacctattatccttctacttgtccagttcaaataagaaataaggacaagcctaacttcatagaaacctctctatttttaatcagttgtttaataatttacaggttcttaggctccatcctgtttgtatgaaattataatctgtggattggcctttaagcctgcattcttaacaaactcttcagttaattcttagatacactaaaaatctgagaaactctacatgtaactatttcttcagagtttgtcatatactgcttgtcatctgcatgtctactcagcatttgattaacatttgtgtaatatgaaataaaattacacagtaagtcatttaaccaa

SEQ ID NO: 141544 - DNA, 3102 bp, Homo sapiens
  Payload ID: 7837
  Gene Symbol: HMMR
  Gene Name: hyaluronan-mediated motility receptor (RHAMM)
  Uniprot ID: O75330
  ENST ID: ENST00000393915
  CDS Start-End: 144-2321
ggggtttggctttccaattggctaacgccggggtgggtggggaatgtggggagatttgaatttgaaaccggtagggagtgataatccgcattcagttgtcgaggagtgccagtcaccttcagtttctggagctggccgtcaacatgtcctttcctaaggcgcccttgaaacgattcaatgacccttctggttgtgcaccatctccaggtgcttatgatgttaaaactttagaagtattgaaaggaccagtatcctttcagaaatcacaaagatttaaacaacaaaaagaatctaaacaaaatcttaatgttgacaaagatactaccttgcctgcttcagctagaaaagttaagtcttcggaatcaaagaaggaatctcaaaagaatgataaagatttgaagatattagagaaagagattcgtgttcttctacaggaacgtggtgcccaggacaggcggatccaggatctggaaactgagttggaaaagatggaagcaaggctaaatgctgcactaagggaaaaaacatctctctctgcaaataatgctacactggaaaaacaacttattgaattgaccaggactaatgaactactaaaatctaagttttctgaaaatggtaaccagaagaatttgagaattctaagcttggagttgatgaaacttagaaacaaaagagaaacaaagatgaggggtatgatggctaagcaagaaggcatggagatgaagctgcaggtcacccaaaggagtctcgaagagtctcaagggaaaatagcccaactggagggaaaacttgtttcaatagagaaagaaaagattgatgaaaaatctgaaacagaaaaactcttggaatacatcgaagaaattagttgtgcttcagatcaagtggaaaaatacaagctagatattgcccagttagaagaaaatttgaaagagaagaatgatgaaattttaagccttaagcagtctcttgaggagaatattgttatattatctaaacaagtagaagatctaaatgtgaaatgtcagctgcttgaaaaagaaaaagaagaccatgtcaacaggaatagagaacacaacgaaaatctaaatgcagagatgcaaaacttaaaacagaagtttattcttgaacaacaggaacgtgaaaagcttcaacaaaaagaattacaaattgattcacttctgcaacaagagaaagaattatcttcgagtcttcatcagaagctctgttcttttcaagaggaaatggttaaagagaagaatctgtttgaggaagaattaaagcaaacactggatgagcttgataaattacagcaaaaggaggaacaagctgaaaggctggtcaagcaattggaagaggaagcaaaatctagagctgaagaattaaaactcctagaagaaaagctgaaagggaaggaggctgaactggagaaaagtagtgctgctcatacccaggccaccctgcttttgcaggaaaagtatgacagtatggtgcaaagccttgaagatgttactgctcaatttgaaagctataaagcgttaacagccagtgagatagaagatcttaagctggagaactcatcattacaggaaaaagcggccaaggctgggaaaaatgcagaggatgttcagcatcagattttggcaactgagagctcaaatcaagaatatgtaaggatgcttctagatctgcagaccaagtcagcactaaaggaaacagaaattaaagaaatcacagtttcttttcttcaaaaaataactgatttgcagaaccaactcaagcaacaggaggaagactttagaaaacagctggaagatgaagaaggaagaaaagctgaaaaagaaaatacaacagcagaattaactgaagaaattaacaagtggcgtctcctctatgaagaactatataataaaacaaaaccttttcagctacaactagatgcttttgaagtagaaaaacaggcattgttgaatgaacatggtgcagctcaggaacagctaaataaaataagagattcatatgctaaattattgggtcatcagaatttgaaacaaaaaatcaagcatgttgtgaagttgaaagatgaaaatagccaactcaaatcggaagtatcaaaactccgctgtcagcttgctaaaaaaaaacaaagtgagacaaaacttcaagaggaattgaataaagttctaggtatcaaacactttgatccttcaaaggcttttcatcatgaaagtaaagaaaattttgccctgaagaccccattaaaagaaggcaatacaaactgttaccgagctcctatggagtgtcaagaatcatggaagtaaacatctgagaaacctgttgaagattatttcattcgtcttgttgttattgatgttgctgttattatatttgacatgggtattttataatgttgtatttaattttaactgccaatccttaaatatgtgaaaggaacattttttaccaaagtgtcttttgacattttattttttcttgcaaatacctcctccctaatgctcacctttatcacctcattctgaaccctttcgctggctttccagcttagaatgcatctcatcaacttaaaagtcagtatcatattattatcctcctgttctgaaaccttagtttcaagagtctaaaccccagattcttcagcttgatcctggaggtcttttctagtctgagcttctttagctaggctaaaacaccttggcttgttattgcctctactttgattctgataatgctcacttggtcctacctattatccttctacttgtccagttcaaataagaaataaggacaagcctaacttcatagaaacctctctatttttaatcagttgtttaataatttacaggttcttaggctccatcctgtttgtatgaaattataatctgtggattggcctttaagcctgcattcttaacaaactcttcagttaattcttagatacactaaaaatctgagaaactctacatgtaactatttcttcagagtttgtcatatactgcttgtcatctgcatgtctactcagcatttgattaacatttgtgtaatatgaaataaaattacacagtaagtcatttaaccaattaa

SEQ ID NO: 141545 - DNA, 2084 bp, Homo sapiens
  Payload ID: 7837
  Gene Symbol: HMMR
  Gene Name: hyaluronan-mediated motility receptor (RHAMM)
  Uniprot ID: O75330
  ENST ID: ENST00000432118
  CDS Start-End: 94-2010
tccgcattcagttgtcgaggagtgccagtcaccttcagtttctggagctggccgtcaacatgtcctttcctaaggcgcccttgaaacgattcaatgacccttctgattcgtgttcttctacaggaacgtggtgcccaggacaggcggatccaggatctggaaactgagttggaaaagatggaagcaaggctaaatgctgcactaagggaaaaaacatctctctctgcaaataatgctacactggaaaaacaacttattgaattgaccaggactaatgaactactaaaatctaagttttctgaaaatggtaaccagaagaatttgagaattctaagcttggagttgatgaaacttagaaacaaaagagaaacaaagatgaggggtatgatggctaagcaagaaggcatggagatgaagctgcaggtcacccaaaggagtctcgaagagtctcaagggaaaatagcccaactggagggaaaacttgtttcaatagagaaagaaaagattgatgaaaaatctgaaacagaaaaactcttggaatacatcgaagaaattagttgtgcttcagatcaagtggaaaaatacaagctagatattgcccagttagaagaaaatttgaaagagaagaatgatgaaattttaagccttaagcagtctcttgaggagaatattgttatattatctaaacaagtagaagatctaaatgtgaaatgtcagctgcttgaaaaagaaaaagaagaccatgtcaacaggaatagagaacacaacgaaaatctaaatgcagagatgcaaaacttaaaacagaagtttattcttgaacaacaggaacgtgaaaagcttcaacaaaaagaattacaaattgattcacttctgcaacaagagaaagaattatcttcgagtcttcatcagaagctctgttcttttcaagaggaaatggttaaagagaagaatctgtttgaggaagaattaaagcaaacactggatgagcttgataaattacagcaaaaggaggaacaagctgaaaggctggtcaagcaattggaagaggaagcaaaatctagagctgaagaattaaaactcctagaagaaaagctgaaagggaaggaggctgaactggagaaaagtagtgctgctcatacccaggccaccctgcttttgcaggaaaagtatgacagtatggtgcaaagccttgaagatgttactgctcaatttgaaagctataaagcgttaacagccagtgagatagaagatcttaagctggagaactcatcattacaggaaaaagcggccaaggctgggaaaaatgcagaggatgttcagcatcagattttggcaactgagagctcaaatcaagaatatgtaaggatgcttctagatctgcagaccaagtcagcactaaaggaaacagaaattaaagaaatcacagtttcttttcttcaaaaaataactgatttgcagaaccaactcaagcaacaggaggaagactttagaaaacagctggaagatgaagaaggaagaaaagctgaaaaagaaaatacaacagcagaattaactgaagaaattaacaagtggcgtctcctctatgaagaactatataataaaacaaaaccttttcagctacaactagatgcttttgaagtagaaaaacaggcattgttgaatgaacatggtgcagctcaggaacagctaaataaaataagagattcatatgctaaattattgggtcatcagaatttgaaacaaaaaatcaagcatgttgtgaagttgaaagatgaaaatagccaactcaaatcggaagtatcaaaactccgctgtcagcttgctaaaaaaaaacaaagtgagacaaaacttcaagaggaattgaataaagttctaggtatcaaacactttgatccttcaaaggcttttcatcatgaaagtaaagaaaattttgccctgaagaccccattaaaagaaggcaatacaaactgttaccgagctcctatggagtgtcaagaatcatggaagtaaacatctgagaaacctgttgaagattatttcattcgtcttgttgttattgatgttgctgttattatatttgacat

SEQ ID NO: 141546 - DNA, 609 bp, Homo sapiens
  Payload ID: 7837
  Gene Symbol: HMMR
  Gene Name: hyaluronan-mediated motility receptor (RHAMM)
  ENST ID: ENST00000522094
  CDS Start-End: 333-609
aatgcactttctaacgtctccggagggaagtgcgcttgcgcaaatgctaggttacacttgagtaactccgggaatgactgggttgtgcaccatctccaggtgcttatgatgttaaaactttagaagtattgaaaggaccagtatcctttcagaaatcacaaagatttaaacaacaaaaagaatctaaacaaaatcttaatgttgacaaagatactaccttgcctgcttcagctagaaaagttaagtcttcggaatcaaagattcgtgttcttctacaggaacgtggtgcccaggacaggcggatccaggatctggaaactgagttggaaaagatggaagcaaggctaaatgctgcactaagggaaaaaacatctctctctgcaaataatgctacactggaaaaacaacttattgaattgaccaggactaatgaactactaaaatctaagttttctgaaaatggtaaccagaagaatttgagaattctaagcttggagttgatgaaacttagaaacaaaagagaaacaaagatgaggggtatgatggctaagcaagaaggcatggagatgaagctgcaggtcacccaaaggagtctcgaagagtctcaag

SEQ ID NO: 141547 - DNA, 720 bp, Homo sapiens
  Payload ID: 7837
  Gene Symbol: HMMR
  Gene Name: hyaluronan-mediated motility receptor (RHAMM)
  ENST ID: ENST00000520345
  CDS Start-End: 416-720
tttgaatggccgtttacggcaccggcaggccccggatgaaagaactgaaatccagaaaagttcacatgcaacgaacaatgggacagaattggaaccagtgaagccggaactcactacaccgtcccctaagtgacgccaaaatgcactttctaacgtctccggaggttgtgcaccatctccaggtgcttatgatgttaaaactttagaagtattgaaaggaccagtatcctttcagaaatcacaaagatttaaacaacaaaaagaatctaaacaaaatcttaatgttgacaaagatactaccttgcctgcttcagctagaaaagttaagtcttcggaatcaaagattcgtgttcttctacaggaacgtggtgcccaggacaggcggatccaggatctggaaactgagttggaaaagatggaagcaaggctaaatgctgcactaagggaaaaaacatctctctctgcaaataatgctacactggaaaaacaacttattgaattgaccaggactaatgaactactaaaatctaagttttctgaaaatggtaaccagaagaatttgagaattctaagcttggagttgatgaaacttagaaacaaaagagaaacaaagatgaggggtatgatggctaagcaagaaggcatggagatgaagctgcaggtcacccaaaggagtctcgaagagtctcaagggaaaatagcccaactggagggaaaact

SEQ ID NO: 141548 - DNA, 2517 bp, Homo sapiens
  Payload ID: 7838
  Gene Symbol: HYAL1
  Gene Name: hyaluronoglucosaminidase 1
  Uniprot ID: Q12794
  ENST ID: ENST00000266031
  CDS Start-End: 617-1924
ttcctccaggagtctctggtgcagctggggtggaatctggccaggccctgcttaggcccccatcctggggtcaggaaatttggaggataaggcccttcagccccaaggtcagcagggacgagcgggcagactggcgggtgtacaggagggctgggttgacctgtccttggtcactgaggccattggatcttcctccagtggctgccaggatttctggtggaagagacaggaaggcctcccccccttggtcgggtcagcctgggggctgagggcctggctgtcagccactcttcccagaacatatgtcatggcctcagtggctcatggggaagcaggggtgggcgagcttaggctagagcaagtcctgtgggagatggcagaggcctggtctgagaggcaactcggatgtgccctccagtggccatgctcccctccatgcgtctcccctgccctcctggagccctgcaggtcaatgtttaacagaaaccagagcagcggtggattaatgcgcaagggctcagccccccagccctgagcagtgggggaatcggagactttgcaacctgttctcagctctgcctcccctggccaggttgtcctcgaccagtcccgtgccatggcagcccacctgcttcccatctgcgccctcttcctgaccttactcgatatggcccaaggctttaggggccccttgctacccaaccggcccttcaccaccgtctggaatgcaaacacccagtggtgcctggagaggcacggtgtggacgtggatgtcagtgtcttcgatgtggtagccaacccagggcagaccttccgcggccctgacatgacaattttctatagctcccagctgggcacctacccctactacacgcccactggggagcctgtgtttggtggtctgccccagaatgccagcctgattgcccacctggcccgcacattccaggacatcctggctgccatacctgctcctgacttctcagggctggcagtcatcgactgggaggcatggcgcccacgctgggccttcaactgggacaccaaggacatttaccggcagcgctcacgggcactggtacaggcacagcaccctgattggccagctcctcaggtggaggcagtagcccaggaccagttccagggagctgcacgggcctggatggcaggcaccctccagctggggcgggcactgcgtcctcgcggcctctggggcttctatggcttccctgactgctacaactatgactttctaagccccaactacaccggccagtgcccatcaggcatccgtgcccaaaatgaccagctagggtggctgtggggccagagccgtgccctctatcccagcatctacatgcccgcagtgctggagggcacagggaagtcacagatgtatgtgcaacaccgtgtggccgaggcattccgtgtggctgtggctgctggtgaccccaatctgccggtgctgccctatgtccagatcttctatgacacgacaaaccactttctgcccctggatgagctggagcacagcctgggggagagtgcggcccagggggcagctggagtggtgctctgggtgagctgggaaaatacaagaaccaaggaatcatgtcaggccatcaaggagtatatggacactacactggggcccttcatcctgaacgtgaccagtggggcccttctctgcagtcaagccctgtgctccggccatggccgctgtgtccgccgcaccagccaccccaaagccctcctcctccttaaccctgccagtttctccatccagctcacgcctggtggtgggcccctgagcctgcggggtgccctctcacttgaagatcaggcacagatggctgtggagttcaaatgtcgatgctaccctggctggcaggcaccgtggtgtgagcggaagagcatgtggtgattggccacacactgagttgcacatattgagaacctaatgcactctgggtctggccagggcttcctcaaatacatgcacagtcatacaagtcatggtcacagtaaagagtacactcagccactgtcacaggcatattccctgcacacacatgcatacttacagactggaatagtggcataaggagttagaaccacagcagacaccattcattccatgtccatatgcatctacttggcaaggtcatagacaattcctccagagacactgagccagtctttgaactgcagcaatcacaaaggctgacattcactgagtgcctactctttgccaatccccgtgctaagcgttttatgtggacttattcattcctcacaatgaggctatgaggaaactgagtcactcacattgagagtaagcacgttgcccaaggttgcacagcaagaaaagggagaagttgagattcaaacccaggctgtctagctccgggggtacagcccttgcactcctactgagtttgtggtaaccagccctgcacgacccctgaatctgctgagaggcaccagtccagcaaataaagcagtcatgatttactt

SEQ ID NO: 141549 - DNA, 2324 bp, Homo sapiens
  Payload ID: 7838
  Gene Symbol: HYAL1
  Gene Name: hyaluronoglucosaminidase 1
  Uniprot ID: Q12794
  ENST ID: ENST00000320295
  CDS Start-End: 428-1735
agatgtggggagcgcctctgccctgtcgccccgtccgggatgtgaggagcgtctctccctggccgccccgtctgagaagtgaggagcccctccgcccagcagccgccctgtctgagaagctagtcttgaattcctgacctcaggtgatcctcccgcgttggcctcccaaagtgctgggattacaggcatgagccaccactcctggccccagaaagtgacattctttacttaccacaggaggaaaagatccacgaaagtaaagtgcctagggcccatcaatgtcagatgcagccacgtggacaaagaacactccctgagcacaagacacgaaagaacccggtctccagtgtcacaaacaggcctgcccagcagggtctgcccctgcccacctcctccagcctaggttgtcctcgaccagtcccgtgccatggcagcccacctgcttcccatctgcgccctcttcctgaccttactcgatatggcccaaggctttaggggccccttgctacccaaccggcccttcaccaccgtctggaatgcaaacacccagtggtgcctggagaggcacggtgtggacgtggatgtcagtgtcttcgatgtggtagccaacccagggcagaccttccgcggccctgacatgacaattttctatagctcccagctgggcacctacccctactacacgcccactggggagcctgtgtttggtggtctgccccagaatgccagcctgattgcccacctggcccgcacattccaggacatcctggctgccatacctgctcctgacttctcagggctggcagtcatcgactgggaggcatggcgcccacgctgggccttcaactgggacaccaaggacatttaccggcagcgctcacgggcactggtacaggcacagcaccctgattggccagctcctcaggtggaggcagtagcccaggaccagttccagggagctgcacgggcctggatggcaggcaccctccagctggggcgggcactgcgtcctcgcggcctctggggcttctatggcttccctgactgctacaactatgactttctaagccccaactacaccggccagtgcccatcaggcatccgtgcccaaaatgaccagctagggtggctgtggggccagagccgtgccctctatcccagcatctacatgcccgcagtgctggagggcacagggaagtcacagatgtatgtgcaacaccgtgtggccgaggcattccgtgtggctgtggctgctggtgaccccaatctgccggtgctgccctatgtccagatcttctatgacacgacaaaccactttctgcccctggatgagctggagcacagcctgggggagagtgcggcccagggggcagctggagtggtgctctgggtgagctgggaaaatacaagaaccaaggaatcatgtcaggccatcaaggagtatatggacactacactggggcccttcatcctgaacgtgaccagtggggcccttctctgcagtcaagccctgtgctccggccatggccgctgtgtccgccgcaccagccaccccaaagccctcctcctccttaaccctgccagtttctccatccagctcacgcctggtggtgggcccctgagcctgcggggtgccctctcacttgaagatcaggcacagatggctgtggagttcaaatgtcgatgctaccctggctggcaggcaccgtggtgtgagcggaagagcatgtggtgattggccacacactgagttgcacatattgagaacctaatgcactctgggtctggccagggcttcctcaaatacatgcacagtcatacaagtcatggtcacagtaaagagtacactcagccactgtcacaggcatattccctgcacacacatgcatacttacagactggaatagtggcataaggagttagaaccacagcagacaccattcattccatgtccatatgcatctacttggcaaggtcatagacaattcctccagagacactgagccagtctttgaactgcagcaatcacaaaggctgacattcactgagtgcctactctttgccaatccccgtgctaagcgttttatgtggacttattcattcctcacaatgaggctatgaggaaactgagtcactcacattgagagtaagcacgttgcccaaggttgcacagcaagaaaagggagaagttgagattcaaacccaggctgtctagctccgggggtacagcccttgcactcctactgagtttgtggtaaccagccctgcacgacccctgaatctgctgagaggcaccagtccagcaaataaagcagtcatgattt

SEQ ID NO: 141550 - DNA, 1522 bp, Homo sapiens
  Payload ID: 7838
  Gene Symbol: HYAL1
  Gene Name: hyaluronoglucosaminidase 1
  Uniprot ID: Q12794
  ENST ID: ENST00000395143
  CDS Start-End: 133-1350
cttcctccaggagtctctggtgcagctggggtggaatctggccaggccctgcttaggcccccatcctggggtcaggaaatttggaggataaggcccttcagccccaaggttgtcctcgaccagtcccgtgccatggcagcccacctgcttcccatctgcgccctcttcctgaccttactcgatatggcccaaggctttaggggccccttgctacccaaccggcccttcaccaccgtctggaatgcaaacacccagtggtgcctggagaggcacggtgtggacgtggatgtcagtgtcttcgatgtggtagccaacccagggcagaccttccgcggccctgacatgacaattttctatagctcccagctgggcacctacccctactacacgcccactggggagcctgtgtttggtggtctgccccagaatgccagcctgattgcccacctggcccgcacattccaggacatcctggctgccatacctgctcctgacttctcagggctggcagtcatcgactgggaggcatggcgcccacgctgggccttcaactgggacaccaaggacatttaccggcagcgctcacgggcactggtacaggcacagcaccctgattggccagctcctcaggtggaggcagtagcccaggaccagttccagggagctgcacgggcctggatggcaggcaccctccagctggggcgggcactgcgtcctcgcggcctctggggcttctatggcttccctgactgctacaactatgactttctaagccccaactacaccggccagtgcccatcaggcatccgtgcccaaaatgaccagctagggtggctgtggggccagagccgtgccctctatcccagcatctacatgcccgcagtgctggagggcacagggaagtcacagatgtatgtgcaacaccgtgtggccgaggcattccgtgtggctgtggctgctggtgaccccaatctgccggtgctgccctatgtccagatcttctatgacacgacaaaccactttctgcccctggaatcatgtcaggccatcaaggagtatatggacactacactggggcccttcatcctgaacgtgaccagtggggcccttctctgcagtcaagccctgtgctccggccatggccgctgtgtccgccgcaccagccaccccaaagccctcctcctccttaaccctgccagtttctccatccagctcacgcctggtggtgggcccctgagcctgcggggtgccctctcacttgaagatcaggcacagatggctgtggagttcaaatgtcgatgctaccctggctggcaggcaccgtggtgtgagcggaagagcatgtggtgattggccacacactgagttgcacatattgagaacctaatgcactctgggtctggccagggcttcctcaaatacatgcacagtcatacaagtcatggtcacagtaaagagtacactcagccactgtcacaggcatattccctgcacacacatgcatacttacagactggaatag

SEQ ID NO: 141551 - DNA, 2081 bp, Homo sapiens
  Payload ID: 7838
  Gene Symbol: HYAL1
  Gene Name: hyaluronoglucosaminidase 1
  Uniprot ID: Q12794
  ENST ID: ENST00000395144
  CDS Start-End: 180-1487
gggtggggtgaccccctacaaaagctcagaatttccagcagcggctccttcctccaggagtctctggtgcagctggggtggaatctggccaggccctgcttaggcccccatcctggggtcaggaaatttggaggataaggcccttcagccccaaggttgtcctcgaccagtcccgtgccatggcagcccacctgcttcccatctgcgccctcttcctgaccttactcgatatggcccaaggctttaggggccccttgctacccaaccggcccttcaccaccgtctggaatgcaaacacccagtggtgcctggagaggcacggtgtggacgtggatgtcagtgtcttcgatgtggtagccaacccagggcagaccttccgcggccctgacatgacaattttctatagctcccagctgggcacctacccctactacacgcccactggggagcctgtgtttggtggtctgccccagaatgccagcctgattgcccacctggcccgcacattccaggacatcctggctgccatacctgctcctgacttctcagggctggcagtcatcgactgggaggcatggcgcccacgctgggccttcaactgggacaccaaggacatttaccggcagcgctcacgggcactggtacaggcacagcaccctgattggccagctcctcaggtggaggcagtagcccaggaccagttccagggagctgcacgggcctggatggcaggcaccctccagctggggcgggcactgcgtcctcgcggcctctggggcttctatggcttccctgactgctacaactatgactttctaagccccaactacaccggccagtgcccatcaggcatccgtgcccaaaatgaccagctagggtggctgtggggccagagccgtgccctctatcccagcatctacatgcccgcagtgctggagggcacagggaagtcacagatgtatgtgcaacaccgtgtggccgaggcattccgtgtggctgtggctgctggtgaccccaatctgccggtgctgccctatgtccagatcttctatgacacgacaaaccactttctgcccctggatgagctggagcacagcctgggggagagtgcggcccagggggcagctggagtggtgctctgggtgagctgggaaaatacaagaaccaaggaatcatgtcaggccatcaaggagtatatggacactacactggggcccttcatcctgaacgtgaccagtggggcccttctctgcagtcaagccctgtgctccggccatggccgctgtgtccgccgcaccagccaccccaaagccctcctcctccttaaccctgccagtttctccatccagctcacgcctggtggtgggcccctgagcctgcggggtgccctctcacttgaagatcaggcacagatggctgtggagttcaaatgtcgatgctaccctggctggcaggcaccgtggtgtgagcggaagagcatgtggtgattggccacacactgagttgcacatattgagaacctaatgcactctgggtctggccagggcttcctcaaatacatgcacagtcatacaagtcatggtcacagtaaagagtacactcagccactgtcacaggcatattccctgcacacacatgcatacttacagactggaatagtggcataaggagttagaaccacagcagacaccattcattccatgtccatatgcatctacttggcaaggtcatagacaattcctccagagacactgagccagtctttgaactgcagcaatcacaaaggctgacattcactgagtgcctactctttgccaatccccgtgctaagcgttttatgtggacttattcattcctcacaatgaggctatgaggaaactgagtcactcacattgagagtaagcacgttgcccaaggttgcacagcaagaaaagggagaagttgagattcaaacccaggctgtctagctccgggggtacagcccttgcactcctactgagtttgtggtaaccagccctgcacgacccctgaatctgctgagaggcaccagtccagcaaataaagcagtcatgatttactta

SEQ ID NO: 141552 - DNA, 666 bp, Homo sapiens
  Payload ID: 7838
  Gene Symbol: HYAL1
  Gene Name: hyaluronoglucosaminidase 1
  Uniprot ID: Q12794
  ENST ID: ENST00000447605
  CDS Start-End: 135-665
cttcctccaggagtctctggtgcagctggggtggaatctggccaggccctgcttaggcccccatcctggggtcaggaaatttggaggataaggcccttcagccccaagtgctggagggcacagggaagtcacagatgtatgtgcaacaccgtgtggccgaggcattccgtgtggctgtggctgctggtgaccccaatctgccggtgctgccctatgtccagatcttctatgacacgacaaaccactttctgcccctggatgagctggagcacagcctgggggagagtgcggcccagggggcagctggagtggtgctctgggtgagctgggaaaatacaagaaccaaggaatcatgtcaggccatcaaggagtatatggacactacactggggcccttcatcctgaacgtgaccagtggggcccttctctgcagtcaagccctgtgctccggccatggccgctgtgtccgccgcaccagccaccccaaagccctcctcctccttaaccctgccagtttctccatccagctcacgcctggtggtgggcccctgagcctgcggggtgccctctcacttgaagatcaggcacagatggctgtggagttcaaatgtcgatgctaccctggctggcaggcaccgtggtgtgagcggaagagcatgtggtgat

SEQ ID NO: 141553 - DNA, 561 bp, Homo sapiens
  Payload ID: 7838
  Gene Symbol: HYAL1
  Gene Name: hyaluronoglucosaminidase 1
  ENST ID: ENST00000452672
  CDS Start-End: 354-561
tttttgtatttttagtagagaaggggtttcaccatgttagccgggatggtctcgatctcctgacctcgtgatctgccacctcggcttcccaaagtgctaggattataggcgtgagcctccgcacctggcatgcctggccatattttaaaatattttttttaaggaggaaaagatccacgaaagtaaagtgcctagggcccatcaatgtcagatgcagccacgtggacaaagaacactccctgagcacaagacacgaaagaacccggtctccagtgtcacaaacaggcctgcccagcagggtctgcccctgcccacctcctccagcctaggttgtcctcgaccagtcccgtgccatggcagcccacctgcttcccatctgcgccctcttcctgaccttactcgatatggcccaaggctttaggggccccttgctacccaaccggcccttcaccaccgtctggaatgcaaacacccagtggtgcctggagaggcacggtgtggacgtggatgtcagtgtcttcgatgtggtagccaacccagggcagaccttccgcggccctg

SEQ ID NO: 141554 - DNA, 1084 bp, Homo sapiens
  Payload ID: 7838
  Gene Symbol: HYAL1
  Gene Name: hyaluronoglucosaminidase 1
  Uniprot ID: Q12794
  ENST ID: ENST00000457214
  CDS Start-End: 322-1083
cttcctccaggagtctctggtgcagctggggtggaatctggccaggccctgcttaggcccccatcctggggtcaggaaatttggaggataaggcccttcagccccaaggacatcctggctgccatacctgctcctgacttctcagggctggcagtcatcgactgggaggcatggcgcccacgctgggccttcaactgggacaccaaggacatttaccggcagcgctcacgggcactggtacaggcacagcaccctgattggccagctcctcaggtggaggcagtagcccaggaccagttccagggagctgcacgggcctggatggcaggcaccctccagctggggcgggcactgcgtcctcgcggcctctggggcttctatggcttccctgactgctacaactatgactttctaagccccaactacaccggccagtgcccatcaggcatccgtgcccaaaatgaccagctagggtggctgtggggccagagccgtgccctctatcccagcatctacatgcccgcagtgctggagggcacagggaagtcacagatgtatgtgcaacaccgtgtggccgaggcattccgtgtggctgtggctgctggtgaccccaatctgccggtgctgccctatgtccagatcttctatgacacgacaaaccactttctgcccctggatgagctggagcacagcctgggggagagtgcggcccagggggcagctggagtggtgctctgggtgagctgggaaaatacaagaaccaaggaatcatgtcaggccatcaaggagtatatggacactacactggggcccttcatcctgaacgtgaccagtggggcccttctctgcagtcaagccctgtgctccggccatggccgctgtgtccgccgcaccagccaccccaaagccctcctcctccttaaccctgccagtttctccatccagctcacgcctggtggtgggcccctgagcctgcggggtgccctctcacttgaagatcaggcacagatggctgtggagttcaaatgtcgatgctaccctggctggcaggcaccgtggtgtgagcggaagagcatgtggtgat

SEQ ID NO: 141555 - DNA, 567 bp, Homo sapiens
  Payload ID: 7838
  Gene Symbol: HYAL1
  Gene Name: hyaluronoglucosaminidase 1
  ENST ID: ENST00000418723
  CDS Start-End: 258-567
ccttcctccaggagtctctggtgcagctggggtggaatctggccaggccctgcttaggcccccatcctggggtcaggaaatttggaggataaggcccttcagccccaaggtcaatgtttaacagaaaccagagcagcggtggattaatgcgcaagggctcagccccccagccctgagcagtgggggaatcggagactttgcaacctgttctcagctctgcctcccctggccaggttgtcctcgaccagtcccgtgccatggcagcccacctgcttcccatctgcgccctcttcctgaccttactcgatatggcccaaggctttaggggccccttgctacccaaccggcccttcaccaccgtctggaatgcaaacacccagtggtgcctggagaggcacggtgtggacgtggatgtcagtgtcttcgatgtggtagccaacccagggcagaccttccgcggccctgacatgacaattttctatagctcccagctgggcacctacccctactacacgcccactggggagcctgtgtttggtggtctgccccagaatgccagcctgattg

SEQ ID NO: 141556 - DNA, 2225 bp, Homo sapiens
  Payload ID: 7838
  Gene Symbol: HYAL1
  Gene Name: hyaluronoglucosaminidase 1
  Uniprot ID: Q12794
  ENST ID: ENST00000618175
  CDS Start-End: 325-1632
caccatgttagccgggatggtctcgatctcctgacctcgtgatctgccacctcggcttcccaaagtgctaggattataggcgtgagcctccgcacctggcatgcctggccatattttaaaatattttttttaaggaggaaaagatccacgaaagtaaagtgcctagggcccatcaatgtcagatgcagccacgtggacaaagaacactccctgagcacaagacacgaaagaacccggtctccagtgtcacaaacaggcctgcccagcagggtctgcccctgcccacctcctccagcctaggttgtcctcgaccagtcccgtgccatggcagcccacctgcttcccatctgcgccctcttcctgaccttactcgatatggcccaaggctttaggggccccttgctacccaaccggcccttcaccaccgtctggaatgcaaacacccagtggtgcctggagaggcacggtgtggacgtggatgtcagtgtcttcgatgtggtagccaacccagggcagaccttccgcggccctgacatgacaattttctatagctcccagctgggcacctacccctactacacgcccactggggagcctgtgtttggtggtctgccccagaatgccagcctgattgcccacctggcccgcacattccaggacatcctggctgccatacctgctcctgacttctcagggctggcagtcatcgactgggaggcatggcgcccacgctgggccttcaactgggacaccaaggacatttaccggcagcgctcacgggcactggtacaggcacagcaccctgattggccagctcctcaggtggaggcagtagcccaggaccagttccagggagctgcacgggcctggatggcaggcaccctccagctggggcgggcactgcgtcctcgcggcctctggggcttctatggcttccctgactgctacaactatgactttctaagccccaactacaccggccagtgcccatcaggcatccgtgcccaaaatgaccagctagggtggctgtggggccagagccgtgccctctatcccagcatctacatgcccgcagtgctggagggcacagggaagtcacagatgtatgtgcaacaccgtgtggccgaggcattccgtgtggctgtggctgctggtgaccccaatctgccggtgctgccctatgtccagatcttctatgacacgacaaaccactttctgcccctggatgagctggagcacagcctgggggagagtgcggcccagggggcagctggagtggtgctctgggtgagctgggaaaatacaagaaccaaggaatcatgtcaggccatcaaggagtatatggacactacactggggcccttcatcctgaacgtgaccagtggggcccttctctgcagtcaagccctgtgctccggccatggccgctgtgtccgccgcaccagccaccccaaagccctcctcctccttaaccctgccagtttctccatccagctcacgcctggtggtgggcccctgagcctgcggggtgccctctcacttgaagatcaggcacagatggctgtggagttcaaatgtcgatgctaccctggctggcaggcaccgtggtgtgagcggaagagcatgtggtgattggccacacactgagttgcacatattgagaacctaatgcactctgggtctggccagggcttcctcaaatacatgcacagtcatacaagtcatggtcacagtaaagagtacactcagccactgtcacaggcatattccctgcacacacatgcatacttacagactggaatagtggcataaggagttagaaccacagcagacaccattcattccatgtccatatgcatctacttggcaaggtcatagacaattcctccagagacactgagccagtctttgaactgcagcaatcacaaaggctgacattcactgagtgcctactctttgccaatccccgtgctaagcgttttatgtggacttattcattcctcacaatgaggctatgaggaaactgagtcactcacattgagagtaagcacgttgcccaaggttgcacagcaagaaaagggagaagttgagattcaaacccaggctgtctagctccgggggtacagcccttgcactcctactgagtttgtggtaaccagccctgcacgacccctgaatctgctgagaggcaccagtccagcaaataaagcagtcatgatttactt

SEQ ID NO: 141557 - DNA, 2055 bp, Homo sapiens
  Payload ID: 7839
  Gene Symbol: HYAL2
  Gene Name: hyaluronoglucosaminidase 2
  Uniprot ID: Q12891
  ENST ID: ENST00000357750
  CDS Start-End: 301-1722
attctggagggaaacagggtcaaggcgatctcctcccccacgcctgttcctggccctttcctctcagggggcagcaggaagtgaggagaaagggctgggatgggaggcgggagcggatgggagggaatggggtttatcaagtcctcggcgagctgcccaacgggcagcagctggcgcaagtagcctagctggagaggctcaccccaggaaggagggaggccaccgacctactgggccgacggactcccacacagttcctgagctggtgccaggcaggtgacacctcctgcagcccccagcatgcgggcaggcccaggccccaccgttacattggccctggtgctggcggtgtcatgggccatggagctcaagcccacagcaccacccatcttcactggccggccctttgtggtagcgtgggacgtgcccacacaggactgtggcccacgcctcaaggtgccactggacctgaatgcctttgatgtgcaggcctcacctaatgagggttttgtgaaccagaatattaccatcttctaccgcgaccgtctaggcctgtatccacgcttcgattctgccggaaggtctgtgcatggtggtgtgccacagaatgtcagcctttgggcacaccggaagatgctgcagaaacgtgtggagcactacattcggacacaggagtctgcggggctggcggtcatcgactgggaggactggcgacctgtgtgggtgcgcaactggcaggacaaagatgtgtatcgccggttatcacgccagctagtggccagtcgtcaccctgactggcctccagaccgcatagtcaaacaggcacaatatgagtttgagttcgcagcacagcagttcatgctggagacactgcgttatgtcaaggcagtgcggccccggcacctctggggcttctacctctttcctgactgctacaatcatgattatgtgcagaactgggagagctacacaggccgctgccctgatgttgaggtggcccgcaatgaccagctggcctggctgtgggctgagagcacggccctcttcccgtctgtctacctggacgagacacttgcttcctcccgccatggccgcaactttgtgagcttccgtgttcaggaggcccttcgtgtggctcgcacccaccatgccaaccatgcactcccagtctacgtcttcacacgacccacctacagccgcaggctcacggggcttagtgagatggacctcatctctaccattggcgagagtgcggccctgggcgcagctggtgtcatcctctggggtgacgcggggtacaccacaagcacggagacctgccagtacctcaaagattacctgacacggctgctggtcccctacgtggtcaatgtgtcctgggccacccaatattgcagccgggcccagtgccatggccatgggcgctgtgtgcgccgcaaccccagtgccagtaccttcctgcatctcagcaccaacagtttccgcctagtgcctggccatgcacctggtgaaccccagctgcgacctgtgggggagctcagttgggccgacattgaccacctgcagacacacttccgctgccagtgctacttgggctggagtggtgagcaatgccagtgggaccataggcaggcagctggaggtgccagcgaggcctgggctgggtcccacctcaccagtctgctggctctggcagccctggcctttacctggaccttgtaggggtctcctgcctagctgcctagcaagctggcctctaccacaagggctctcttaggcatgtaggaccctgcagggggtggacaaactggagtctggagtgggcagagcccccaggaagcccaggagggcatccataccagctcgcacccccctgttctaagggggaggggaagtccctgggaggccccttctctccctgccagaggggaaggagggtacagctgggctggggaggacctgaccctactcccttgccctagatagtttattattattattattttggggtctcttttgtaaattaaacataaaacaattgcttctctgcttgga

SEQ ID NO: 141558 - DNA, 2136 bp, Homo sapiens
  Payload ID: 7839
  Gene Symbol: HYAL2
  Gene Name: hyaluronoglucosaminidase 2
  Uniprot ID: Q12891
  ENST ID: ENST00000395139
  CDS Start-End: 395-1816
atttcaggctgactggcgctcgtggctgagactcccatagaaagcccggctcagaggggcattagggtcctaaatgggcggccacgtccctctgcagaggacctggggctcttcgagcccgaaacgaggcaccggcaccgagaaaggtggaccacaccttcccgccccgtccgcaagtccaatcccgggcccacctccgcactggagtcttaaagggccagcgtgcctgggggcggagccagcagaggcgctgagccgggccgcgcctgggcgaacggccggagcgggctgggctgggcccgggatggcggtggccctggcgccggtcccggtggcgccccgcgcgagttcctgagctggtgccaggcaggtgacacctcctgcagcccccagcatgcgggcaggcccaggccccaccgttacattggccctggtgctggcggtgtcatgggccatggagctcaagcccacagcaccacccatcttcactggccggccctttgtggtagcgtgggacgtgcccacacaggactgtggcccacgcctcaaggtgccactggacctgaatgcctttgatgtgcaggcctcacctaatgagggttttgtgaaccagaatattaccatcttctaccgcgaccgtctaggcctgtatccacgcttcgattctgccggaaggtctgtgcatggtggtgtgccacagaatgtcagcctttgggcacaccggaagatgctgcagaaacgtgtggagcactacattcggacacaggagtctgcggggctggcggtcatcgactgggaggactggcgacctgtgtgggtgcgcaactggcaggacaaagatgtgtatcgccggttatcacgccagctagtggccagtcgtcaccctgactggcctccagaccgcatagtcaaacaggcacaatatgagtttgagttcgcagcacagcagttcatgctggagacactgcgttatgtcaaggcagtgcggccccggcacctctggggcttctacctctttcctgactgctacaatcatgattatgtgcagaactgggagagctacacaggccgctgccctgatgttgaggtggcccgcaatgaccagctggcctggctgtgggctgagagcacggccctcttcccgtctgtctacctggacgagacacttgcttcctcccgccatggccgcaactttgtgagcttccgtgttcaggaggcccttcgtgtggctcgcacccaccatgccaaccatgcactcccagtctacgtcttcacacgacccacctacagccgcaggctcacggggcttagtgagatggacctcatctctaccattggcgagagtgcggccctgggcgcagctggtgtcatcctctggggtgacgcggggtacaccacaagcacggagacctgccagtacctcaaagattacctgacacggctgctggtcccctacgtggtcaatgtgtcctgggccacccaatattgcagccgggcccagtgccatggccatgggcgctgtgtgcgccgcaaccccagtgccagtaccttcctgcatctcagcaccaacagtttccgcctagtgcctggccatgcacctggtgaaccccagctgcgacctgtgggggagctcagttgggccgacattgaccacctgcagacacacttccgctgccagtgctacttgggctggagtggtgagcaatgccagtgggaccataggcaggcagctggaggtgccagcgaggcctgggctgggtcccacctcaccagtctgctggctctggcagccctggcctttacctggaccttgtaggggtctcctgcctagctgcctagcaagctggcctctaccacaagggctctcttaggcatgtaggaccctgcagggggtggacaaactggagtctggagtgggcagagcccccaggaagcccaggagggcatccataccagctcgcacccccctgttctaagggggaggggaagtccctgggaggccccttctctccctgccagaggggaaggagggtacagctgggctggggaggacctgaccctactcccttgccctagatagtttattattattattattttggggtctcttttgtaaattaaacataaaacaattgc

SEQ ID NO: 141559 - DNA, 550 bp, Homo sapiens
  Payload ID: 7839
  Gene Symbol: HYAL2
  Gene Name: hyaluronoglucosaminidase 2
  ENST ID: ENST00000424190
  CDS Start-End: 198-550
ctcccggcagcgttccttccagtttcgtagcctcttgacgagctgttccctgctttacccaaatgctgtcgtttctctggatcaagggttcttcacggtgtacagggtgggcatcagctgttcagggttctctgaaaccatgtactggatgttcctgagctggtgccaggcaggtgacacctcctgcagcccccagcatgcgggcaggcccaggccccaccgttacattggccctggtgctggcggtgtcatgggccatggagctcaagcccacagcaccacccatcttcactggccggccctttgtggtagcgtgggacgtgcccacacaggactgtggcccacgcctcaaggtgccactggacctgaatgcctttgatgtgcaggcctcacctaatgagggttttgtgaaccagaatattaccatcttctaccgcgaccgtctaggcctgtatccacgcttcgattctgccggaaggtctgtgcatggtggtgtgccacagaatgtcagcctttgggcacaccggaagatgctgcagaaacgtgtgga

SEQ ID NO: 141560 - DNA, 745 bp, Homo sapiens
  Payload ID: 7839
  Gene Symbol: HYAL2
  Gene Name: hyaluronoglucosaminidase 2
  ENST ID: ENST00000458018
  CDS Start-End: 383-745
acaaagacccggcggagcgcgctctagccctgagcggccgggcgggggaggcgagcgcgcgcattcccggtggcggtggagggaagggccgggcggccggcgccgccgtgggaggtccgctgcccctttgtccctacggggcctcctccaagccgggagagtgtcagcgctcgagagaaagtccggagagcctcactcttctgccgggcgagtgttacacggatagaagcctcccggcagcgttccttccagtttcgtagcctcttgacgagctgttccctgctttacccaaatgctgtcgtttctctggatcaagggttcttcacggtgtacaggttcctgagctggtgccaggcaggtgacacctcctgcagcccccagcatgcgggcaggcccaggccccaccgttacattggccctggtgctggcggtgtcatgggccatggagctcaagcccacagcaccacccatcttcactggccggccctttgtggtagcgtgggacgtgcccacacaggactgtggcccacgcctcaaggtgccactggacctgaatgcctttgatgtgcaggcctcacctaatgagggttttgtgaaccagaatattaccatcttctaccgcgaccgtctaggcctgtatccacgcttcgattctgccggaaggtctgtgcatggtggtgtgccacagaatgtcagcctttgggcacaccggaagatgctgcagaaacgtgtggagcactacatt

SEQ ID NO: 141561 - DNA, 4054 bp, Homo sapiens
  Payload ID: 7839
  Gene Symbol: HYAL2
  Gene Name: hyaluronoglucosaminidase 2
  Uniprot ID: Q12891
  ENST ID: ENST00000447092
  CDS Start-End: 2294-3715
gaatggggtttatcaagtcctcggcgagctgcccaacgggcagcagctggcgcaagtagcctagctggagaggctcaccccaggaaggagggaggccaccgacctactgggccgacggactcccacacaggtgagcccagagcagacggctggtctgcacccccacagatgcgctcgcagttgcactccctccctctcctggcgcccgggagggttaggggctggtggtgcagacgcgggcccttttgggagttgagtctcgcacaagggagcggacctaggaagagccgaggtggtttcgcacggggctcgccagggtctaagcctgccccccaccgggagaggcctgtggagcgtagggggcgctggatacgggatggaggccctgggagacccctcttgctggctttctcggaggtccagccagaaactgctgcaaggaatggaggcctcctcggggttgagagggagccgggctcccaaaggacctcagagactgggcagaaaaggacgggatctcagggatgactgtcccgccctgatgcgagtcagggagaggggcggccaacctcctagacccctctgagcttccctgaccccaaccctgcggccacgccgcgacccagagccgggctgccaggataacgactgcctcggcccttcctgggccggctaagaagcggtgcttggccccttccctcagtctggcagggggcggggcctccctttagacggcggaccagagaagggggcccctgattcgtgggaggcggggcactactctccaggagaccagaggtcgcctcaggtcaaagtccctttttccacacaaaggggacccacggctggcgtctacgttagggggtgcagagccagatctggtgctgccccctgccaacctcggagtaccacagcacctcctgatggccgaacggggcaacgcctcctcctattcccccccccccccttcccgtccccctgccttgtccctcacactgtctctttaaagggctggcggcgccgcggagctgggaggactgaaccaccggcctcgggctgcaggggaaacatttcaggctgactggcgctcgtggctgagactcccatagaaagcccggctcagaggggcattagggtcctaaatgggcggccacgtccctctgcagaggacctggggctcttcgagcccgaaacgaggcaccggcaccgagaaaggtggaccacaccttcccgccccgtccgcaagtccaatcccgggcccacctccgcactggagtcttaaagggccagcgtgcctgggggcggagccagcagaggcgctgagccgggccgcgcctgggcgaacggccggagcgggctgggctgggcccgggatggcggtggccctggcgccggtcccggtggcgccccgcgcgaggtgagggcgggcggtgcaaacctggcggctctctccccttgggctggggtctgaatccccgggggtgctcgcggagaggcgtcccagaaaccccacccccacccgaccgggcgcaggccccacgtgtggggcgggggcggggtcccgcacaaagacccggcggagcgcgctctagccctgagcggccgggcgggggaggcgagcgcgcgcattcccggtggcggtggagggaagggccgggcggccggcgccgccgtgggaggtccgctgcccctttgtccctacggggcctcctccaagccgggagagtgtcagcgctcgagagaaagtccggagagcctcactcttctgccgggcgagtgttacacggatagaagcctcccggcagcgttccttccagtttcgtagcctcttgacgagctgttccctgctttacccaaatgctgtcgtttctctggatcaagggttcttcacggtgtacagggtgggcatcagctgttcagggttctctgaaaccatgtactggatggtatgcaggcatatatgtgactctggtgagcccaaattatctagttcttagaagggtcacagacctaatagagatttgtgccgagccacaggctacctgctccagaaaagagccctgtgcttctggcagtgagttcccagggtgccttgtctgccctgcagtggcctgtggtctctcaaacctattacagccatgagcacagtgcccccacacagcatgggctttgggagcatagatgggcttgaggtgggcacttccagtattccctagactgacttgttctccccaacccttcttccagttcctgagctggtgccaggcaggtgacacctcctgcagcccccagcatgcgggcaggcccaggccccaccgttacattggccctggtgctggcggtgtcatgggccatggagctcaagcccacagcaccacccatcttcactggccggccctttgtggtagcgtgggacgtgcccacacaggactgtggcccacgcctcaaggtgccactggacctgaatgcctttgatgtgcaggcctcacctaatgagggttttgtgaaccagaatattaccatcttctaccgcgaccgtctaggcctgtatccacgcttcgattctgccggaaggtctgtgcatggtggtgtgccacagaatgtcagcctttgggcacaccggaagatgctgcagaaacgtgtggagcactacattcggacacaggagtctgcggggctggcggtcatcgactgggaggactggcgacctgtgtgggtgcgcaactggcaggacaaagatgtgtatcgccggttatcacgccagctagtggccagtcgtcaccctgactggcctccagaccgcatagtcaaacaggcacaatatgagtttgagttcgcagcacagcagttcatgctggagacactgcgttatgtcaaggcagtgcggccccggcacctctggggcttctacctctttcctgactgctacaatcatgattatgtgcagaactgggagagctacacaggccgctgccctgatgttgaggtggcccgcaatgaccagctggcctggctgtgggctgagagcacggccctcttcccgtctgtctacctggacgagacacttgcttcctcccgccatggccgcaactttgtgagcttccgtgttcaggaggcccttcgtgtggctcgcacccaccatgccaaccatgcactcccagtctacgtcttcacacgacccacctacagccgcaggctcacggggcttagtgagatggacctcatctctaccattggcgagagtgcggccctgggcgcagctggtgtcatcctctggggtgacgcggggtacaccacaagcacggagacctgccagtacctcaaagattacctgacacggctgctggtcccctacgtggtcaatgtgtcctgggccacccaatattgcagccgggcccagtgccatggccatgggcgctgtgtgcgccgcaaccccagtgccagtaccttcctgcatctcagcaccaacagtttccgcctagtgcctggccatgcacctggtgaaccccagctgcgacctgtgggggagctcagttgggccgacattgaccacctgcagacacacttccgctgccagtgctacttgggctggagtggtgagcaatgccagtgggaccataggcaggcagctggaggtgccagcgaggcctgggctgggtcccacctcaccagtctgctggctctggcagccctggcctttacctggaccttgtaggggtctcctgcctagctgcctagcaagctggcctctaccacaagggctctcttaggcatgtaggaccctgcagggggtggacaaactggagtctggagtgggcagagcccccaggaagcccaggagggcatccataccagctcgcacccccctgttctaagggggaggggaagtccctgggaggccccttctctccctgccagaggggaaggagggtacagctgggctggggaggacctgaccctactcccttgccctagatagtttattattattattattttggggtctcttttgtaaattaaacataaaacaattgcttctctgcttggattttgt

SEQ ID NO: 141562 - DNA, 301 bp, Homo sapiens
  Payload ID: 7839
  Gene Symbol: HYAL2
  Gene Name: hyaluronoglucosaminidase 2
  ENST ID: ENST00000415028
  CDS Start-End: 159-301
ggtggcggtggagggaagggccgggcggccggcgccgccgtgggaggtccgctgcccctttgtccctacggggcctcctccaagccgggagagtgtcagcgctcgagagaaattcctgagctggtgccaggcaggtgacacctcctgcagcccccagcatgcgggcaggcccaggccccaccgttacattggccctggtgctggcggtgtcatgggccatggagctcaagcccacagcaccacccatcttcactggccggccctttgtggtagcgtgggacgtgcccacacaggactgtgg

SEQ ID NO: 141563 - DNA, 2318 bp, Homo sapiens
  Payload ID: 7839
  Gene Symbol: HYAL2
  Gene Name: hyaluronoglucosaminidase 2
  Uniprot ID: Q12891
  ENST ID: ENST00000442581
  CDS Start-End: 580-2001
gggtttatcaagtcctcggcgagctgcccaacgggcagcagctggcgcaagtagcctagctggagaggctcaccccaggaaggagggaggccaccgacctactgggccgacggactcccacacagggctggcggcgccgcggagctgggaggactgaaccaccggcctcgggctgcaggggaaacatttcaggctgactggcgctcgtggctgagactcccatagaaagcccggctcagaggggcattagggtcctaaatgggcggccacgtccctctgcagaggacctggggctcttcgagcccgaaacgaggcaccggcaccgagaaaggtggaccacaccttcccgccccgtccgcaagtccaatcccgggcccacctccgcactggagtcttaaagggccagcgtgcctgggggcggagccagcagaggcgctgagccgggccgcgcctgggcgaacggccggagcgggctgggctgggcccgggatggcggtggccctggcgccggtcccggtggcgccccgcgcgagttcctgagctggtgccaggcaggtgacacctcctgcagcccccagcatgcgggcaggcccaggccccaccgttacattggccctggtgctggcggtgtcatgggccatggagctcaagcccacagcaccacccatcttcactggccggccctttgtggtagcgtgggacgtgcccacacaggactgtggcccacgcctcaaggtgccactggacctgaatgcctttgatgtgcaggcctcacctaatgagggttttgtgaaccagaatattaccatcttctaccgcgaccgtctaggcctgtatccacgcttcgattctgccggaaggtctgtgcatggtggtgtgccacagaatgtcagcctttgggcacaccggaagatgctgcagaaacgtgtggagcactacattcggacacaggagtctgcggggctggcggtcatcgactgggaggactggcgacctgtgtgggtgcgcaactggcaggacaaagatgtgtatcgccggttatcacgccagctagtggccagtcgtcaccctgactggcctccagaccgcatagtcaaacaggcacaatatgagtttgagttcgcagcacagcagttcatgctggagacactgcgttatgtcaaggcagtgcggccccggcacctctggggcttctacctctttcctgactgctacaatcatgattatgtgcagaactgggagagctacacaggccgctgccctgatgttgaggtggcccgcaatgaccagctggcctggctgtgggctgagagcacggccctcttcccgtctgtctacctggacgagacacttgcttcctcccgccatggccgcaactttgtgagcttccgtgttcaggaggcccttcgtgtggctcgcacccaccatgccaaccatgcactcccagtctacgtcttcacacgacccacctacagccgcaggctcacggggcttagtgagatggacctcatctctaccattggcgagagtgcggccctgggcgcagctggtgtcatcctctggggtgacgcggggtacaccacaagcacggagacctgccagtacctcaaagattacctgacacggctgctggtcccctacgtggtcaatgtgtcctgggccacccaatattgcagccgggcccagtgccatggccatgggcgctgtgtgcgccgcaaccccagtgccagtaccttcctgcatctcagcaccaacagtttccgcctagtgcctggccatgcacctggtgaaccccagctgcgacctgtgggggagctcagttgggccgacattgaccacctgcagacacacttccgctgccagtgctacttgggctggagtggtgagcaatgccagtgggaccataggcaggcagctggaggtgccagcgaggcctgggctgggtcccacctcaccagtctgctggctctggcagccctggcctttacctggaccttgtaggggtctcctgcctagctgcctagcaagctggcctctaccacaagggctctcttaggcatgtaggaccctgcagggggtggacaaactggagtctggagtgggcagagcccccaggaagcccaggagggcatccataccagctcgcacccccctgttctaagggggaggggaagtccctgggaggccccttctctccctgccagaggggaaggagggtacagctgggctggggaggacctgaccctactcccttgccctagatagtttattattattattattttggggtctcttttgtaaattaaacataaaacaat

SEQ ID NO: 141564 - DNA, 357 bp, Homo sapiens
  Payload ID: 7839
  Gene Symbol: HYAL2
  Gene Name: hyaluronoglucosaminidase 2
  ENST ID: ENST00000426286
  CDS Start-End: 114-357
gagctgttccctgctttacccaaatgctgtcgtttctctggatcaagggttcttcacggtgtacaggttcctgagctggtgccaggcaggtgacacctcctgcagcccccagcatgcgggcaggcccaggccccaccgttacattggccctggtgctggcggtgtcatgggccatggagctcaagcccacagcaccacccatcttcactggccggccctttgtggtagcgtgggacgtgcccacacaggactgtggcccacgcctcaaggtgccactggacctgaatgcctttgatgtgcaggcctcacctaatgagggttttgtgaaccagaatattaccatcttctaccgcgacc

SEQ ID NO: 141565 - DNA, 571 bp, Homo sapiens
  Payload ID: 7839
  Gene Symbol: HYAL2
  Gene Name: hyaluronoglucosaminidase 2
  ENST ID: ENST00000428028
  CDS Start-End: 342-571
agcagctggcgcaagtagcctagctggagaggctcaccccaggaaggagggaggccaccgacctactgggccgacggactcccacacagggctggcggcgccgcggagctgggaggactgaaccaccggcctcgggctgcaggggaaacatttcaggctgactggcgctcgtggctgagactcccatagaaagcccggctcagaggggcattagggtcctaaatgggcggccacgtccctctgcagaggacctggggctcttcgagcccgaaacgaggcaccggcaccgagaaagttcctgagctggtgccaggcaggtgacacctcctgcagcccccagcatgcgggcaggcccaggccccaccgttacattggccctggtgctggcggtgtcatgggccatggagctcaagcccacagcaccacccatcttcactggccggccctttgtggtagcgtgggacgtgcccacacaggactgtggcccacgcctcaaggtgccactggacctgaatgcctttgatgtgcaggcctcacctaatgagggttttgtgaaccagaatattaccat

SEQ ID NO: 141566 - DNA, 1942 bp, Homo sapiens
  Payload ID: 7840
  Gene Symbol: HYAL3
  Gene Name: hyaluronoglucosaminidase 3
  Uniprot ID: O43820
  ENST ID: ENST00000336307
  CDS Start-End: 274-1527
agccagggtagagactgagtcggcgcctggcgggtgttgtgacgcgcaaaccaggggcgggttctaagcggcgacgcgcgggtgctgggaggccttagaacgccgtggcgtgccgcaggacgcgacggctgcagaacatccgccgcaccgctgggggccaacgttgtcggaccgaggagtccgaggtggcgactgagtgagatacccagctgtgcggagctaggacgcggaacatcccagaggccagcatcaacatgtttccatccttggggaatgaccacgcaactgggcccagccctggtgctgggggtggccctgtgcctgggttgtggccagcccctaccacaggtccctgaacgccccttctctgtgctgtggaatgtaccctcagcacactgtgaggcccgctttggtgtgcacctgccactcaatgctctgggcatcatagccaaccgtggccagcattttcacggtcagaacatgaccattttctacaagaaccaactcggcctctatccctactttggacccaggggcacagctcacaatgggggcatcccccaggctttgccccttgaccgccacctggcactggctgcctaccagatccaccacagcctgagacctggctttgctggcccagcagtgctggattgggaggagtggtgtccactctgggctgggaactggggccgccgccgagcttatcaggcagcctcttgggcttgggcacagcaggtattccctgacctggaccctcaggagcagctctacaaggcctatactggctttgagcaggcggcccgtgcactgatggaggatacgctgcgggtggcccaggcactacggccccatggactctggggcttctatcactacccagcctgtggcaatggctggcatagtatggcttccaactataccggccgctgccatgcagccacccttgcccgcaacactcaactgcattggctctgggccgcctccagtgccctcttccccagcatctacctcccacccaggctgccacctgcccaccaccaggcctttgtccgacatcgcctggaggaggccttccgtgtggcccttgttgggcaccgacatcccctgcctgtcctggcctatgtccgcctcacacaccggagatctgggaggttcctgtcccaggatgaccttgtgcagtccattggtgtgagtgcagcactaggggcagccggcgtggtgctctggggggacctgagcctctccagctctgaggaggagtgctggcatctccatgactacctggtggacaccttgggcccctatgtgatcaatgtgaccagggcagcgatggcctgcagtcaccagcggtgccatggccacgggcgctgtgcccggcgagatccaggacagatggaagcctttctacacctgtggccagacggcagccttggagattggaagtccttcagctgccactgttactggggctgggctggccccacctgccaggagcccaggcctgggcctaaagaagcagtataaagccagggcccctgccactgcctcttcttttccctgctgccacttttccagtcctggaactactctgtcccactcttgctctattcagtttacagtcaaccctcccaagcacacaccccgcttcccttggaatccctgaggggtagaaggggccagaaaaaacgcttataaaaccagaggccctctgagatcatgtgagtcctccatggcaaggaagcagttccagggagagtcaggttccagctagttagggctgccagcctagggctttgtgcctacacctcactaagcccatggagaggtcacagatgggccgtgcacgggcagatgggccccaaaaaatcttggcgaaggtcggtaaagtgctaagctgttgtctgcactctttcatcataaagtcacttttttccactgc

SEQ ID NO: 141567 - DNA, 1635 bp, Homo sapiens
  Payload ID: 7840
  Gene Symbol: HYAL3
  Gene Name: hyaluronoglucosaminidase 3
  Uniprot ID: O43820
  ENST ID: ENST00000359051
  CDS Start-End: 57-1220
gaccaaagggtgcggctgctgcagaggtggctgatgcaggtttccatccttggggaatgaccacgcaactgggcccagccctggtgctgggggtggccctgtgcctgggttgtggccagcccctaccacaggtccctgaacgccccttctctgtgctgtggaatgtaccctcagcacactgtgaggcccgctttggtgtgcacctgccactcaatgctctgggcatcatagccaaccgtggccagcattttcacggtcagaacatgaccattttctacaagaaccaactcggcctctatccctactttggacccaggggcacagctcacaatgggggcatcccccaggctttgccccttgaccgccacctggcactggctgcctaccagatccaccacagcctgagacctggctttgctggcccagcagtgctggattgggaggagtggtgtccactctgggctgggaactggggccgccgccgagcttatcaggcagcctcttgggcttgggcacagcaggtattccctgacctggaccctcaggagcagctctacaaggcctatactggctttgagcaggcggcccgtgcactgatggaggatacgctgcgggtggcccaggcactacggccccatggactctggggcttctatcactacccagcctgtggcaatggctggcatagtatggcttccaactataccggccgctgccatgcagccacccttgcccgcaacactcaactgcattggctctgggccgcctccagtgccctcttccccagcatctacctcccacccaggctgccacctgcccaccaccaggcctttgtccgacatcgcctggaggaggccttccgtgtggcccttgttgggcaccgacatcccctgcctgtcctggcctatgtccgcctcacacaccggagatctgggaggttcctgtcccaggaggagtgctggcatctccatgactacctggtggacaccttgggcccctatgtgatcaatgtgaccagggcagcgatggcctgcagtcaccagcggtgccatggccacgggcgctgtgcccggcgagatccaggacagatggaagcctttctacacctgtggccagacggcagccttggagattggaagtccttcagctgccactgttactggggctgggctggccccacctgccaggagcccaggcctgggcctaaagaagcagtataaagccagggcccctgccactgcctcttcttttccctgctgccacttttccagtcctggaactactctgtcccactcttgctctattcagtttacagtcaaccctcccaagcacacaccccgcttcccttggaatccctgaggggtagaaggggccagaaaaaacgcttataaaaccagaggccctctgagatcatgtgagtcctccatggcaaggaagcagttccagggagagtcaggttccagctagttagggctgccagcctagggctttgtgcctacacctcactaagcccatggagaggtcacagatgggccgtgcacgggcagatgggccccaaaaaatcttggcgaaggtcggtaaagtgctaagctgttgtctgcactctttcatcataaagtcacttttttccactgc

SEQ ID NO: 141568 - DNA, 545 bp, Homo sapiens
  Payload ID: 7840
  Gene Symbol: HYAL3
  Gene Name: hyaluronoglucosaminidase 3
  ENST ID: ENST00000435141
  CDS Start-End: 67-545
aaaaggcccaagagacccctggggaaacatgctttccccagctcctcctgtttccatccttggggaatgaccacgcaactgggcccagccctggtgctgggggtggccctgtgcctgggttgtggccagcccctaccacaggtccctgaacgccccttctctgtgctgtggaatgtaccctcagcacactgtgaggcccgctttggtgtgcacctgccactcaatgctctgggcatcatagccaaccgtggccagcattttcacggtcagaacatgaccattttctacaagaaccaactcggcctctatccctactttggacccaggggcacagctcacaatgggggcatcccccaggctttgccccttgaccgccacctggcactggctgcctaccagatccaccacagcctgagacctggctttgctggcccagcagtgctggattgggaggagtggtgtccactctgggctgggaactggggccgccgccgagcttatcaggcagcctcttgggcttgggcacagcaggtattccctgacct

SEQ ID NO: 141569 - DNA, 1402 bp, Homo sapiens
  Payload ID: 7840
  Gene Symbol: HYAL3
  Gene Name: hyaluronoglucosaminidase 3
  Uniprot ID: O43820
  ENST ID: ENST00000450982
  CDS Start-End: 38-1201
ccagaggccagcatcaacatgtttccatccttggggaatgaccacgcaactgggcccagccctggtgctgggggtggccctgtgcctgggttgtggccagcccctaccacaggtccctgaacgccccttctctgtgctgtggaatgtaccctcagcacactgtgaggcccgctttggtgtgcacctgccactcaatgctctgggcatcatagccaaccgtggccagcattttcacggtcagaacatgaccattttctacaagaaccaactcggcctctatccctactttggacccaggggcacagctcacaatgggggcatcccccaggctttgccccttgaccgccacctggcactggctgcctaccagatccaccacagcctgagacctggctttgctggcccagcagtgctggattgggaggagtggtgtccactctgggctgggaactggggccgccgccgagcttatcaggcagcctcttgggcttgggcacagcaggtattccctgacctggaccctcaggagcagctctacaaggcctatactggctttgagcaggcggcccgtgcactgatggaggatacgctgcgggtggcccaggcactacggccccatggactctggggcttctatcactacccagcctgtggcaatggctggcatagtatggcttccaactataccggccgctgccatgcagccacccttgcccgcaacactcaactgcattggctctgggccgcctccagtgccctcttccccagcatctacctcccacccaggctgccacctgcccaccaccaggcctttgtccgacatcgcctggaggaggccttccgtgtggcccttgttgggcaccgacatcccctgcctgtcctggcctatgtccgcctcacacaccggagatctgggaggttcctgtcccaggaggagtgctggcatctccatgactacctggtggacaccttgggcccctatgtgatcaatgtgaccagggcagcgatggcctgcagtcaccagcggtgccatggccacgggcgctgtgcccggcgagatccaggacagatggaagcctttctacacctgtggccagacggcagccttggagattggaagtccttcagctgccactgttactggggctgggctggccccacctgccaggagcccaggcctgggcctaaagaagcagtataaagccagggcccctgccactgcctcttcttttccctgctgccacttttccagtcctggaactactctgtcccactcttgctctattcagtttacagtcaaccctcccaagcacacaccccgcttcccttggaatccctgaggggtagaaggggccagaaaaaacgcttataaaaccagaggccctctgagatcatgtgagtc

SEQ ID NO: 141570 - DNA, 959 bp, Homo sapiens
  Payload ID: 7840
  Gene Symbol: HYAL3
  Gene Name: hyaluronoglucosaminidase 3
  Uniprot ID: O43820
  ENST ID: ENST00000415204
  CDS Start-End: 188-694
gcggcgacgcgcgggtgctgggaggccttagaacgccgtggcgtgccgcaggacgcgacggctgcagaacatccgccgcaccgctgggggccaacgttgtcggaccgaggagtccgaggtggcgactgagtgagatacccagctgtgcggagctaggacgcggaacatcccagaggccagcatcaacatgctgccacctgcccaccaccaggcctttgtccgacatcgcctggaggaggccttccgtgtggcccttgttgggcaccgacatcccctgcctgtcctggcctatgtccgcctcacacaccggagatctgggaggttcctgtcccaggatgaccttgtgcagtccattggtgtgagtgcagcactaggggcagccggcgtggtgctctggggggacctgagcctctccagctctgaggaggagtgctggcatctccatgactacctggtggacaccttgggcccctatgtgatcaatgtgaccagggcagcgatggcctgcagtcaccagcggtgccatggccacgggcgctgtgcccggcgagatccaggacagatggaagcctttctacacctgtggccagacggcagccttggagattggaagtccttcagctgccactgttactggggctgggctggccccacctgccaggagcccaggcctgggcctaaagaagcagtataaagccagggcccctgccactgcctcttcttttccctgctgccacttttccagtcctggaactactctgtcccactcttgctctattcagtttacagtcaaccctcccaagcacacaccccgcttcccttggaatccctgaggggtagaaggggccagaaaaaacgcttataaaaccagaggccctctgagatcatgtgagtcctccatggcaaggaagcagttccagggagagtcaggttccagctagttagggctgccagcctag

SEQ ID NO: 141571 - DNA, 636 bp, Homo sapiens
  Payload ID: 7840
  Gene Symbol: HYAL3
  Gene Name: hyaluronoglucosaminidase 3
  Uniprot ID: O43820
  ENST ID: ENST00000513170
  CDS Start-End: 19-435
ccagaggccagcatcaacatgctgccacctgcccaccaccaggcctttgtccgacatcgcctggaggaggccttccgtgtggcccttgttgggcaccgacatcccctgcctgtcctggcctatgtccgcctcacacaccggagatctgggaggttcctgtcccaggaggagtgctggcatctccatgactacctggtggacaccttgggcccctatgtgatcaatgtgaccagggcagcgatggcctgcagtcaccagcggtgccatggccacgggcgctgtgcccggcgagatccaggacagatggaagcctttctacacctgtggccagacggcagccttggagattggaagtccttcagctgccactgttactggggctgggctggccccacctgccaggagcccaggcctgggcctaaagaagcagtataaagccagggcccctgccactgcctcttcttttccctgctgccacttttccagtcctggaactactctgtcccactcttgctctattcagtttacagtcaaccctcccaagcacacaccccgcttcccttggaatccctgaggggtagaaggggccagaaaaaacgcttataaaaccagaggccctctgagatcatgtgagtc

SEQ ID NO: 141572 - DNA, 1696 bp, Homo sapiens
  Payload ID: 7840
  Gene Symbol: HYAL3
  Gene Name: hyaluronoglucosaminidase 3
  Uniprot ID: O43820
  ENST ID: ENST00000621157
  CDS Start-End: 29-1282
ggctgatgcaggtttccatccttggggaatgaccacgcaactgggcccagccctggtgctgggggtggccctgtgcctgggttgtggccagcccctaccacaggtccctgaacgccccttctctgtgctgtggaatgtaccctcagcacactgtgaggcccgctttggtgtgcacctgccactcaatgctctgggcatcatagccaaccgtggccagcattttcacggtcagaacatgaccattttctacaagaaccaactcggcctctatccctactttggacccaggggcacagctcacaatgggggcatcccccaggctttgccccttgaccgccacctggcactggctgcctaccagatccaccacagcctgagacctggctttgctggcccagcagtgctggattgggaggagtggtgtccactctgggctgggaactggggccgccgccgagcttatcaggcagcctcttgggcttgggcacagcaggtattccctgacctggaccctcaggagcagctctacaaggcctatactggctttgagcaggcggcccgtgcactgatggaggatacgctgcgggtggcccaggcactacggccccatggactctggggcttctatcactacccagcctgtggcaatggctggcatagtatggcttccaactataccggccgctgccatgcagccacccttgcccgcaacactcaactgcattggctctgggccgcctccagtgccctcttccccagcatctacctcccacccaggctgccacctgcccaccaccaggcctttgtccgacatcgcctggaggaggccttccgtgtggcccttgttgggcaccgacatcccctgcctgtcctggcctatgtccgcctcacacaccggagatctgggaggttcctgtcccaggatgaccttgtgcagtccattggtgtgagtgcagcactaggggcagccggcgtggtgctctggggggacctgagcctctccagctctgaggaggagtgctggcatctccatgactacctggtggacaccttgggcccctatgtgatcaatgtgaccagggcagcgatggcctgcagtcaccagcggtgccatggccacgggcgctgtgcccggcgagatccaggacagatggaagcctttctacacctgtggccagacggcagccttggagattggaagtccttcagctgccactgttactggggctgggctggccccacctgccaggagcccaggcctgggcctaaagaagcagtataaagccagggcccctgccactgcctcttcttttccctgctgccacttttccagtcctggaactactctgtcccactcttgctctattcagtttacagtcaaccctcccaagcacacaccccgcttcccttggaatccctgaggggtagaaggggccagaaaaaacgcttataaaaccagaggccctctgagatcatgtgagtcctccatggcaaggaagcagttccagggagagtcaggttccagctagttagggctgccagcctagggctttgtgcctacacctcactaagcccatggagaggtcacagatgggccgtgcacgggcagatgggccccaaaaaatcttggcgaaggtcggtaaagtgctaagctgttgtctgcactctttcatcataaagtcacttttttccactg

SEQ ID NO: 141573 - DNA, 2407 bp, Homo sapiens
  Payload ID: 7841
  Gene Symbol: HYAL4
  Gene Name: hyaluronoglucosaminidase 4
  Uniprot ID: Q2M3T9
  ENST ID: ENST00000223026
  CDS Start-End: 639-2084
tctttattttatttatgctatctatttcttttccttttttttttttttttttttttttgagatgaagtcttactctgttgcccaggctagagtgtagtggtgtgatctcggctcactgcaaccactgcctcctgggttcaagtgattctcctgacttaacctcctgagtagctgggactacaagagcatgccatcatgcccagctaatttttgtatttttagtagagatggggtttcaccatattggccagaatggttttgcattcctgacctcaagtgatctgcctgcctcagcctcccaaaatgttgggttacaggggtgagccaccgtgccttgctatttatgccatctatttcactgaagattccgcctctcatttcttgagtcattttttttaaatttccttaaattggacttcacatttttctgatgcctccttgtttagcttaataactgaccttctgaattcttttttaggaaaatcaggaatttcttcttggtttggagccattgctggacatcctttgccattcaacctctgatttgcacaaggtgactaaaggaccagcagcaaacaaaagcaaaggtcttctagagtgcactaaagcagaagataacgtaacatttttatcttaccatgaaagtattatctgaaggacagttaaagctttgtgttgttcaaccagtacatctcacttcatggctccttatattttttattctaaagtctatctcttgtctaaaacctgctcgacttccaatttatcaaaggaaaccttttatagctgcttggaatgctccaacagatcagtgtttgataaaatataatttaagactaaatttgaaaatgtttcctgtgattggaagcccactggccaaggccagggggcaaaatgtcactatattttatgtcaacagattgggatactatccgtggtatacatcacaaggggtccccattaatggaggtctcccacagaacataagtttacaagtacatctggaaaaagctgaccaagatattaattattacatccctgctgaagatttcagtggacttgctgttatagattgggaatattggcgaccacagtgggcccggaactggaactcaaaagatgtttacagacagaagtcaagaaagcttatttccgatatgggaaagaatgtatcagctaccgatattgaatatttagccaaagtgacctttgaagaaagtgcaaaagctttcatgaaggaaaccatcaaattgggaattaagagccgacccaaaggcctttggggttattatttatatcctgattgccacaattataacgtttatgccccaaactactctgggtcatgcccagaagacgaagtcttgaggaacaatgagctctcttggctctggaacagcagtgctgctttatatccttctatcggtgtctggaaatcccttggagacagtgaaaacattttgcgcttctccaaatttcgggtgcatgaatccatgaggatctccaccatgacatctcatgattatgctctgcctgtatttgtctacacaaggctagggtacagagatgaacctttatttttcctttctaagcaagatctagtcagcaccataggagaaagtgctgccttgggagctgcaggcattgttatttggggagacatgaatttaactgcatccaaggccaactgtacaaaggtgaagcagtttgtgagttctgatttagggagctacatagccaatgtgaccagagctgctgaggtatgcagccttcacctctgcaggaacaatggcaggtgcataaggaagatgtggaacgcgcccagttaccttcacttgaaccctgcaagttaccacatagaggcctctgaggacggggagtttactgtgaaaggaaaagcatctgatacagacctggcagtgatggcagatacattttcctgtcattgttatcagggatatgaaggagctgattgcagagaaataaagacggctgatggctgctctggggtttccccttctcctggttcactaatgacactttgtctactgcttttagcaagttatcgaagcattcagttgtgagataattgagtttaaagggaattgtgtggcctctagcctagtcatttaaagaaggatgtaacttataacattttttttctcttatgaattctattgagagatattataagtagacattatgtatgtcacttaacataaacagaaacattattttatttgcctccagtctggctaggaaaccagatctggggtaaagtcaatgtacacttcctccttattggaatatttaagttgcatttaaactaaaactagtataatttagtcttttcatgaatgtacatacataaaattatacataaaaatattaaattattcatttcaaa

SEQ ID NO: 141574 - DNA, 1616 bp, Homo sapiens
  Payload ID: 7841
  Gene Symbol: HYAL4
  Gene Name: hyaluronoglucosaminidase 4
  Uniprot ID: Q2M3T9
  ENST ID: ENST00000476325
  CDS Start-End: 141-1586
ttgtctgaaccacgcacaggacatcctttgccattcaacctctgatttgcacaaggtgactaaaggaccagcagcaaacaaaagcaaaggtcttctagagtgcactaaagcagaagataacgtaacatttttatcttaccatgaaagtattatctgaaggacagttaaagctttgtgttgttcaaccagtacatctcacttcatggctccttatattttttattctaaagtctatctcttgtctaaaacctgctcgacttccaatttatcaaaggaaaccttttatagctgcttggaatgctccaacagatcagtgtttgataaaatataatttaagactaaatttgaaaatgtttcctgtgattggaagcccactggccaaggccagggggcaaaatgtcactatattttatgtcaacagattgggatactatccgtggtatacatcacaaggggtccccattaatggaggtctcccacagaacataagtttacaagtacatctggaaaaagctgaccaagatattaattattacatccctgctgaagatttcagtggacttgctgttatagattgggaatattggcgaccacagtgggcccggaactggaactcaaaagatgtttacagacagaagtcaagaaagcttatttccgatatgggaaagaatgtatcagctaccgatattgaatatttagccaaagtgacctttgaagaaagtgcaaaagctttcatgaaggaaaccatcaaattgggaattaagagccgacccaaaggcctttggggttattatttatatcctgattgccacaattataacgtttatgccccaaactactctgggtcatgcccagaagacgaagtcttgaggaacaatgagctctcttggctctggaacagcagtgctgctttatatccttctatcggtgtctggaaatcccttggagacagtgaaaacattttgcgcttctccaaatttcgggtgcatgaatccatgaggatctccaccatgacatctcatgattatgctctgcctgtatttgtctacacaaggctagggtacagagatgaacctttatttttcctttctaagcaagatctagtcagcaccataggagaaagtgctgccttgggagctgcaggcattgttatttggggagacatgaatttaactgcatccaaggccaactgtacaaaggtgaagcagtttgtgagttctgatttagggagctacatagccaatgtgaccagagctgctgaggtatgcagccttcacctctgcaggaacaatggcaggtgcataaggaagatgtggaacgcgcccagttaccttcacttgaaccctgcaagttaccacatagaggcctctgaggacggggagtttactgtgaaaggaaaagcatctgatacagacctggcagtgatggcagatacattttcctgtcattgttatcagggatatgaaggagctgattgcagagaaataaagacggctgatggctgctctggggtttccccttctcctggttcactaatgacactttgtctactgcttttagcaagttatcgaagcattcagttgtgagataattgagtttaaagggaattgtgtggc

SEQ ID NO: 141575 - DNA, 314 bp, Homo sapiens
  Payload ID: 7841
  Gene Symbol: HYAL4
  Gene Name: hyaluronoglucosaminidase 4
  ENST ID: ENST00000488323
  CDS Start-End: 178-314
ccagtgagatgaaccaggaaaatcaggaatttcttcttggtttggagccattgctggacatcctttgccattcaacctctgatttgcacaaggtgactaaaggaccagcagcaaacaaaagcaaaggtcttctagagtgcactaaagcagaagataacgtaacatttttatcttaccatgaaagtattatctgaaggacagttaaagctttgtgttgttcaaccagtacatctcacttcatggctccttatattttttattctaaagtctatctcttgtctaaaacctgctcgacttccaatttatcaaaggaa

SEQ ID NO: 141576 - DNA, 589 bp, Homo sapiens
  Payload ID: 7841
  Gene Symbol: HYAL4
  Gene Name: hyaluronoglucosaminidase 4
  ENST ID: ENST00000489978
  CDS Start-End: 399-589
tatccgagggcctttgggccattatgctgtgaatgtgacatctgcagccaagctctgcagtcagagtctatgtaacaatcatggaagagtattcgaaaaacacctgagtcctccttctatctgcatatgcctgaaagcagtgtcaggtccctcagctgcaggtctgttggagtttgctggaggtccattccagaccttgtttacctgggtatcaccagcggaggctgcagaaccgcaagaaaatcaggaatttcttcttggtttggagccattgctggacatcctttgccattcaacctctgatttgcacaaggtgactaaaggaccagcagcaaacaaaagcaaaggtcttctagagtgcactaaagcagaagataacgtaacatttttatcttaccatgaaagtattatctgaaggacagttaaagctttgtgttgttcaaccagtacatctcacttcatggctccttatattttttattctaaagtctatctcttgtctaaaacctgctcgacttccaatttatcaaaggaaaccttttatagctgcttggaatgctccaacagatcagtgtttgataaaatataa

SEQ ID NO: 141577 - DNA, 1609 bp, Homo sapiens
  Payload ID: 7841
  Gene Symbol: HYAL4
  Gene Name: hyaluronoglucosaminidase 4
  ENST ID: ENST00000483878
  CDS Start-End: 77-1126
ggaccagcagcaaacaaaagcaaaggtcttctagagtgcactaaagcagaagataacgtaacatttttatcttaccatgaaagtattatctgaaggacagttaaagctttgtgttgttcaaccagtacatctcacttcatggctccttatattttttattctaaagtctatctcttgtctaaaacctgctcgacttccaatttatcaaaggaaaccttttatagctgcttggaatgctccaacagatcagtgtttgataaaatataatttaagactaaatttgaaaatgtttcctgtgattggaagcccactggccaaggccagggggcaaaatgtcactatattttatgtcaacagattgggatactatccgtggtatacatcacaaggggtccccattaatggaggtctcccacagaacataagtttacaagtacatctggaaaaagctgaccaagatattaattattacatccctgctgaagatttcagtggacttgctgttatagattgggaatattggcgaccacagtgggcccggaactggaactcaaaagatgtttacagacagaagtcaagaaagcttatttccgatatgggaaagaatgtatcagctaccgatattgaatatttagccaaagtgacctttgaagaaagtgcaaaagctttcatgaaggaaaccatcaaattgggaattaagagccgacccaaaggcctttggggttattatttatatcctgattgccacaattataacgtttatgccccaaactactctgggtcatgcccagaagacgaagtcttgaggaacaatgagctctcttggctctggaacagcagtgctgctttatatccttctatcggtgtctggaaatcccttggagacagtgaaaacattttgcgcttctccaaatttcgggtgcatgaatccatgaggatctccaccatgacatctcatgattatgctctgcctgtatttgtctacacaaggctagggtacagagatgaacctttatttttcctttctaagcaagatctagtcagcaccataggagaaagtgctgccttgggagctgcaggcattgttatttggggagacatgaatttaactgcatccaaggtgtgatatttccaccccagtcccttggtggctcgtcagaagagcttcatcaggaaggccaactgtacaaaggtgaagcagtttgtgagttctgatttagggagctacatagccaatgtgaccagagctgctgaggtatgcagccttcacctctgcaggaacaatggcaggtgcataaggaagatgtggaacgcgcccagttaccttcacttgaaccctgcaagttaccacatagaggcctctgaggacggggagtttactgtgaaaggaaaagcatctgatacagacctggcagtgatggcagatacattttcctgtcattgttatcagggatatgaaggagctgattgcagagaaataaagacggctgatggctgctctggggtttccccttctcctggttcactaatgacactttgtctactgcttttagcaagttatcgaagcattcagttgtgagataattgagtttaaagggaattgtgtggc

SEQ ID NO: 141578 - DNA, 2792 bp, Homo sapiens
  Payload ID: 7842
  Gene Symbol:
  Gene Name: HYDIN
  ENST ID: ENST00000635365
  CDS Start-End: 1-455
gtccaaaggtggttacagaagaagaagtaaaccgaatgcttacaccctcagagttcctgaaggaaatgtccctgaccaccgagcagagactggcaaaaacacgtttgatgtgccgaccacagatcatcgaactcttagatatgggggaaacaacacatcagaagttttcaggaattgacctggatcaggcattattccagccctttccatcagaaattatatttcagaactacactccctgtgaagtctatgaagttccactgattttgaggaacaatgacaaaattccaaggttggtgaaagttgtggaagaaagttcgccttactttaaagtaatcagccccaaagatattggccacaaagtggctcctggagtgccttccatattccgaatcctctttactccagaggagaacaaggcctttctctatagaaccagctattggaactcttaatgtgggagagtccatgcaactggaagtggagtttgagccacagagtgtgggcgatcacagtggaagacttatcgtgtgttatgacacaggtgaaaaggtgtttgtatctctctatggagctgccatagacatgaatataaggctggataagaattccttgaccatcgagaaaacctacatatctctggccaatcagcgaactataaccattcacaatcgcagtaatatcattgcccatttcctgtggaaggtatttgctacccagcaagaagaggacagagaaaaatatagggcctgtgatgatctgatcaaagaggagaaggatgagactgatgagttttttgaagagtgcattactgatcctttactccgagaacatctttctgttctgtcccgaacctttgcgaatcagaggaggctggtgcagggagacagcaagctgttcttcaataacgttttcactgtggagcccctggaaggtgatgtctggcccaactcatcagctgaaatcaccgtgtactttaacccactagaagccaagctctatcaacagaccatttactgcgacattttaggccgagaaatccgtctgcccctccgaatcaaaggggaaggcatgggacctaagattcacttcaactttgaattgctggatattgggaaagttttcactggatctgcacattgttatgaggcgatactgtacaacaaaggcagcatcgatgctctcttcaacatgacccctccaacttcagctttgggggcctgctttgttttcagtcccaaggaaggcatcattgaaccaagtggagtccaagctatccagatctccttcagctctaccatcctgggaaactttgaagaagagttcctggtcaatgtcaatgggtcacctgagcctgtgaaactgaccattagaggctgtgtcattggacctaccttccattttaatgttccagctctgcactttggtgatgtttcctttgggtttcctcataccttgatatgttccctcaataatacctctttgatccccatgacttacaaactgcgtatccctggggatggccttggccataaaagcatttcatattgtgagcagcatgtggactacaaaagaccatcttggaccaaggaagaaatatcctcaatgaaaccaaaagaattcaccatctctcctgactgtggcaccattcgcccccagggatttgctgctatcagggtgacattatgctccaacactgtgcagaaatacgagctggcactcgtggtggacgtggagggcatcggagaagaggtgctggcgctcttaattacagcaaggtgtgttgtacctgccctccacctggtcaatacagaggtggactttgggcactgcttcctgaagtacccgtatgagaaaacactccagcttgccaatcaagatgacctcccaggattctatgaggtccagcctcaggtgtgtgaggaggtgcctactgtgctgttttccagccccacccccagcggggtcatctccccaagcagcaccatccacataccactggtcctggagacccaggtcactggagaacacagatccacggtttacatctcaatctttgggagccaggacccccctttggtatgtcacttaaagagcgctggagaaggcccagttatctacgtccatcccaatcaagtggacttcgggaatatctacgtcctaaaagactcttccaggattctcaacctatgcaaccagtccttcattcccgcatttttccaggcacacatggcacacaaaaaatccctttggacgattgaacccaatgaaggcatggttcctccagaaactgatgttcaactggcactgaccgccaacctgaatgacacactgacattcaaggactgtgttattttggacattgaaaatagcagtacctatcggattcctgttcaggcttccggaactggttccactattgtttcagataagccctttgctccagaactcaatttgggggcacattttagcctggatacccactattaccactttaagttgatcaacaagggacgtcggatccaacagttgttctggatgaatgatagcttccgaccccaggccaagctgagtaagaagggccgggttaagaagggacatgctcatgtccaaccccagcccagtggctctcaggagcccagggatccacagagccccgtgtttcatctccaccccgccagcatggagctgtacccaggccaggcaattgatgtgatactcgaaggctattctgctactcccaggatagtgaaagagaagctggtgtgccacgccatcatcggggcacagaa

SEQ ID NO: 141579 - DNA, 592 bp, Homo sapiens
  Payload ID: 7842
  Gene Symbol:
  Gene Name: HYDIN
  ENST ID: ENST00000635095
  CDS Start-End: 1-130
taattcaggacgtgtccagctggaattcagctgggtctcagaagatacctcaaaggcagtcagctttgcaaaaccagatcaccaaggattcccaacctgccacctggagagcaaggtccggtcctggtagcaaaagggcggagcaccttgcccatctgccattttgatctgaaagactcggactacataagtggccatcagcgcaacccagagctccgagggtccagtgggggagctctggatccaaacacccgggtgattgagttcaccactgtgggcataggagggaagaatctccggacctttaccatcctaaacccaaccaatagcacctactccttctgctggatctctgaagaaattgaaagtctccagaaccctgcagcattcacatgccttacagaaaagggcttcatccaccctgaaaagaaagccgagatcgtgttccagttcacacctttccatctgggcatcactgagtcatcatggaccttcctaattcccgagcacaacatcacagtccctttcctgctggtaggcaaaactaccgaacctctcatctctctgaacaagtcacacctcaacttcagct

SEQ ID NO: 141580 - DNA, 2953 bp, Homo sapiens
  Payload ID: 7842
  Gene Symbol:
  Gene Name: HYDIN
  ENST ID: ENST00000634987
  CDS Start-End: 15-2192
agctcgggcggcgcatggagagtgcgggcggcttcaagctgggtgagaaaaaaaaattactaaaaatgacaagtagaagacttgaggagtccatgggggctgttcagatgggattggtcaatatgttcaaaggatttcaaagcaaggttttgccacccctgagtccaaaggtggttacagaagaagaagtaaaccgaatgcttacaccctcagagttcctgaaggaaatgtccctgaccaccgagcagagactggcaaaaacacgtttgatgtgccgaccacagatcatcgaactcttagatatgggggaaacaacacatcagaagttttcaggaattgacctggatcaggcattattccagccctttccatcagaaattatatttcagaactacactccctgtgaagtctatgaagttccactgattttgaggaacaatgacaaaattccaaggttggtgaaagttgtggaagaaagttcgccttactttaaagtaatcagccccaaagatattggccacaaagtggctcctggagtgccttccatattccgaatcctctttactccagaggagaacaaggattacgcccatacgttgacctgtgttactgaaagagaaaagtttattgtacccatcaaagctagaggggcacgagccattctcgattttcctgacaagctgaatttttccacttgtcctgtcaaatacagcacccagaagattctgctggtacgaaacattggcaacaaaaatgctgtatttcacatcaaaacttgtaggcctttctctatagaaccagctattggaactcttaatgtgggagagtccatgcaactggaagtggagtttgagccacagagtgtgggcgatcacagtggaagacttatcgtgtgttatgacacaggtgaaaaggtgtttgtatctctctatggagctgccatagacatgaatataaggctggataagaattccttgaccatcgagaaaacctacatatctctggccaatcagcgaactataaccattcacaatcgcagtaatatcattgcccatttcctgtggaaggtatttgctacccagcaagaagaggacagagaaaaatatagggcctgtgatgatctgatcaaagaggagaaggatgagactgatgagttttttgaagagtgcattactgatcctttactccgagaacatctttctgttctgtcccgaacctttgcgaatcagaggaggctggtgcagggagacagcaagctgttcttcaataacgttttcactgtggagcccctggaaggtgatgtctggcccaactcatcagctgaaatcaccgtgtactttaacccactagaagccaagctctatcaacagaccatttactgcgacattttaggccgagaaatccgtctgcccctccgaatcaaaggggaaggcatgggacctaagattcacttcaactttgaattgctggatattgggaaagttttcactggatctgcacattgttatgaggcgatactgtacaacaaaggcagcatcgatgctctcttcaacatgacccctccaacttcagctttgggggcctgctttgttttcagtcccaaggaaggcatcattgaaccaagtggagtccaagctatccagatctccttcagctctaccatcctgggaaactttgaagaagagttcctggtcaatgtcaatgggtcacctgagcctgtgaaactgaccattagaggctgtgtcattggacctaccttccattttaatgttccagctctgcactttggtgatgtttcctttgggtttcctcataccttgatatgttccctcaataatacctctttgatccccatgacttacaaactgcgtatccctggggatggccttggccataaaagcatttcatattgtgagcagcatgtggactacaaaagaccatcttggaccaaggaagaaatatcctcaatgaaaccaaaagaattcaccatctctcctgactgtggcaccattcgcccccagggatttgctgctatcagggtgacattatgctccaacactgtgcagaaatacgagctggcactcgtggtggacgtggagggcatcggagaagaggtgctggcgctcttaattacagcaaggtattgctccccagcttgctcttctcctgagtcgcccccgagcctccagtaatgggctgcctcccagaaggcagctggcctgccaacccaagcacactgagtttgtcctgccttcctgggaagggaagttgaatctgacattcaaatgacaaagcagcaaatgtttctaaagcacctttggtggagataagaagaagtgtgtgtgttttgtagagtttaggcagagaatcctaagaatagtgaaaaaacgggtcagaccctctctaacgggtttgactttcaaagtatgtaaccagaaaggttttagcaggaagaggtgaagagctgctcatttttattttcatctttcaacatagtgctccagagttatgcaataggaaggtgatgctgtcagtcctgcagtggaagatccatagagccaagaggtccctgccccgggacactgttgctgtgacttgaatttcaggctaggagtgggcccccaagatgaggctcatctttaacaaggtatactcctcagaaccatctccaactcctctctctttttgagagaggcagctgggttaaaatcctggctcagccatttgttgactgtgtccttttgaccaagctacagtcattgcagtactgctgatgagggtggtggtgtcatcgactaatgatgatgtgatcccaaataaaatcctggggccacactcttcccaaagcaatcagtgtccagatctgggactttaagttgtatgtatgcaaatgctatgtataggaaatagagaaaatgacttaggaaaactgataatcatgctaatatgtcaa

SEQ ID NO: 141581 - DNA, 540 bp, Homo sapiens
  Payload ID: 7842
  Gene Symbol:
  Gene Name: HYDIN
  ENST ID: ENST00000634434
  CDS Start-End: 432-540
aacagctcgggcggcgcatggagagtgcgggcggcttcaagctgggtatggagcccctcagcggcggcggggtctagtctgactctgtcacccaggctggagtgcattggcaagatcccagctcactgcaacctctgcttctcaggctcaagccatcctcccacttcagtctcccaagtagccgggactaaaggtgtgcaccaccatgcacagctaatcttggtattttttgtagagatggggtttcaccatatttcacaggctggtcttaaactcctgagctcaagtgatctgcccacctcggcctcccaatgtgctggggaactattttctgttatctgttctggactcacacattctggatgactggaattctttggacccatatgagcctctgcaaagacattggtgagaaaaaaaaattactaaaaatgacaagtagaagacttgaggagtccatgggggctgttcagatgggattggtcaatatgttcaaaggatttcaaagcaaggttttgccacccctgagtccaaaggtgg

SEQ ID NO: 141582 - DNA, 609 bp, Homo sapiens
  Payload ID: 7842
  Gene Symbol:
  Gene Name: HYDIN
  ENST ID: ENST00000634726
  CDS Start-End: 491-609
ggcggcgcatggagagtgcgggcggcttcaagctgggtatggagcccctcagcggcggcggggtctgtgagttggacgcggggtcttggcggggaatggaggtagaataaacgtgggacccggagtgcaccaagagtctgactctgtcacccaggctggagtgcattggcaagatcccagctcactgcaacctctgcttctcaggctcaagccatcctcccacttcagtctcccaagtagccgggactaaaggtgtgcaccaccatgcacagctaatcttggtattttttgtagagatggggtttcaccatatttcacaggctggtcttaaactcctgagctcaagtgatctgcccacctcggcctcccaatgtgctggggaactattttctgttatctgttctggactcacacattctggatgactggaattctttggacccatatgagcctctgcaaagacattggtgagaaaaaaaaattactaaaaatgacaagtagaagacttgaggagtccatgggggctgttcagatgggattggtcaatatgttcaaaggatttcaaagcaaggttttgccacccctgagtccaaaggtggttacagaaga

SEQ ID NO: 141583 - DNA, 2595 bp, Homo sapiens
  Payload ID: 7842
  Gene Symbol:
  Gene Name: HYDIN
  ENST ID: ENST00000634415
  CDS Start-End: 1-1587
gtcaaatacagcacccagaagattctgctggtacgaaacattggcaacaaaaatgctgtatttcacatcaaaacttgtaggcctttctctatagaaccagctattggaactcttaatgtgggagagtccatgcaactggaagtggagtttgagccacagagtgtgggcgatcacagtggaagacttatcgtgtgttatgacacaggtgaaaaggtgtttgtatctctctatggagctgccatagacatgaatataaggctggataagaattccttgaccatcgagaaaacctacatatctctggccaatcagcgaactataaccattcacaatcgcagtaatatcattgcccatttcctgtggaaggtatttgctacccagcaagaagaggacagagaaaaatatagggcctgtgatgatctgatcaaagaggagaaggatgagactgatgagttttttgaagagtgcattactgatcctttactccgagaacatctttctgttctgtcccgaacctttgcgaatcagaggaggctggtgcagggagacagcaagctgttcttcaataacgttttcactgtggagcccctggaaggtgatgtctggcccaactcatcagctgaaatcaccgtgtactttaacccactagaagccaagctctatcaacagaccatttactgcgacattttaggccgagaaatccgtctgcccctccgaatcaaaggggaaggcatgggacctaagattcacttcaactttgaattgctggatattgggaaagttttcactggatctgcacattgttatgaggcgatactgtacaacaaaggcagcatcgatgctctcttcaacatgacccctccaacttcagctttgggggcctgctttgttttcagtcccaaggaaggcatcattgaaccaagtggagtccaagctatccagatctccttcagctctaccatcctgggaaactttgaagaagagttcctggtcaatgtcaatgggtcacctgagcctgtgaaactgaccattagaggctgtgtcattggacctaccttccattttaatgttccagctctgcactttggtgatgtttcctttgccacacaggaactgagagatcctcaagtactgattccctttcagcggtttcctcataccttgatatgttccctcaataatacctctttgatccccatgacttacaaactgcgtatccctggggatggccttggccataaaagcatttcatattgtgagcagcatgtggactacaaaagaccatcttggaccaaggaagaaatatcctcaatgaaaccaaaagaattcaccatctctcctgactgtggcaccattcgcccccagggatttgctgctatcagggtgacattatgctccaacactgtgcagaaatacgagctggcactcgtggtggacgtggagggcatcggagaagaggtgctggcgctcttaattacagcaagtgctccagagttatgcaataggaaggtgatgctgtcagtcctgcagtggaagatccatagagccaagaggtccctgccccgggacactgttgctgtgacttgaatttcaggctaggagtgggcccccaagatgaggctcatctttaacaaggtgtgttgtacctgccctccacctggtcaatacagaggtggactttgggcactgcttcctgaagtacccgtatgagaaaacactccagcttgccaatcaagatgacctcccaggattctatgaggtccagcctcaggtgtgtgaggaggtgcctactgtgctgttttccagccccacccccagcggggtcatctccccaagcagcaccatccacataccactggtcctggagacccaggtcactggagaacacagatccacggtttacatctcaatctttgggagccaggacccccctttggtatgtcacttaaagagcgctggagaaggcccagttatctacgtccatcccaatcaagtggacttcgggaatatctacgtcctaaaagactcttccaggattctcaacctatgcaaccagtccttcattcccgcatttttccaggcacacatggcacacaaaaaatccctttggacgattgaacccaatgaaggcatggttcctccagaaactgatgttcaactggcactgaccgccaacctgaatgacacactgacattcaaggactgtgttattttggacattgaaaatagcagtacctatcggattcctgttcaggcttccggaactggttccactattgtttcagataagccctttgctccagaactcaatttgggggcacattttaggtaaggaaatctcatggaccagtttttatagatatcacatatgttacatatgctgagcatcacctctactttagaaaattattttaagtaattaaaactagccacctcagtccctctcctttcccatcctcactcttccacctcctgatgtgtatgtcagcaacaagaagacattttctagccataacttggttgcattctctaatccgtgtccctctacatccgagaagaatatggtttgtaggaaatgcattcttttctcaaact

SEQ ID NO: 141584 - DNA, 3091 bp, Homo sapiens
  Payload ID: 7842
  Gene Symbol:
  Gene Name: HYDIN
  ENST ID: ENST00000635262
  CDS Start-End: 1-2502
cgaacctttgcgaatcagaggaggctggtgcagggagacagcaagctgttcttcaataacgttttcactgtggagcccctggaaggtgatgtctggcccaactcatcagctgaaatcaccgtgtactttaacccactagaagccaagctctatcaacagaccatttactgcgacattttaggccgagaaatccgtctgcccctccgaatcaaaggggaaggcatgggacctaagattcacttcaactttgaattgctggatattgggaaagttttcactggatctgcacattgttatgaggcgatactgtacaacaaaggcagcatcgatgctctcttcaacatgacccctccaacttcagctttgggggcctgctttgttttcagtcccaaggaaggcatcattgaaccaagtggagtccaagctatccagatctccttcagctctaccatcctgggaaactttgaagaagagttcctggtcaatgtcaatgggtcacctgagcctgtgaaactgaccattagaggctgtgtcattggacctaccttccattttaatgttccagctctgcactttggtgatgtttcctttgggtttcctcataccttgatatgttccctcaataatacctctttgatccccatgacttacaaactgcgtatccctggggatggccttggccataaaagcatttcatattgtgagcagcatgtggactacaaaagaccatcttggaccaaggaagaaatatcctcaatgaaaccaaaagaattcaccatctctcctgactgtggcaccattcgcccccagggatttgctgctatcagggtgacattatgctccaacactgtgcagaaatacgagctggcactcgtggtggacgtggagggcatcggagaagaggtgctggcgctcttaattacagcaaggtgtgttgtacctgccctccacctggtcaatacagaggtggactttgggcactgcttcctgaagtacccgtatgagaaaacactccagcttgccaatcaagatgacctcccaggattctatgaggtccagcctcaggtgtgtgaggaggtgcctactgtgctgttttccagccccacccccagcggggtcatctccccaagcagcaccatccacataccactggtcctggagacccaggtcactggagaacacagatccacggtttacatctcaatctttgggagccaggacccccctttggtatgtcacttaaagagcgctggagaaggcccagttatctacgtccatcccaatcaagtggacttcgggaatatctacgtcctaaaagactcttccaggattctcaacctatgcaaccagtccttcattcccgcatttttccaggcacacatggcacacaaaaaatccctttggacgattgaacccaatgaaggcatggttcctccagaaactgatgttcaactggcactgaccgccaacctgaatgacacactgacattcaaggactgtgttattttggacattgaaaatagcagtacctatcggattcctgttcaggcttccggaactggttccactattgtttcagataagccctttgctccagaactcaatttgggggcacattttagcctggatacccactattaccactttaagttgatcaacaagggacgtcggatccaacagttgttctggatgaatgatagcttccgaccccaggccaagctgagtaagaagggccgggttaagaagggacatgctcatgtccaaccccagcccagtggctctcaggagcccagggatccacagagccccgtgtttcatctccaccccgccagcatggagctgtacccaggccaggcaattgatgtgatactcgaaggctattctgctactcccaggaaacctaacagtatcctgaaacctgattaccagcccttggccataaagaacatttccaccctgcccgtgaacttgttgctgtcaacatctggacccttctttatatgtgagactgataaatccctgctgccggcaactcctgagcctattaaactggaaattgatgaagaaaaaaacctgctgatcaagtttgacccttcctacagaaacgatctgaacaactgggtggcagaagaaattctagcaattaagtatgtggaacaccctcagatagacagcctggacctgcgcggagaagtgcattaccccaacctcagctttgagacaaaggagctggattttggctgcatcctgaacgatactgagctcattcgctacgttaccatcaccaactgcagtccgttggttgtgaagtttcgctggttcttcttggtgaatgatgaggaaaatcagataaggtttgtgacattgccgaagaagccctacagtgccccagtgtcccagatggagtccatcccagcaacctcagaggctgccagcccaccagcaatcctagttacagtagagtcccccgagatggatttaaatgattttgttaagaaataaaaattagctctactgaaatagaaagaatatactcaagccagagccaggtggaggatcaggaatccctacagacctgtgaacagaatgagatgctttccattgggatagaagaagtgtttgatattttgcccctgtttggagtgttgcagccacacagtagccaccaaatatcgttcaccttctatggacacgctaacatcattgcacaagctaaagctctgtgtgaagtggaagaaggacccacctacgaaataacactgaagggagaggcgtccctggtcaactattcctttgacaccaaggatattcactacggattacagctgtttgaccatgtcacagagagggaaatcacgctgacgaacatggggaaagttggctttgagttcaaggttctgactgaccaccagtcttctccagacaaccttctccctggagtgccactaatcctgcctgtgtctgtaagtaaatggtgggaggggcccgaattcaaacctacgagccccactccgaagcaggtgagtattcacgaccaggattacaagtgtgattttttctttttgttaaaactaaagaactctcggaagca

SEQ ID NO: 141585 - DNA, 3152 bp, Homo sapiens
  Payload ID: 7842
  Gene Symbol:
  Gene Name: HYDIN
  ENST ID: ENST00000634268
  CDS Start-End: 36-2888
accgtggcaacggacggcaacagctcgggcggcgcatggagagtgcgggcggcttcaagctgggtatggagcccctcagcggcggcggggtctgtgagaaaaaaaaattactaaaaatgacaagtagaagacttgaggagtccatgggggctgttcagatgggattggtcaatatgttcaaaggatttcaaagcaaggttttgccacccctgagtccaaaggtggttacagaagaagaagtaaaccgaatgcttacaccctcagagttcctgaaggaaatgtccctgaccaccgagcagagactggcaaaaacacgtttgatgtgccgaccacagatcatcgaactcttagatatgggggaaacaacacatcagaagttttcaggaattgacctggatcaggcattattccagccctttccatcagaaattatatttcagaactacactccctgtgaagtctatgaagttccactgattttgaggaacaatgacaaaattccaaggttggtgaaagttgtggaagaaagttcgccttactttaaagtaatcagccccaaagatattggccacaaagtggctcctggagtgccttccatattccgaatcctctttactccagaggagaacaaggattacgcccatacgttgacctgtgttactgaaagagaaaagtttattgtacccatcaaagctagaggggcacgagccattctcgattttcctgacaagctgaatttttccacttgtcctgtcaaatacagcacccagaagattctgctggtacgaaacattggcaacaaaaatgctgtatttcacatcaaaacttgtaggcctttctctatagaaccagctattggaactcttaatgtgggagagtccatgcaactggaagtggagtttgagccacagagtgtgggcgatcacagtggaagacttatcgtgtgttatgacacaggtgaaaaggtgtttgtatctctctatggagctgccatagacatgaatataaggctggataagaattccttgaccatcgagaaaacctacatatctctggccaatcagcgaactataaccattcacaatcgcagtaatatcattgcccatttcctgtggaaggtatttgctacccagcaagaagaggacagagaaaaatatagggcctgtgatgatctgatcaaagaggagaaggatgagactgatgagttttttgaagagtgcattactgatcctttactccgagaacatctttctgttctgtcccgaacctttgcgaatcagaggaggctggtgcagggagacagcaagctgttcttcaataacgttttcactgtggagcccctggaaggtgatgtctggcccaactcatcagctgaaatcaccgtgtactttaacccactagaagccaagctctatcaacagaccatttactgcgacattttaggccgagaaatccgtctgcccctccgaatcaaaggggaaggcatgggacctaagattcacttcaactttgaattgctggatattgggaaagttttcactggatctgcacattgttatgaggcgatactgtacaacaaaggcagcatcgatgctctcttcaacatgacccctccaacttcagctttgggggcctgctttgttttcagtcccaaggaaggcatcattgaaccaagtggagtccaagctatccagatctccttcagctctaccatcctgggaaactttgaagaagagttcctggtcaatgtcaatgggtcacctgagcctgtgaaactgaccattagaggctgtgtcattggacctaccttccattttaatgttccagctctgcactttggtgatgtttcctttgggtttcctcataccttgatatgttccctcaataatacctctttgatccccatgacttacaaactgcgtatccctggggatggccttggccataaaagcatttcatattgtgagcagcatgtggactacaaaagaccatcttggaccaaggaagaaatatcctcaatgaaaccaaaagaattcaccatctctcctgactgtggcaccattcgcccccagggatttgctgctatcagggtgacattatgctccaacactgtgcagaaatacgagctggcactcgtggtggacgtggagggcatcggagaagaggtgctggcgctcttaattacagcaaggtgtgttgtacctgccctccacctggtcaatacagaggtggactttgggcactgcttcctgaagtacccgtatgagaaaacactccagcttgccaatcaagatgacctcccaggattctatgaggtccagcctcaggtgtgtgaggaggtgcctactgtgctgttttccagccccacccccagcggggtcatctccccaagcagcaccatccacataccactggtcctggagacccaggtcactggagaacacagatccacggtttacatctcaatctttgggagccaggacccccctttggtatgtcacttaaagagcgctggagaaggcccagttatctacgtccatcccaatcaagtggacttcgggaatatctacgtcctaaaagactcttccaggattctcaacctatgcaaccagtccttcattcccgcatttttccaggcacacatggcacacaaaaaatccctttggacgattgaacccaatgaaggcatggttcctccagaaactgatgttcaactggcactgaccgccaacctgaatgacacactgacattcaaggactgtgttattttggacattgaaaatagcagtacctatcggattcctgttcaggcttccggaactggttccactattgtttcagataagccctttgctccagaactcaatttgggggcacattttaggtaaggaaatctcatggaccagtttttatagatatcacatatgttacatatgctgagcatcacctctactttagaaaattattttaagtaattaaaactagccacctcagtccctctcctttcccatcctcactcttccacctcctgatgtgtatgtcagcaacaagaagacattttctagccataacttggttgcattctctaatccgtgtccctctacatccgagaagaatatggtttgtaggaaatgcattcttttctcaaactg

SEQ ID NO: 141586 - DNA, 3058 bp, Homo sapiens
  Payload ID: 7842
  Gene Symbol:
  Gene Name: HYDIN
  ENST ID: ENST00000634392
  CDS Start-End: 28-2850
aacggacggcaacagctcgggcggcgcatggagagtgcgggcggcttcaagctgggtgagaaaaaaaaattactaaaaatgacaagtagaagacttgaggagtccatgggggctgttcagatgggattggtcaatatgttcaaaggatttcaaagcaaggttttgccacccctgagtccaaaggtggttacagaagaagaagtaaaccgaatgcttacaccctcagagttcctgaaggaaatgtccctgaccaccgagcagagactggcaaaaacacgtttgatgtgccgaccacagatcatcgaactcttagatatgggggaaacaacacatcagaagttttcaggaattgacctggatcaggcattattccagccctttccatcagaaattatatttcagaactacactccctgtgaagtctatgaagttccactgattttgaggaacaatgacaaaattccaaggttggtgaaagttgtggaagaaagttcgccttactttaaagtaatcagccccaaagatattggccacaaagtggctcctggagtgccttccatattccgaatcctctttactccagaggagaacaaggattacgcccatacgttgacctgtgttactgaaagagaaaagtttattgtacccatcaaagctagaggggcacgagccattctcgattttcctgacaagctgaatttttccacttgtcctgtcaaatacagcacccagaagattctgctggtacgaaacattggcaacaaaaatgctgtatttcacatcaaaacttgtaggcctttctctatagaaccagctattggaactcttaatgtgggagagtccatgcaactggaagtggagtttgagccacagagtgtgggcgatcacagtggaagacttatcgtgtgttatgacacaggtgaaaaggtgtttgtatctctctatggagctgccatagacatgaatataaggctggataagaattccttgaccatcgagaaaacctacatatctctggccaatcagcgaactataaccattcacaatcgcagtaatatcattgcccatttcctgtggaaggtatttgctacccagcaagaagaggacagagaaaaatatagggcctgtgatgatctgatcaaagaggagaaggatgagactgatgagttttttgaagagtgcattactgatcctttactccgagaacatctttctgttctgtcccgaacctttgcgaatcagaggaggctggtgcagggagacagcaagctgttcttcaataacgttttcactgtggagcccctggaaggtgatgtctggcccaactcatcagctgaaatcaccgtgtactttaacccactagaagccaagctctatcaacagaccatttactgcgacattttaggccgagaaatccgtctgcccctccgaatcaaaggggaaggcatgggacctaagattcacttcaactttgaattgctggatattgggaaagttttcactggatctgcacattgttatgaggcgatactgtacaacaaaggcagcatcgatgctctcttcaacatgacccctccaacttcagctttgggggcctgctttgttttcagtcccaaggaaggcatcattgaaccaagtggagtccaagctatccagatctccttcagctctaccatcctgggaaactttgaagaagagttcctggtcaatgtcaatgggtcacctgagcctgtgaaactgaccattagaggctgtgtcattggacctaccttccattttaatgttccagctctgcactttggtgatgtttcctttgggtttcctcataccttgatatgttccctcaataatacctctttgatccccatgacttacaaactgcgtatccctggggatggccttggccataaaagcatttcatattgtgagcagcatgtggactacaaaagaccatcttggaccaaggaagaaatatcctcaatgaaaccaaaagaattcaccatctctcctgactgtggcaccattcgcccccagggatttgctgctatcagggtgacattatgctccaacactgtgcagaaatacgagctggcactcgtggtggacgtggagggcatcggagaagaggtgctggcgctcttaattacagcaaggtgtgttgtacctgccctccacctggtcaatacagaggtggactttgggcactgcttcctgaagtacccgtatgagaaaacactccagcttgccaatcaagatgacctcccaggattctatgaggtccagcctcaggtgtgtgaggaggtgcctactgtgctgttttccagccccacccccagcggggtcatctccccaagcagcaccatccacataccactggtcctggagacccaggtcactggagaacacagatccacggtttacatctcaatctttgggagccaggacccccctttggtatgtcacttaaagagcgctggagaaggcccagttatctacgtccatcccaatcaagtggacttcgggaatatctacgtcctaaaagactcttccaggattctcaacctatgcaaccagtccttcattcccgcatttttccaggcacacatggcacacaaaaaatccctttggacgattgaacccaatgaaggcatggttcctccagaaactgatgttcaactggcactgaccgccaacctgaatgacacactgacattcaaggactgtgttattttggacattgaaaatagcagtacctatcggattcctgttcaggcttccggaactggttccactattgtttcagataagccctttgctccagaactcaatttgggggcacattttaggtaaggaaatctcatggaccagtttttatagatatcacatatgttacatatgctgagcatcacctctactttagaaaattattttaagtaattaaaactagccacctcagtccctctcctttcccatcctcactcttccacctcctgatgtgtatgtcagcaacaagaagacattttctagccataacttggttgcattctctaatccgtgt

SEQ ID NO: 141587 - DNA, 3685 bp, Homo sapiens
  Payload ID: 7842
  Gene Symbol:
  Gene Name: HYDIN
  ENST ID: ENST00000634745
  CDS Start-End: 152-3205
gcatggagagtgcgggcggcttcaagctgggtatggagcccctcagcggcggcggggtctgtgagttggacgcggggtcttggcggggaatggaggtagaataaacgtgggacccggagtgcaccaaggtgagaaaaaaaaattactaaaaatgacaagtagaagacttgaggagtccatgggggctgttcagatgggattggtcaatatgttcaaaggatttcaaagcaaggttttgccacccctgagtccaaaggtggttacagaagaagaagtaaaccgaatgcttacaccctcagagttcctgaaggaaatgtccctgaccaccgagcagagactggcaaaaacacgtttgatgtgccgaccacagatcatcgaactcttagatatgggggaaacaacacatcagaagttttcaggaattgacctggatcaggcattattccagccctttccatcagaaattatatttcagaactacactccctgtgaagtctatgaagttccactgattttgaggaacaatgacaaaattccaaggttggtgaaagttgtggaagaaagttcgccttactttaaagtaatcagccccaaagatattggccacaaagtggctcctggagtgccttccatattccgaatcctctttactccagaggagaacaaggattacgcccatacgttgacctgtgttactgaaagagaaaagtttattgtacccatcaaagctagaggggcacgagccattctcgattttcctgacaagctgaatttttccacttgtcctgtcaaatacagcacccagaagattctgctggtacgaaacattggcaacaaaaatgctgtatttcacatcaaaacttgtaggcctttctctatagaaccagctattggaactcttaatgtgggagagtccatgcaactggaagtggagtttgagccacagagtgtgggcgatcacagtggaagacttatcgtgtgttatgacacaggtgaaaaggtgtttgtatctctctatggagctgccatagacatgaatataaggctggataagaattccttgaccatcgagaaaacctacatatctctggccaatcagcgaactataaccattcacaatcgcagtaatatcattgcccatttcctgtggaaggtatttgctacccagcaagaagaggacagagaaaaatatagggcctgtgatgatctgatcaaagaggagaaggatgagactgatgagttttttgaagagtgcattactgatcctttactccgagaacatctttctgttctgtcccgaacctttgcgaatcagaggaggctggtgcagggagacagcaagctgttcttcaataacgttttcactgtggagcccctggaaggtgatgtctggcccaactcatcagctgaaatcaccgtgtactttaacccactagaagccaagctctatcaacagaccatttactgcgacattttaggccgagaaatccgtctgcccctccgaatcaaaggggaaggcatgggacctaagattcacttcaactttgaattgctggatattgggaaagttttcactggatctgcacattgttatgaggcgatactgtacaacaaaggcagcatcgatgctctcttcaacatgacccctccaacttcagctttgggggcctgctttgttttcagtcccaaggaaggcatcattgaaccaagtggagtccaagctatccagatctccttcagctctaccatcctgggaaactttgaagaagagttcctggtcaatgtcaatgggtcacctgagcctgtgaaactgaccattagaggctgtgtcattggacctaccttccattttaatgttccagctctgcactttggtgatgtttcctttgggtttcctcataccttgatatgttccctcaataatacctctttgatccccatgacttacaaactgcgtatccctggggatggccttggccataaaagcatttcatattgtgagcagcatgtggactacaaaagaccatcttggaccaaggaagaaatatcctcaatgaaaccaaaagaattcaccatctctcctgactgtggcaccattcgcccccagggatttgctgctatcagggtgacattatgctccaacactgtgcagaaatacgagctggcactcgtggtggacgtggagggcatcggagaagaggtgctggcgctcttaattacagcaaggtgtgttgtacctgccctccacctggtcaatacagaggtggactttgggcactgcttcctgaagtacccgtatgagaaaacactccagcttgccaatcaagatgacctcccaggattctatgaggtccagcctcaggtgtgtgaggaggtgcctactgtgctgttttccagccccacccccagcggggtcatctccccaagcagcaccatccacataccactggtcctggagacccaggtcactggagaacacagatccacggtttacatctcaatctttgggagccaggacccccctttggtatgtcacttaaagagcgctggagaaggcccagttatctacgtccatcccaatcaagtggacttcgggaatatctacgtcctaaaagactcttccaggattctcaacctatgcaaccagtccttcattcccgcatttttccaggcacacatggcacacaaaaaatccctttggacgattgaacccaatgaaggcatggttcctccagaaactgatgttcaactggcactgaccgccaacctgaatgacacactgacattcaaggactgtgttattttggacattgaaaatagcagtacctatcggattcctgttcaggcttccggaactggttccactattgtttcagataagccctttgctccagaactcaatttgggggcacattttagcctggatacccactattaccactttaagttgatcaacaagggacgtcggatccaacagttgttctggatgaatgatagcttccgaccccaggccaagctgagtaagaagggccgggttaagaagggacatgctcatgtccaaccccagcccagtggctctcaggagcccagggatccacagagccccgtgtttcatctccaccccgccagcatggagctgtacccaggccaggcaattgatgtgatactcgaaggctattctgctactcccagggtaaggggatagcacatttggaagctattgttttttcctaaataaatctctactgtatctatttcttaggaaagtcccttgacatttatctgaggaaggatatggtttctcaaggattgtgtacaatcctgagttaccatagtagcatccgttgctttcggggtgcagctctgctcagtcttcaatttgtttctgtagctactgtgaacccaatcttaaaggaggttctcatgcccagggtccacagtgaccagccagcaagtctctggtagaaaaacacccagtttttagccaaagcaaattctcctattaacacttagcaggatgaatttaatattcattcaaaaagggtgtttatatcgacactctgggctgcctctcctattcaggtattgggacatccctgttcctttctttccagcctgactgcaactcacatttcaaaacatcttctttttatgcattaataaaagagccacatttatcttcagc

SEQ ID NO: 141588 - DNA, 525 bp, Homo sapiens
  Payload ID: 7842
  Gene Symbol:
  Gene Name: HYDIN
  ENST ID: ENST00000634827
  CDS Start-End: 1-341
atatctacgtcctaaaagactcttccaggattctcaacctatgcaaccagtccttcattcccgcatttttccaggcacacatggcacacaaaaaatccctttggacgattgaacccaatgaaggcatggttcctccagaaactgatgttcaactggcactgaccgccaacctgaatgacacactgacattcaaggactgtgttattttggacattgaaaatagcagtacctatcggattcctgttcaggcttccggaactggttccactattgtttcagataagccctttgctccagaactcaatttgggggcacattttagaaacctaacagtatcctgaaacctgattaccagcccttggccataaagaacatttccaccctgcccgtgaacttgttgctgtcaacatctggacccttctttatatgtgagactgataaatccctgctgccggcaactcctgagcctattaaactggaaattgatgaagaaaaaaacctgctgatcaagtttgacccttccta

SEQ ID NO: 141589 - DNA, 554 bp, Homo sapiens
  Payload ID: 7842
  Gene Symbol:
  Gene Name: HYDIN
  ENST ID: ENST00000634629
  CDS Start-End: 1-248
aaacctacctagaggaagaggaggatgaggaaagcctggaaaaaatcattttccaaactgacaagcttcagagcattgacagccactccatggaggaagttggagaggtggaaaacaacccagtgagcaaagcaatcgctcgccacctgggcattgacatttctgcagaaggccgcctggccaagaaccggaaaggcatcgccattatcattcatgggacacccttgtcaggtaggcaacagttctgaggggaggttaagaccagcagtgccatgtcttctctgtaaactctgcggcttccagagtggcaacatcagctgtgtggtcatggcaaatactaatgactttatttgaggaactgcatagggtagtgaatatacattaatagctgtgtgcctttgggaaaattaactaaattgtctgtgctcagtttccctgtccgtaaagtggtattaacgctgtctattttatagggtagtcatgagaatttaatgagaacatttatataaaatgcttatctcaatacttggcacatagtaaatactcaaacgaaa

SEQ ID NO: 141590 - DNA, 4479 bp, Homo sapiens
  Payload ID: 7842
  Gene Symbol:
  Gene Name: HYDIN
  ENST ID: ENST00000634869
  CDS Start-End: 1-148
agtactagaagaaaactaccaagaactgcagcttcaaatcagtgccaatgtggatttcgcttcataccattgccaagcaagagatgtgcgctttaaggaaaccttggtttaccagacccgagtgtttgacataatgtcatgtgcatgaagcaaaggggtatttaaagcagatcaagagagtcaaggaaggcttcctggacaaggtagttccccagctgaactttagaggacagataggaggtaaccaagtaaagaagtgagaacaaagtgagagtgaaagaagtgagaatgggggtagccaagtgaagaagcgagaatgaagggctctctctaggcagagagagcaacatgtgcaacacatacaaggacaaaaatgttcgatgtgattaattcaggacgtgtccagctggaattcagctgggtctcagaagatacctcaaaggcagtcagctttgcaaaaccagatcaccaaggttcagctcaaaaagatcagcttagtcagggcacgatgcatacaggcagcaccctggacagcaccatggaccactgggccgagggttccccacagcccttctctgtggagccctcttcgggaatcgtgccggtggggaagattcagaagttcaaagtaaaattctccccgttggacattggagacttcgagagcaaccttttctgccagattcccaacctgccacctggagagcaaggtccggtcctggtagcaaaagggcggagcaccttgcccatctgccattttgatctgaaagactcggactacataagtggccatcagcgcaacccagagctccgagggtccagtgggggagctctggatccaaacacccgggtgattgagttcaccactgtgggcataggagggaagaatctccggacctttaccatcctaaacccaaccaatagcacctactccttctgctggatctctgaagaaattgaaagtctccagaaccctgcagcattcacatgccttacagaaaagggcttcatccaccctgaaaagaaagccgagatcgtgttccagttcacacctttccatctgggcatcactgagtcatcatggaccttcctaattcccgagcacaacatcacagtccctttcctgctggtaggcaaaactaccgaacctctcatctctctgaacaagtcacacctcaacttcagctctctcctcattggcagagaagccagggagactgtgcagatcattaacaaggaggagcaggggttcgatttttccttccaggacaactcccgctattctgaaggtttcagcaacagcctgcttgtatgtcccatggaaggctggatcccaccactgtccaggttcccaattgatattttcttcacaccaaagcaggaaggagatgtgaactttaatttgatctgcaatgtggaaaagaaagtccaccctgtgacattaaatgtcaaggccgagggctacactatgaatgtggagatcaagtgcaaggacaggacaggctccatcactctgttgactcccaaccagactaacatcatcaacttctatgaggtggagttaaatgaatgtgtccagtgtgaattcaactttatcaacactggaaagttcaccttcagcttccaggcacagctgtgtggctccaaaaccttgctgcagtacttggaattttcacccatcgacagcactgtggatgtaggacagagtgtacatgccaccctgtcttttcaaccattaaagaagtgtgtcttgacagacctggaactcataatcaagatcagccatggtccaacatttatgtgcaacatctcaggctgtgctgtgagcccggctatccatttctccttcaccagctacaactttgggacctgctttatctatcaagctgggatgcccccatacaaacaaaccctggtaattaccaacaaggaagaaacacctatgagcatagattgtctgtacaccaacaccactcacctcgaggtgaactcccgtgttgatgtggtaaagccaggaaacacattggagattccaataactttttatcctcgagaaagtatcaactatcaagaactcattccctttgaaatcaatgggctctcacaacaaacagtcgaaatcaaagggaagggtaccaaaatgaagattttagtcctagatccagccaacaggattgtgaagttgggagctgtcctaccagggcaggttgtgaaaagaacagtttccatcatgaacaacagcctggcccagctcacatttaatcagtccattctgttcacaattccagaactccaggaacccaaggtccttaccctggcgcccttccacaacatcacactgaagcccaaagaagtctgtaaactggaagtcatctttgccccgaagaagcgtgtccctcccttctctgaggaagtgttcatggaatgcatggggctcctgcgccccctcttcctccttagcggctgctgccaggccctggagatctcactggaccaggaacatattccctttggacccgtggtgtatcagacgcaagccacacgtcgcatcctcatgatgaacacaggcgatgtgggtgcaaggtttaaatgggacatcaaaaaatttgagcctcatttctccattagcccagaagaaggctatattacctcaggcatggaggtttcttttgaagtgacctaccatcccaccgaggtgggaaaggagagcctttgtaaaaacattctctgctacatccagggaggcagtcctctgagtctaaccctgtctggagtctgcgtgggaccacctgcggtaaaagaggtagtgaatttcacgtgccaggtgcgctccaagcacacgcagaccatcctgctgtcaaaccgcaccaaccagacctggaatctgcaccccatctttgagggcgagcactgggaggggcctgagttcatcaccctggaggcccaccagcaaaacaagccctatgagatcacctacaggccccgcaccatgaacttggagaaccgcaagcaccagggcaccctcttcttccccctcccagatgggaccggctggctgtatgctctgcatgggacttctgagctccccaaagctgtagccaatatctatcgtgaagtgccatgtaagaccccctacactgagcttctgccaatcaccaactggctgaacaagccccagagattccgggtcatcgtggaaatactgaaaccagagaagccggacctaagcatcactatgaagggccttgattacattgatgtactgtctggctctaagaaagactacaagctgaacttcttttcccacaaggagggaacgtacgctgcaaaggtgatcttccgaaacgaggtgacaaatgagttcttgtactacaatgtgagtttcagggtcatcccttcaggcatcatcaaaaccatcgagatggtgaccccagtccggcaagttgcgtcagcctccatcaagttggagaaccctctgccctactcggtgaccttctccacggaatgccggatgcccgacatcgccctgccctcccagtttgtggtgcctgccaactccgagagatggggtctcactgcgtcttccaggctggagtgcagtggtatgatcatagctccctgcagccttaaactcctacaatcaaggcctcctcctgcctcagcctcctgagtagctaggactacagggcacgttctcatttgaatttcagcccctgaaagctggagaaaccttcggaagactaactttgcacaacactgacttgggttactaccaatatgagctctatctgaaagccacgccagcacttccggaaaagcctgttcacttccagactgtccttggcagcagccaaatcatccttgtgaagttcatcaattacacacggcagaggacagaatactactgcaggaccgactgtacagacttccacgcagaaaaactcattaatgcagccccaggaggccagggaggcactgaagccagtgtggaagtcttattcgagcccagccacctgggtgagaccaagggcatcctgatcctatcatcgctcgcaggtggagagtatatcatccccctctttggaatggctctgcctcccaagccccaaggtcccttctcgatccgagccgggtacagcataatcatccccttcaagaatgtcttctatcacatggtgaccttctccatcatcgtggataacccagccttcaccattcgcgctggagagtctgtgcggcccaagaagatcaacaacatcacagtctcctttgaaggaaacccatctggcagcaaaacccccatcaccaccaagctgactgtgagctgccctcctggtgaagggagtgagactggagttaaatgggtttattatctgaaggggatcaccctttagtggtaaccagggttacctgtatcaaccaaaagctatgcattgtcttagcctgaaaaagaatagagaaaacaataagaattctaaa

SEQ ID NO: 141591 - DNA, 2480 bp, Homo sapiens
  Payload ID: 7842
  Gene Symbol:
  Gene Name: HYDIN
  ENST ID: ENST00000635355
  CDS Start-End: 1-614
tccgaatcctctttactccagaggagaacaaggattacgcccatacgttgacctgtgttactgaaagagaaaagtttattgtacccatcaaagctagaggggcacgagccattctcgattttcctgacaagctgaatttttccacttgtcctgtcaaatacagcacccagaagattctgctggtacgaaacattggcaacaaaaatgctgtatttcacatcaaaacttgtaggcctttctctatagaaccagctattggaactcttaatgtgggagagtccatgcaactggaagtggagtttgagccacagagtgtgggcgatcacagtggaagacttatcgtgtgttatgacacaggtgaaaaggtgtttgtatctctctatggagctgccatagacatgaatataaggctggataagaattccttgaccatcgagaaaacctacatatctctggccaatcagcgaactataaccattcacaatcgcagtaatatcattgcccatttcctgtggaaggtatttgctacccagcaagaagaggacagagaaaaatataggtggatggctccatttgttccaggccaagtgtggacatgggagtatttcctctagctctcaagaccatggctcttagtttttaatctcctcagcattcagttggcacctcttgtgggtgctgaagggagcagattacaggccttgagtacctgaagatgagggactattactcgttcaaccctgctgcactggagacacacatcttccccattgactgttaaaggtgttggtagctactagaccatttgtaaaatgggttaagcccatggttttactgaagagagggctggcctgctgttatgctgtctgatgaaaggtctcctcatctataaaagagaaccacctctgagtgcaagaaaccatgactatcaacaggacgagatggcaaaacactaggactgagatctatggaagcccttgttggagccaggccacatgaagttgtggctatacacctcctccttagactctcagtcctggctccaattctccatcagaggaagaatccagtaccctctctcctccctttgccttctactggctgttttggagtttcaacagcatgggagaagaccagcgttttcgaatttgttttgttctctttgttttctggtacagggattgcatttctcatactcctcagtccatggagcactatcatcttcatcctcagtccacacaaagcattttatttattctcttacatccccacaccccactcctgttaattcccccaaagataccattctaatatgttactgtgtctatctttttacatgaatctgttctttcaaaatgtatattgtcttgggggagagacagagagaagtcatattttgtattccattttctcctttttctcacgaggttgtgtgcttaagatccattcatgttgctatgtgtatatctaatccattgcctccaccttctgcagaccagaccacattgtgtcaccccacattccacctgtgcactcttccaggggtggcatccacaggctcatgccaatgcaggcatgttaggcaaaggcaaccaggtcaaaatcttagtgcctcagcctgagaattaattaacatttaatttcttaaatgacttgttttctggtttaaaaagaaatacattgtgcactaataaaatttagaaaatattaagcacaaagatgagggcaaaaatccattctaatccttccaaccagggaaaccacagtcaatattttggtatgtctaagtctgtattttttccctaataagtatgtatttttcttttgcttttttattacaaaagtgggattattgtatatgttacattttaccactttgtttttcaccttaaaacatttcagacatttgaaaatgatgttaagtattccatttaataccactttactggctgcttattattccctaatattccctggattcctgggaggcagtgtgcatattggttagcaccaggggattcaaacctccaaagaccctgaagtccaggctatctttcagctatgtgatctggggcgagttacttaacctttctaagcctcagtttcatcatctatatagtgggaatgatgcttataatgctaatgacccttctggtagttatgagtgttaaattatatgatgcatgtgcaaagtttgacaggtacccaataaatgtaatgttcatgattcccatttctgttcaaccagtgcttcattatcttacatcaaatttacccacttgatctggtatcattccagcactttaatggacatctttgtagctgtgtctttgtttatatccatgattgtttttaaggatttattcctgcaagtggaattttttggtttctaagggtatataatctgtaagttttccagatcagtatcagataacaaaaatatcaaataaaaaagaaatggattcctttctttctgcaaa

SEQ ID NO: 141592 - DNA, 634 bp, Homo sapiens
  Payload ID: 7842
  Gene Symbol:
  Gene Name: HYDIN
  ENST ID: ENST00000635523
  CDS Start-End: 1-383
acaaactgcgtatccctggggatggccttggccataaaagcatttcatattgtgagcagcatgtggactacaaaagaccatcttggaccaaggaagaaatatcctcaatgaaaccaaaagaattcaccatctctcctgactgtggcaccattcgcccccagggatttgctgctatcagggtgacattatgctccaacactgtgcagaaatacgagctggcactcgtggtggacgtggagggcatcggagaagaggtgctggcgctcttaattacagcaagtgctccagagttatgcaataggaaggtgatgctgtcagtcctgcagtggaagatccatagagccaagaggtccctgccccgggacactgttgctgtgacttgaatttcaggctaggagtgggcccccaagatgaggctcatctttaacaaggtatactcctcagaaccatctccaactcctctctctttttgagagaggcagctgggttaaaatcctggctcagccatttgttgactgtgtccttttgaccaagctacagtcattgcagtactgctgatgagggtggtggtgtcatcgactaatgatgatgtgatcccaaataaaatcctggggccacactcttcccaaagcaa

SEQ ID NO: 141593 - DNA, 15719 bp, Homo sapiens
  Payload ID: 7842
  Gene Symbol:
  Gene Name: HYDIN
  ENST ID: ENST00000635381
  CDS Start-End: 152-15517
gcatggagagtgcgggcggcttcaagctgggtatggagcccctcagcggcggcggggtctgtgagttggacgcggggtcttggcggggaatggaggtagaataaacgtgggacccggagtgcaccaaggtgagaaaaaaaaattactaaaaatgacaagtagaagacttgaggagtccatgggggctgttcagatgggattggtcaatatgttcaaaggatttcaaagcaaggttttgccacccctgagtccaaaggtggttacagaagaagaagtaaaccgaatgcttacaccctcagagttcctgaaggaaatgtccctgaccaccgagcagagactggcaaaaacacgtttgatgtgccgaccacagatcatcgaactcttagatatgggggaaacaacacatcagaagttttcaggaattgacctggatcaggcattattccagccctttccatcagaaattatatttcagaactacactccctgtgaagtctatgaagttccactgattttgaggaacaatgacaaaattccaaggttggtgaaagttgtggaagaaagttcgccttactttaaagtaatcagccccaaagatattggccacaaagtggctcctggagtgccttccatattccgaatcctctttactccagaggagaacaaggattacgcccatacgttgacctgtgttactgaaagagaaaagtttattgtacccatcaaagctagaggggcacgagccattctcgattttcctgacaagctgaatttttccacttgtcctgtcaaatacagcacccagaagattctgctggtacgaaacattggcaacaaaaatgctgtatttcacatcaaaacttgtaggcctttctctatagaaccagctattggaactcttaatgtgggagagtccatgcaactggaagtggagtttgagccacagagtgtgggcgatcacagtggaagacttatcgtgtgttatgacacaggtgaaaaggtgtttgtatctctctatggagctgccatagacatgaatataaggctggataagaattccttgaccatcgagaaaacctacatatctctggccaatcagcgaactataaccattcacaatcgcagtaatatcattgcccatttcctgtggaaggtatttgctacccagcaagaagaggacagagaaaaatatagggcctgtgatgatctgatcaaagaggagaaggatgagactgatgagttttttgaagagtgcattactgatcctttactccgagaacatctttctgttctgtcccgaacctttgcgaatcagaggaggctggtgcagggagacagcaagctgttcttcaataacgttttcactgtggagcccctggaaggtgatgtctggcccaactcatcagctgaaatcaccgtgtactttaacccactagaagccaagctctatcaacagaccatttactgcgacattttaggccgagaaatccgtctgcccctccgaatcaaaggggaaggcatgggacctaagattcacttcaactttgaattgctggatattgggaaagttttcactggatctgcacattgttatgaggcgatactgtacaacaaaggcagcatcgatgctctcttcaacatgacccctccaacttcagctttgggggcctgctttgttttcagtcccaaggaaggcatcattgaaccaagtggagtccaagctatccagatctccttcagctctaccatcctgggaaactttgaagaagagttcctggtcaatgtcaatgggtcacctgagcctgtgaaactgaccattagaggctgtgtcattggacctaccttccattttaatgttccagctctgcactttggtgatgtttcctttgggtttcctcataccttgatatgttccctcaataatacctctttgatccccatgacttacaaactgcgtatccctggggatggccttggccataaaagcatttcatattgtgagcagcatgtggactacaaaagaccatcttggaccaaggaagaaatatcctcaatgaaaccaaaagaattcaccatctctcctgactgtggcaccattcgcccccagggatttgctgctatcagggtgacattatgctccaacactgtgcagaaatacgagctggcactcgtggtggacgtggagggcatcggagaagaggtgctggcgctcttaattacagcaaggtgtgttgtacctgccctccacctggtcaatacagaggtggactttgggcactgcttcctgaagtacccgtatgagaaaacactccagcttgccaatcaagatgacctcccaggattctatgaggtccagcctcaggtgtgtgaggaggtgcctactgtgctgttttccagccccacccccagcggggtcatctccccaagcagcaccatccacataccactggtcctggagacccaggtcactggagaacacagatccacggtttacatctcaatctttgggagccaggacccccctttggtatgtcacttaaagagcgctggagaaggcccagttatctacgtccatcccaatcaagtggacttcgggaatatctacgtcctaaaagactcttccaggattctcaacctatgcaaccagtccttcattcccgcatttttccaggcacacatggcacacaaaaaatccctttggacgattgaacccaatgaaggcatggttcctccagaaactgatgttcaactggcactgaccgccaacctgaatgacacactgacattcaaggactgtgttattttggacattgaaaatagcagtacctatcggattcctgttcaggcttccggaactggttccactattgtttcagataagccctttgctccagaactcaatttgggggcacattttagcctggatacccactattaccactttaagttgatcaacaagggacgtcggatccaacagttgttctggatgaatgatagcttccgaccccaggccaagctgagtaagaagggccgggttaagaagggacatgctcatgtccaaccccagcccagtggctctcaggagcccagggatccacagagccccgtgtttcatctccaccccgccagcatggagctgtacccaggccaggcaattgatgtgatactcgaaggctattctgctactcccaggatagtgaaagagaagctggtgtgccacgccatcatcggggcacagaaggggaagagcttggtgatggctgtgaacatcacctgtgagttcgtcgcacctctcatccagctctccaccaagcagctcatctaccgactggagaagaaacctaacagtatcctgaaacctgattaccagcccttggccataaagaacatttccaccctgcccgtgaacttgttgctgtcaacatctggacccttctttatatgtgagactgataaatccctgctgccggcaactcctgagcctattaaactggaaattgatgaagaaaaaaacctgctgatcaagtttgacccttcctacagaaacgatctgaacaactgggtggcagaagaaattctagcaattaagtatgtggaacaccctcagatagacagcctggacctgcgcggagaagtgcattaccccaacctcagctttgagacaaaggagctggattttggctgcatcctgaacgatactgagctcattcgctacgttaccatcaccaactgcagtccgttggttgtgaagtttcgctggttcttcttggtgaatgatgaggaaaatcagataaggtttgtgacattgccgaagaagccctacagtgccccagtgtcccagatggagtccatcccagcaacctcagaggctgccagcccaccagcaatcctagttacagtagagtcccccgagatggatttaaatgattttgttaagactgtccttgtggatgaagatgccaggcctgaagaaaaagaactaagaaaaacgaaagcttccagtgtgatctcagatgaaataaaaattagctctactgaaatagaaagaatatactcaagccagagccaggtggaggatcaggaatccctacagacctgtgaacagaatgagatgctttccattgggatagaagaagtgtttgatattttgcccctgtttggagtgttgcagccacacagtagccaccaaatatcgttcaccttctatggacacgctaacatcattgcacaagctaaagctctgtgtgaagtggaagaaggacccacctacgaaataacactgaagggagaggcgtccctggtcaactattcctttgacaccaaggatattcactacggattacagctgtttgaccatgtcacagagagggaaatcacgctgacgaacatggggaaagttggctttgagttcaaggttctgactgaccaccagtcttctccagacaaccttctccctggagtgccactaatcctgcctgtgtctggctttatcagttcacatcaagagcaggtattaaaagtttactacctacctggagtacctgaggtctttaaaaggagtttccagatacagatcgcccacctggacccagaaaatatcactctgagcggagagggaatctttccccaaatctgcctcgatctccccaggaacctcacagcaaatgaaaagtatgaaatgttcttgaatcaagccaggaaaaacacagacaaagagtataacaaatgtgaaatgctcgatcactttgacataataactgaggaagtgccagaagacgagcctgctgaggtaagtgctcatctccagatggaggtagaaagacttatagtccaaagctatgtcctagaacatcagaaaacaaccacccctgatcctatggatgacccctgcttcagccatcggagtcgccgcaaactggccaaaatccagctaccagagtacatcctggactttggctacatcatccttggcgaagtccgaacccacatcatcaagatcatcaacaccagtcactttccagtgtcattccatgcagacaagcgtgtccttcatgagacaggattcagtactgagctagatcgtgtaaagaatctacctcattgtgaaacggaaatatttgaagtgagatttgacccacagggggccaatcttcctgttggaagcaaagaagtcattctgcccatcaaggtggttggagggccaacagttcacatctgtctccaagccaaggtgaccattccaaccatgactctctctcgtggaaaagtggactttgccacaattcagtgtggacagtgcctggtggaaactattcagctttccaatcatctccaagtcccttgtgaatggttcgtccagagccaaaagcctgttgacaagctggagaaacacatgccgaagtacttaagacagaaactacgcgctgaattaaagccaaagacacggatcttcgaaatccagcccatttctggagtcttggatcctggtgagaagtccaacgtgcaagtgaaattcatgccaaaagaagagaaattctacagccaaaccctggtgtttcagattgcccagagtgctcaaaagcttaccctcctggcacgtgggcaaggtctagagccacgcctggaatttagtccttcagtcctggatctggggccactgctactttgtgcacctggagacgaggccgaggtgatagtgaagaatccctgcaacttccccattgagttttattccttagaatttgatcagcagtatctcatagaagaaaagatcttgcggaagctgaagggctatgattcctacaacaccctgctgctgcctccccgcaaccctggggagaagctgcccccagaactgtacgagtacttcaaagagataaagaagtcaaaagaggagcagatgagggcgaaatatctggagaatctggcacaggagaatgaagaggaagatataacctcatcagatcagggaacctccaatagcacaaagaggacatcgctgagccgagggatctctgtcacatccaacctggaagaatggcacgccctgttggtcgagtccaaaacctacctagaggaagaggaggatgaggaaagcctggaaaaaatcattttccaaactgacaagcttcagagcattgacagccactccatggaggaagttggagaggtggaaaacaacccagtgagcaaagcaatcgctcgccacctgggcattgacatttctgcagaaggccgcctggccaagaaccggaaaggcatcgccattatcattcatgggacacccttgtcaggaaagtcagccaatgccgttagcgtggccaagtactacaacgcagcctgcctgagcatcgactccattgtgctggaagctgtggccaacagcaacaacatcccagggatccgggcccgtgagctctgcatcagggctgccatagagcagtccgtgaaggaaggagaggaggctgcccaggaggcagctgtgggtcaaaacgtcatagggcaaggacgactgagcactgacaccttgggcaagttagcctccgagatgactctggtggccccagaaattaaacctggaaagagtgttcgtgggagcgtggtgatcaccaaaagcaaggcagacagccatggctccgggtcacagaagcagcatcactcacaccagtctgaaacaccacagatttcctccagccctctccccccggggcccatccaccgctggctcagtgttagtcccagtgtcggaggcgagaccgggctgatgagctgtgtgctcccggatgaacttctcgtgcagatcctggcagagcggatacagctgagtgactgctaccgaggagtggtgtttgatggcctcgacactctctttgctcagaatgctgcagccgccctcctctgcctgctgaaggccattggcagccgggagcatatatacattctcaacatggcccaggattacgcagccatgaaggcccaggagaaagccaaaaaggagcaagaagaacgcaagcacaagggagctcttgagaaagagaaggagcgtctccaaaacatggatgaggaagaatatgatgccctgactgaggaggagaaactcacattcgatcgggggattcagcaggcgctccgcgagcggaagaagagggagcaggagaggctggcaaaggaaatgcaagaaaagaagctacagcaggagctggagcgacaaaaggaagaggatgagctgaaacggagggtcaaaaaaggaaagcagggacccattaaggaggagccccccatgaagaaatctcaagcagcaaacaagcaggttcctccgctcaccaaagtggatgtcaagatggagacaatcgaaaggaaaatatctgttagggaacaaacaatgtctgagaaggaagagctaaataagaagaaaaggaacatgggcgatgtcagcatgcatgggcttcctcttgtccaggaccaagaggacagtgaaggggacaactcaaaggaccccgacaagcaactggccccgaagtttaagacctatgaattgacactgaaggatgtccagaacatcctcatgtactgggaccggaagcaaggagtccagctgcctcctgcagggatggaggaagcgccccatgagcccgacgaccagcgccaggtccccttgggtgggcgcaggggccgcaaggaccgggagagagagcgcctggagaaggagcgcacggagaaggagcgcctggagagggagaaggcggagcgggagcgcctggagaagctgcgagccctggaggagcggagcgactgggagggggaaggggaggaggaccacgaagggaagaaggagaaggacctgggcgtacccttcctagacatccagacaccagactttgaaggcttgagctggaagcaggccctagagagcgacaagcttcccaaaggagagcagatcctagacatcttgggtctgggtgcctccggaccacccatcccgcctcccgccttattctcaatcgtctcctacccggtgaagcggccacctttgaccatgacagacgacctggagcattttgtatttgtgatcccaccatccgaagatatatctctggatgaaaaaaaagaaatggaaatagaatcagactttttggccaccacaaacactacaaaggctcaagaggagcagaccagctcatctaaggggggcaaacagaaaatgaaagaaaagatagaccaagtcttcgagattcagaaagacaagcgtcacatggccttaaacaggaaggtcctttctggggaacctgctggaaccatttcccagctgtcagatacagacctggacaacttcaacgggcagcactcccaggagaaattcaccagactgaatcacttccggtggatcgtgccagccaatggcgaggtaacgttgcaggtgcacttctcttctgatgagttcgggaactttgaccaaacctttaactttgagatcctaggaacttgctgccagtaccagctctactgccgaggcatctgcacttacccatacatttgccaagacccaaaagtggtatttcctcagcggaagatggacatgaagacaaatgaggtcatctttaagaagtatgttatgagcacggagacgtactactttgggccactactttgtggaaaatcaagagataagtacaagtcatccttattcccaggcaacatggagacgctaacaatcctgaacacttccttaatggtggtggaggcatccttctattttcagaatgatgtcaaagcaaacacgtacttcctggaacccaacaccatggtcctgaaacccaatgagaagcagatattaaacgtatgggcctaccctacttcagttggtgtctttgaagacagcattgtctgctgcatcaatgacaacccagagccagccatcttccaattaagctgccaggggatccgcccggaactagagctggaacccaggcaattacattttgaccggctcttgctgcacagacaggaatccagggtagttcttctccgcaatgtcacgctcctgcctgtggcctggcggatcaccagcctggagcacttgggtgatgatttcactgtatccctgatgcaggggaccatcccccctgaggctgagtacggcctgcacctgtactttcagcccaccaagcctgtcaacatcaagaaggctattcggttggaggttttagatgcagaaaatcttcttggtgttgttcagattgaaaatatcatggtctttgcagaggcatacgacatcgccttggacatcaccttccccaaaggagctgaagggggactggattttgggattgtcagggtcacagaggaggcgaagcagcccctgcaattgaagaaccgtgggaaatatgagatcgcgttcagcttttccgtggactctgtagggatttcaacacctaatataaattccatgatctcagtccaacccaaaaagggttcactgaccccaacagaaaaacccacaaatgtccaagttttcttccatgcaaaaaaggaagtgaagattgagcaccagcctgttctgcgctgtcagattattgagcccaatatttcagaaggaggtgagatcattgccagcatcccaattaagttttccgcgaatgcagtatattccaaatacaacatcaccccctcctctgtcatcaactttggagctttgatctgtggcactcgtaaaagcaccaccttcaccatagaaaatcaaggtgttactgacttcaagttcgccctttataagctgacaggggagagccccattcatcaaaagaaagcagccagccacgtcagacatgcaagatcccgagaaagtgagagcttctacaaaactggctcttccagagcagccaagttctctgacacgattcagaaagaagtaaccaccacaggccaggcccgcttcgcccatggcatgttcaccgtgtaccctgggtttggctccattccttccggaggacagcaggtcatcaacgttgactgtgtggctgacgccatgggaaagtgtgaggagtttatagccatcgatatctccggccgagaccctgcagtccaccctgccggcattctttacactttgctagctgaagcctgtctaccagccttcgtgaccgaaaacaatgccttgatatttgaagagcaccagatatgtaccagtgccaacctgcaccacatcctgcagaccatagagagcggggggctgttcgtcgaggatgagaacaagttcatcttctgcaatgtcctggtgggccgccaagccaaggctcgtttcaagatcagcaacgtgggaaagatcacctgtgatgtcaacattgtagtcaggcctatctccaataagccctttgcccgcatcgtcgacatttttgaagtggaacccagcaagatgtgcattgccagtcattcccatgcctttgccacggtgtccttcaccccgcagatcatgcagaactaccagtgcatctttgaggctaccttggatggcttgcccagcaccctggccaagagccgaggcctcgtgtttgacatcgctggtgaggggaacctccctcgagtgacggttgtgcggccagttcttcataaccaatatggaaaccccttgctcctctttaagaggcttctccttggtcattcagagaagctgcctctcatcctcaagaacaatggtgtcctccctgcccagctgcatgttgacctgcaggatgagctaggagtcttctccctgaaagggaggcccaccaccgcgtatatctacatcacagaggaaaataaaccacatgtaaaagcaaagaaagctcacacagcctccttggttgtttctcctggagatacagctgaatttgatgtcgttttccactcccagaaggttgggaggatgagaggtatcatccacttgtcagtgatcaacaaccaatatgaggagacctccatccacatggtgggagagggctatgaggatgacatcaccttggacaacatccatggactggtggcccccaccagccaggaagacataagtatctctgagttcacagagatcatcgaggacaatgatatggaagacttggtggcagctgctctggtggaccacatccaatttggggactgccacattggacacagctataatgcgagcttcacagtcacaaatcacagccaagtgaacttgatacggtttgaatggcctgtttcagctacaattgctttctccccacagatgggccacctccaccctgggtgtgccaaggacatagtggtgaccatgaagtcagatgtacccatcaacctaaagaatatgcggatcaggtgcaagctctccaggattatgtttcagctccctgcagaccaggtccccgactgggatgaccgcatgcacacagtcaagtgggtggacgtacccagaaacatgcctgggactttcactacaaaacgaaaagtgatagagacggatccggaacctgctcactcagtactagaagaaaactaccaagaactgcagcttcaaatcagtgccaatgtggatttcgcttcataccattgccaagcaagagatgtgcgctttaaggaaaccttggtttaccagacccgagtgtttgagttcgatgtgattaattcaggacgtgtccagctggaattcagctgggtctcagaagatacctcaaaggcagtcagctttgcaaaaccagatcaccaaggttcagctcaaaaagatcagcttagtcagggcacgatgcatacaggcagcaccctggacagcaccatggaccactgggccgagggttccccacagcccttctctgtggagccctcttcgggaatcgtgccggtggggaagattcagaagttcaaagtaaaattctccccgttggacattggagacttcgagagcaaccttttctgccagattcccaacctgccacctggagagcaaggtccggtcctggtagcaaaagggcggagcaccttgcccatctgccattttgatctgaaagactcggactacataagtggccatcagcgcaacccagagctccgagggtccagtgggggagctctggatccaaacacccgggtgattgagttcaccactgtgggcataggagggaagaatctccggacctttaccatcctaaacccaaccaatagcacctactccttctgctggatctctgaagaaattgaaagtctccagaaccctgcagcattcacatgccttacagaaaagggcttcatccaccctgaaaagaaagccgagatcgtgttccagttcacacctttccatctgggcatcactgagtcatcatggaccttcctaattcccgagcacaacatcacagtccctttcctgctggtaggcaaaactaccgaacctctcatctctctgaacaagtcacacctcaacttcagctctctcctcattggcagagaagccagggagactgtgcagatcattaacaaggaggagcaggggttcgatttttccttccaggacaactcccgctattctgaaggtttcagcaacagcctgcttgtatgtcccatggaaggctggatcccaccactgtccaggttcccaattgatattttcttcacaccaaagcaggaaggagatgtgaactttaatttgatctgcaatgtggaaaagaaagtccaccctgtgacattaaatgtcaaggccgagggctacactatgaatgtggagatcaagtgcaaggacaggacaggctccatcactctgttgactcccaaccagactaacatcatcaacttctatgaggtggagttaaatgaatgtgtccagtgtgaattcaactttatcaacactggaaagttcaccttcagcttccaggcacagctgtgtggctccaaaaccttgctgcagtacttggaattttcacccatcgacagcactgtggatgtaggacagagtgtacatgccaccctgtcttttcaaccattaaagaagtgtgtcttgacagacctggaactcataatcaagatcagccatggtccaacatttatgtgcaacatctcaggctgtgctgtgagcccggctatccatttctccttcaccagctacaactttgggacctgctttatctatcaagctgggatgcccccatacaaacaaaccctggtaattaccaacaaggaagaaacacctatgagcatagattgtctgtacaccaacaccactcacctcgaggtgaactcccgtgttgatgtggtaaagccaggaaacacattggagattccaataactttttatcctcgagaaagtatcaactatcaagaactcattccctttgaaatcaatgggctctcacaacaaacagtcgaaatcaaagggaagggtaccaaaatgaagattttagtcctagatccagccaacaggattgtgaagttgggagctgtcctaccagggcaggttgtgaaaagaacagtttccatcatgaacaacagcctggcccagctcacatttaatcagtccattctgttcacaattccagaactccaggaacccaaggtccttaccctggcgcccttccacaacatcacactgaagcccaaagaagtctgtaaactggaagtcatctttgccccgaagaagcgtgtccctcccttctctgaggaagtgttcatggaatgcatggggctcctgcgccccctcttcctccttagcggctgctgccaggccctggagatctcactggaccaggaacatattccctttggacccgtggtgtatcagacgcaagccacacgtcgcatcctcatgatgaacacaggcgatgtgggtgcaaggtttaaatgggacatcaaaaaatttgagcctcatttctccattagcccagaagaaggctatattacctcaggcatggaggtttcttttgaagtgacctaccatcccaccgaggtgggaaaggagagcctttgtaaaaacattctctgctacatccagggaggcagtcctctgagtctaaccctgtctggagtctgcgtgggaccacctgcggtaaaagaggtagtgaatttcacgtgccaggtgcgctccaagcacacgcagaccatcctgctgtcaaaccgcaccaaccagacctggaatctgcaccccatctttgagggcgagcactgggaggggcctgagttcatcaccctggaggcccaccagcaaaacaagccctatgagatcacctacaggccccgcaccatgaacttggagaaccgcaagcaccagggcaccctcttcttccccctcccagatgggaccggctggctgtatgctctgcatgggacttctgagctccccaaagctgtagccaatatctatcgtgaagtgccatgtaagaccccctacactgagcttctgccaatcaccaactggctgaacaagccccagagattccgggtcatcgtggaaatactgaaaccagagaagccggacctaagcatcactatgaagggccttgattacattgatgtactgtctggctctaagaaagactacaagctgaacttcttttcccacaaggagggaacgtacgctgcaaaggtgatcttccgaaacgaggtgacaaatgagttcttgtactacaatgtgagtttcagggtcatcccttcaggcatcatcaaaaccatcgagatggtgaccccagtccggcaagttgcgtcagcctccatcaagttggagaaccctctgccctactcggtgaccttctccacggaatgccggatgcccgacatcgccctgccctcccagtttgtggtgcctgccaactccgagggcacgttctcatttgaatttcagcccctgaaagctggagaaaccttcggaagactaactttgcacaacactgacttgggttactaccaatatgagctctatctgaaagccacgccagcacttccggaaaagcctgttcacttccagactgtccttggcagcagccaaatcatccttgtgaagttcatcaattacacacggcagaggacagaatactactgcaggaccgactgtacagacttccacgcagaaaaactcattaatgcagccccaggaggccagggaggcactgaagccagtgtggaagtcttattcgagcccagccacctgggtgagaccaagggcatcctgatcctatcatcgctcgcaggtggagagtatatcatccccctctttggaatggctctgcctcccaagccccaaggtcccttctcgatccgagccgggtacagcataatcatccccttcaagaatgtcttctatcacatggtgaccttctccatcatcgtggataacccagccttcaccattcgcgctggagagtctgtgcggcccaagaagatcaacaacatcacagtctcctttgaaggaaacccatctggcagcaaaacccccatcaccaccaagctgactgtgagctgccctcctggtgaagggagtgagactggagttaaatgggtttattatctgaaggggatcaccctttagtggtaaccagggttacctgtatcaaccaaaagctatgcattgtcttagcctgaaaaagaatagagaaaacaataagaattctaaaggaactgtttttattcttctcatacaattatagggcagttatttccctattatgtgttttccaaatatagatatgaaatatctattccatattaaacattataactacacacaacag

SEQ ID NO: 141594 - DNA, 2953 bp, Homo sapiens; identical to SEQ ID NO: 141580
  Payload ID: 7843
  Gene Symbol: HYDIN
  Gene Name: HYDIN, axonemal central pair apparatus protein
  ENST ID: ENST00000288168
  CDS Start-End: 15-2192

SEQ ID NO: 141595 - DNA, 3685 bp, Homo sapiens; identical to SEQ ID NO: 141587
  Payload ID: 7843
  Gene Symbol: HYDIN
  Gene Name: HYDIN, axonemal central pair apparatus protein
  Uniprot ID: Q4G0P3
  ENST ID: ENST00000321489
  CDS Start-End: 152-3205

SEQ ID NO: 141596 - DNA, 15719 bp, Homo sapiens; identical to SEQ ID NO: 141593
  Payload ID: 7843
  Gene Symbol: HYDIN
  Gene Name: HYDIN, axonemal central pair apparatus protein
  Uniprot ID: Q4G0P3
  ENST ID: ENST00000393567
  CDS Start-End: 152-15517

SEQ ID NO: 141597 - DNA, 3058 bp, Homo sapiens; identical to SEQ ID NO: 141586
  Payload ID: 7843
  Gene Symbol: HYDIN
  Gene Name: HYDIN, axonemal central pair apparatus protein
  Uniprot ID: Q4G0P3
  ENST ID: ENST00000541601
  CDS Start-End: 28-2850

SEQ ID NO: 141598 - DNA, 2480 bp, Homo sapiens; identical to SEQ ID NO: 141591
  Payload ID: 7843
  Gene Symbol: HYDIN
  Gene Name: HYDIN, axonemal central pair apparatus protein
  ENST ID: ENST00000538382
  CDS Start-End: 1-614

SEQ ID NO: 141599 - DNA, 540 bp, Homo sapiens; identical to SEQ ID NO: 141581
  Payload ID: 7843
  Gene Symbol: HYDIN
  Gene Name: HYDIN, axonemal central pair apparatus protein
  ENST ID: ENST00000545267
  CDS Start-End: 432-540

SEQ ID NO: 141600 - DNA, 609 bp, Homo sapiens; identical to SEQ ID NO: 141582
  Payload ID: 7843
  Gene Symbol: HYDIN
  Gene Name: HYDIN, axonemal central pair apparatus protein
  ENST ID: ENST00000539973
  CDS Start-End: 491-609

SEQ ID NO: 141601 - DNA, 3152 bp, Homo sapiens; identical to SEQ ID NO: 141585
  Payload ID: 7843
  Gene Symbol: HYDIN
  Gene Name: HYDIN, axonemal central pair apparatus protein
  Uniprot ID: Q4G0P3
  ENST ID: ENST00000538248
  CDS Start-End: 36-2888

SEQ ID NO: 141602 - DNA, 634 bp, Homo sapiens; identical to SEQ ID NO: 141592
  Payload ID: 7843
  Gene Symbol: HYDIN
  Gene Name: HYDIN, axonemal central pair apparatus protein
  ENST ID: ENST00000542890
  CDS Start-End: 1-383

SEQ ID NO: 141603 - DNA, 525 bp, Homo sapiens; identical to SEQ ID NO: 141588
  Payload ID: 7843
  Gene Symbol: HYDIN
  Gene Name: HYDIN, axonemal central pair apparatus protein
  ENST ID: ENST00000538568
  CDS Start-End: 1-341

SEQ ID NO: 141604 - DNA, 592 bp, Homo sapiens; identical to SEQ ID NO: 141579
  Payload ID: 7843
  Gene Symbol: HYDIN
  Gene Name: HYDIN, axonemal central pair apparatus protein
  ENST ID: ENST00000546257
  CDS Start-End: 1-130

SEQ ID NO: 141605 - DNA, 2792 bp, Homo sapiens; identical to SEQ ID NO: 141578
  Payload ID: 7843
  Gene Symbol: HYDIN
  Gene Name: HYDIN, axonemal central pair apparatus protein
  ENST ID: ENST00000539447
  CDS Start-End: 1-455

SEQ ID NO: 141606 - DNA, 4479 bp, Homo sapiens; identical to SEQ ID NO: 141590
  Payload ID: 7843
  Gene Symbol: HYDIN
  Gene Name: HYDIN, axonemal central pair apparatus protein
  ENST ID: ENST00000378856
  CDS Start-End: 1-148

SEQ ID NO: 141607 - DNA, 2595 bp, Homo sapiens; identical to SEQ ID NO: 141583
  Payload ID: 7843
  Gene Symbol: HYDIN
  Gene Name: HYDIN, axonemal central pair apparatus protein
  ENST ID: ENST00000545230
  CDS Start-End: 1-1587

SEQ ID NO: 141608 - DNA, 3091 bp, Homo sapiens; identical to SEQ ID NO: 141584
  Payload ID: 7843
  Gene Symbol: HYDIN
  Gene Name: HYDIN, axonemal central pair apparatus protein
  ENST ID: ENST00000393552
  CDS Start-End: 1-2502

SEQ ID NO: 141609 - DNA, 554 bp, Homo sapiens; identical to SEQ ID NO: 141589
  Payload ID: 7843
  Gene Symbol: HYDIN
  Gene Name: HYDIN, axonemal central pair apparatus protein
  ENST ID: ENST00000546297
  CDS Start-End: 1-248

SEQ ID NO: 141610 - DNA, 1634 bp, Homo sapiens
  Payload ID: 7844
  Gene Symbol: HVCN1
  Gene Name: hydrogen voltage gated channel 1
  Uniprot ID: Q96D96
  ENST ID: ENST00000242607
  CDS Start-End: 182-1003
acggggcgggacgggctgggccggacctgctctgaggctcccagtcgcagcggtgaccgcgggcgggtggggcgccgggtgaagaaaccaagacgcagagaggccaagccccttgccttgggtcacacagccaaaggaggcagagccagaactcacaaccagatccagaggcaacagggacatggccacctgggacgaaaaggcagtcacccgcagggccaaggtggctcccgctgagaggatgagcaagttcttaaggcacttcacggtcgtgggagacgactaccatgcctggaacatcaactacaagaaatgggagaatgaagaggaggaggaggaggaggagcagccaccacccacaccagtctcaggcgaggaaggcagagctgcagcccctgacgttgcccctgcccctggccccgcacccagggccccccttgacttcaggggcatgttgaggaaactgttcagctcccacaggtttcaggtcatcatcatctgcttggtggttctggatgccctcctggtgcttgctgagctcatcctggacctgaagatcatccagcccgacaagaataactatgctgccatggtattccactacatgagcatcaccatcttggtcttttttatgatggagatcatctttaaattatttgtcttccgcctggagttctttcaccacaagtttgagatcctggatgccgtcgtggtggtggtctcattcatcctcgacattgtcctcctgttccaggagcaccagtttgaggctctgggcctgctgattctgctccggctgtggcgggtggcccggatcatcaatgggattatcatctcagttaagacacgttcagaacggcaactcttaaggttaaaacagatgaatgtacaattggccgccaagattcaacaccttgagttcagctgctctgagaaggaacaagaaattgaaagacttaacaaactattgcgacagcatggacttcttggtgaagtgaactagacccggaccagctcccctcaaaaagaagacactgtctcatgggcctgtgctgtcacgagaggaacagctgcccctcctgggccgcttggtgagaggtttggtttgatacctctgcctccctcctgccagcatggattctgggtggacacagccttgtggaaggtccagtaccaccaagagctgcccatccactcccaccccacactgtatcaaatgtatcacattttctcatgttgaacactttagccttaattgaaaatgagcaacaaagctggacaattgctagttgtatataaaatttaatctcaccgaatgtacagttttcaaatttcacgtgtatattaaggaactgatgcatctgagcattctgaaagaaagaaaaagaagctactttagctgccaccccattctagaaaagtctcttattttcaagctgttctaaatagcttcgtctcagtttccccaaaaggggtacccaggcccctcctctgtgtgccccagctgcatcagccagcttctaggtggctccattgttttctgccacctgacaacatttttcctcaattactgtacaactactgtataaaataaaacaactactgtataaaataaactctctcttttccctgga

SEQ ID NO: 141611 - DNA, 2189 bp, Homo sapiens
  Payload ID: 7844
  Gene Symbol: HVCN1
  Gene Name: hydrogen voltage gated channel 1
  Uniprot ID: Q96D96
  ENST ID: ENST00000356742
  CDS Start-End: 755-1576
ggtgaagaaaccaagacgcagagaggccaagccccttgccttgggtcacacagccaaaggaggcagagccagaactcacaaccaggtctgtgtcccctaagtcctcggatgcatcgtccctgccccgctgccctcccgggagattgtaggagagaagcaggggcagaggcagtgctggatgtcccgggagaaggctgcaatgagcaggcccagccatccctgaaggaggagccccggggaagcaaactcttccctagaaacactttaaaagcacccacctgttggagacagagatgctgaggaacaagagtgattggggccagggtaaacgccaagacagagaggggagagcagttcctcagtggaactccctccaacattgcccccaccacttttaccagtgctgggtgtgggggatcttgcaggctcagcttcgtgacttggcctgtctctgcctcagtttccgcatctgtcccatgaggttaagcatgtacctacctcgcaggattgctgagaagatgatataagatgcttggtgtacaggcttagcccctggcaccaggttactaccaaaagttcatggttccagtgcttcctccaccctccgtcctgcccctctgagagtacttctctgtcctgggcacctttaacttcaggttgttcagggctatctgagatctgcaggatttccggacagccccaccagcaactaggagctgcttgagtaagaccaagatccagaggcaacagggacatggccacctgggacgaaaaggcagtcacccgcagggccaaggtggctcccgctgagaggatgagcaagttcttaaggcacttcacggtcgtgggagacgactaccatgcctggaacatcaactacaagaaatgggagaatgaagaggaggaggaggaggaggagcagccaccacccacaccagtctcaggcgaggaaggcagagctgcagcccctgacgttgcccctgcccctggccccgcacccagggccccccttgacttcaggggcatgttgaggaaactgttcagctcccacaggtttcaggtcatcatcatctgcttggtggttctggatgccctcctggtgcttgctgagctcatcctggacctgaagatcatccagcccgacaagaataactatgctgccatggtattccactacatgagcatcaccatcttggtcttttttatgatggagatcatctttaaattatttgtcttccgcctggagttctttcaccacaagtttgagatcctggatgccgtcgtggtggtggtctcattcatcctcgacattgtcctcctgttccaggagcaccagtttgaggctctgggcctgctgattctgctccggctgtggcgggtggcccggatcatcaatgggattatcatctcagttaagacacgttcagaacggcaactcttaaggttaaaacagatgaatgtacaattggccgccaagattcaacaccttgagttcagctgctctgagaaggaacaagaaattgaaagacttaacaaactattgcgacagcatggacttcttggtgaagtgaactagacccggaccagctcccctcaaaaagaagacactgtctcatgggcctgtgctgtcacgagaggaacagctgcccctcctgggccgcttggtgagaggtttggtttgatacctctgcctccctcctgccagcatggattctgggtggacacagccttgtggaaggtccagtaccaccaagagctgcccatccactcccaccccacactgtatcaaatgtatcacattttctcatgttgaacactttagccttaattgaaaatgagcaacaaagctggacaattgctagttgtatataaaatttaatctcaccgaatgtacagttttcaaatttcacgtgtatattaaggaactgatgcatctgagcattctgaaagaaagaaaaagaagctactttagctgccaccccattctagaaaagtctcttattttcaagctgttctaaatagcttcgtctcagtttccccaaaaggggtacccaggcccctcctctgtgtgccccagctgcatcagccagcttctaggtggctccattgttttctgccacctgacaacatttttcctcaattactgtacaactactgtataaaataaaacaactactgtataaaataaa

SEQ ID NO: 141612 - DNA, 1215 bp, Homo sapiens
  Payload ID: 7844
  Gene Symbol: HVCN1
  Gene Name: hydrogen voltage gated channel 1
  Uniprot ID: Q96D96
  ENST ID: ENST00000439744
  CDS Start-End: 177-938
cgtacgagttggcccggagcaaggcggcccaggacaggcaggggctgcacgcggtgaagaaaccaagacgcagagaggccaagccccttgccttgggtcacacagccaaaggaggcagagccagaactcacaaccaggcagtcacccgcagggccaaggtggctcccgctgagaggatgagcaagttcttaaggcacttcacggtcgtgggagacgactaccatgcctggaacatcaactacaagaaatgggagaatgaagaggaggaggaggaggaggagcagccaccacccacaccagtctcaggcgaggaaggcagagctgcagcccctgacgttgcccctgcccctggccccgcacccagggccccccttgacttcaggggcatgttgaggaaactgttcagctcccacaggtttcaggtcatcatcatctgcttggtggttctggatgccctcctggtgcttgctgagctcatcctggacctgaagatcatccagcccgacaagaataactatgctgccatggtattccactacatgagcatcaccatcttggtcttttttatgatggagatcatctttaaattatttgtcttccgcctggagttctttcaccacaagtttgagatcctggatgccgtcgtggtggtggtctcattcatcctcgacattgtcctcctgttccaggagcaccagtttgaggctctgggcctgctgattctgctccggctgtggcgggtggcccggatcatcaatgggattatcatctcagttaagacacgttcagaacggcaactcttaaggttaaaacagatgaatgtacaattggccgccaagattcaacaccttgagttcagctgctctgagaaggaacaagaaattgaaagacttaacaaactattgcgacagcatggacttcttggtgaagtgaactagacccggaccagctcccctcaaaaagaagacactgtctcatgggcctgtgctgtcacgagaggaacagctgcccctcctgggccgcttggtgagaggtttggtttgatacctctgcctccctcctgccagcatggattctgggtggacacagccttgtggaaggtccagtaccaccaagagctgcccatccactcccaccccacactgtatcaaatgtatcacattttctcatgttgaacactttagccttaattgaaaatgagcaacaaagctggac

SEQ ID NO: 141613 - DNA, 539 bp, Homo sapiens
  Payload ID: 7844
  Gene Symbol: HVCN1
  Gene Name: hydrogen voltage gated channel 1
  ENST ID: ENST00000546713
  CDS Start-End: 305-539
gcttctttcccagcctgcctcctggaggtgaacatgtgcaggtggagaagtgcccactgcatcggggccaaaagagagaacgctgcctacctcaccccaacggcatttgaaagtagactggctcatctgaaatgcttatttgcaagcatctaacttcctgaccctgtgtcacagatggccccacttggccccaagcccctggtgaagaaaccaagacgcagagaggccaagccccttgccttgggtcacacagccaaaggaggcagagccagaactcacaaccagatccagaggcaacagggacatggccacctgggacgaaaaggcagtcacccgcagggccaaggtggctcccgctgagaggatgagcaagttcttaaggcacttcacggtcgtgggagacgactaccatgcctggaacatcaactacaagaaatgggagaatgaagaggaggaggaggaggaggagcagccaccacccacaccagtctcaggcgaggaaggcagagctgcagcccctgacgttgcccctgcccctg

SEQ ID NO: 141614 - DNA, 441 bp, Homo sapiens
  Payload ID: 7844
  Gene Symbol: HVCN1
  Gene Name: hydrogen voltage gated channel 1
  ENST ID: ENST00000547887
  CDS Start-End: 23-262
cagatccagaggcaacagggacatggccacctgggacgaaaaggcagtcacccgcagggccaaggtggctcccgctgagaggatgagcaagttcttaaggcacttcacggtcgtgggagacgactaccatgcctggaacatcaactacaagaaatgggagaatgaagaggaggaggaggaggaggagcagccaccacccacaccagtctcaggtcatcatcatctgcttggtggttctggatgccctcctggtgcttgctgagctcatcctggacctgaagatcatccagcccgacaagaataactatgctgccatggtattccactacatgagcatcaccatcttggtcttttttatgatggagatcatctttaaattatttgtcttccgcctggagttctttcaccacaagtttgagatcctggatgccgtcgtggtgg

SEQ ID NO: 141615 - DNA, 1301 bp, Homo sapiens
  Payload ID: 7844
  Gene Symbol: HVCN1
  Gene Name: hydrogen voltage gated channel 1
  Uniprot ID: Q96D96
  ENST ID: ENST00000548312
  CDS Start-End: 210-977
ggatttttgtgatccgcgattcgctcccacgggcgggacctttgtaactgcgggaggcccaggacaggcccaccctgcggggcgggaggcagccggggtgagggaggtgaagaaaccaagacgcagagaggccaagccccttgccttgggtcacacagccaaaggaggcagagccagaactcacaaccagatccagaggcaacagggacatggccacctgggacgaaaaggcagtcacccgcagggccaaggtggctcccgctgagaggatgagcaagttcttaaggcacttcacggtcgtgggagacgactaccatgcctggaacatcaactacaagaaatgggagaatgaagaggaggaggaggaggaggagcagccaccacccacaccagtctcaggcgaggaaggcagagctgcagcccctgacgttgcccctgcccctggccccgcacccagggccccccttgacttcaggggcatgttgaggaaactgttcagctcccacaggtttcaggtcatcatcatctgcttggtggttctggatgccctcctggtgcttgctgagctcatcctggacctgaagatcatccagcccgacaagaataactatgctgccatggtattccactacatgagcatcaccatcttggtcttttttatgatggagatcatctttaaattatttgtcttccgcctggagttctttcaccacaagtttgagatcctggatgccgtcgtggtggtggtctcattcatcctcgacattgtcctcctgttccaggagcaccagtttgaggctctgggcctgctgattctgctccggctgtggcgggtggcccggatcatcaatgggattatcatctcagttaagacacgttcagaacggcaactcttaaggttaaaacagatgaatgtacaattggccgccaagattcaacaccttgagttcagctgctctgagaagcccctggactgatgagtttgctgtatcaacctgtaaggagaagctctctccggatggctatgggaatgaaagaatccgacttctactctcacacagccaccgtgaaagtcctggagtaaaatgtgctgtgtacagaagagagagaaggaagcaggctggcatgttcactgggctggtgttacgacagagaacctgacagtcactggccagttatcacttcagattacaaatcacacagagcatctgcctgttttcaatcacaagagaacaaaaccaaaatctataaagatattctgaaaatatgacagaatttgacaaataaaagcataaacgtgt

SEQ ID NO: 141616 - DNA, 829 bp, Homo sapiens
  Payload ID: 7844
  Gene Symbol: HVCN1
  Gene Name: hydrogen voltage gated channel 1
  ENST ID: ENST00000549442
  CDS Start-End: 188-829
gacttcagagctgggcctgcgcctgcggggccgtacgagttggcccggagcaaggcggcccaggacaggcaggggctgcacgcggtgaagaaaccaagacgcagagaggccaagccccttgccttgggtcacacagccaaaggaggcagagccagaactcacaaccagatccagaggcaacagggacatggccacctgggacgaaaaggcagtcacccgcagggccaaggtggctcccgctgagaggatgagcaagttcttaaggcacttcacggtcgtgggagacgactaccatgcctggaacatcaactacaagaaatgggagaatgaagaggaggaggaggaggaggagcagccaccacccacaccagtctcaggcgaggaaggcagagctgcagcccctgacgttgcccctgcccctggccccgcacccagggccccccttgacttcaggggcatgttgaggaaactgttcagctcccacaggtttcaggtcatcatcatctgcttggtggttctggatgccctcctggtgcttgctgagctcatcctggacctgaagatcatccagcccgacaagaataactatgctgccatggtattccactacatgagcatcaccatcttggtcttttttatgatggagatcatctttaaattatttgtcttccgcctggagttctttcaccacaagtttgagatcctggatgccgtcgtggtggtggtctcattcatcctcgacattgtcctcctgttccaggagcaccagtttgaggctctgggcctgctgattctgctccggctgtggcgggtggcccggatcatcaat

SEQ ID NO: 141617 - DNA, 1568 bp, Homo sapiens
  Payload ID: 7844
  Gene Symbol: HVCN1
  Gene Name: hydrogen voltage gated channel 1
  Uniprot ID: Q96D96
  ENST ID: ENST00000620084
  CDS Start-End: 23-844
cagatccagaggcaacagggacatggccacctgggacgaaaaggcagtcacccgcagggccaaggtggctcccgctgagaggatgagcaagttcttaaggcacttcacggtcgtgggagacgactaccatgcctggaacatcaactacaagaaatgggagaatgaagaggaggaggaggaggaggagcagccaccacccacaccagtctcaggcgaggaaggcagagctgcagcccctgacgttgcccctgcccctggccccgcacccagggccccccttgacttcaggggcatgttgaggaaactgttcagctcccacaggtttcaggtcatcatcatctgcttggtggttctggatgccctcctggtgcttgctgagctcatcctggacctgaagatcatccagcccgacaagaataactatgctgccatggtattccactacatgagcatcaccatcttggtcttttttatgatggagatcatctttaaattatttgtcttccgcctggagttctttcaccacaagtttgagatcctggatgccgtcgtggtggtggtctcattcatcctcgacattgtcctcctgttccaggagcaccagtttgaggctctgggcctgctgattctgctccggctgtggcgggtggcccggatcatcaatgggattatcatctcagttaagacacgttcagaacggcaactcttaaggttaaaacagatgaatgtacaattggccgccaagattcaacaccttgagttcagctgctctgagaaggaacaagaaattgaaagacttaacaaactattgcgacagcatggacttcttggtgaagtgaactagacccggaccagctcccctcaaaaagaagacactgtctcatgggcctgtgctgtcacgagaggaacagctgcccctcctgggccgcttggtgagaggtttggtttgatacctctgcctccctcctgccagcatggattctgggtggacacagccttgtggaaggtccagtaccaccaagagctgcccatccactcccaccccacactgtatcaaatgtatcacattttctcatgttgaacactttagccttaattgaaaatgagcaacaaagctggacaattgctagttgtatataaaatttaatctcaccgaatgtacagttttcaaatttcacgtgtatattaaggaactgatgcatctgagcattctgaaagaaagaaaaagaagctactttagctgccaccccattctagaaaagtctcttattttcaagctgttctaaatagcttcgtctcagtttccccaaaaggggtacccaggcccctcctctgtgtgccccagctgcatcagccagcttctaggtggctccattgttttctgccacctgacaacatttttcctcaattactgtacaactactgtataaaataaaacaactactgtataaaataaactctctcttttccctggaccctcctactgtattctttcctctgtggcacccataccagcctgccagtcggagagcaagctagctacagtgcctggtgcagaaatggcaatt

SEQ ID NO: 141618 - DNA, 1810 bp, Homo sapiens
  Payload ID: 7845
  Gene Symbol: HYLS1
  Gene Name: hydrolethalus syndrome 1
  Uniprot ID: Q96M11
  ENST ID: ENST00000356438
  CDS Start-End: 535-1434
aatcctcacattttgggagggaggccaaggcgggcagatcacctgaggttaggagttcaagatcagcctggccaacatggcgaaaccctgtctctattaaaaataccaaaattagctgggcatggtggcacgcgcctgtaataccagctactcaggaggctgaggcaggagagtcacttgaacccgggaggcggaggctgcagtgagtcgagatcgtgccactgcactccagcctgggcgacaagagcgagactctgtctcaaaaaaaaaagagtggttaacaagcatgatgatacaaccagttgaaagcaatatttgagttcataaagaagttgatgagttgataaaccaacaacacctaattggggaaagcataaggaagagagctgtgttgcaatcaaaaggttttttttttacttgaatgtaaataccaatcaagatacattgaaataaggacctgaaggtggcaagacagtagaaagcaggagtaagagtggaaatgaaagcagaaggtcctacagtgtaggggaagcaatggaagaacttctacctgatggacaaatatgggctaatatggatccagaagaacgaatgttggcagctgctacagcttttacccacatctgtgcagggcagggtgaaggagatgtcaggagagaagcccaatctatccaatatgatccctacagtaaagcttcagtagccccagggaagcgacctgctcttcctgtgcaactacagtacccacatgtagaaagtaatgtcccttcagaaacagtctctgaggcctcccaaagactccgaaagccagtgatgaagagaaaggtgctgcgcagaaagccagatggggaagtattagtaacagatgagtcgattatcagtgaatcagaatctggtacagaaaatgatcaggatctctgggacttaagacaaaggctgatgaatgtacagttccaggaagacaaggaatcttcatttgatgtttcacaaaaatttaacctaccacatgaataccaaggaatttctcaagatcagctcatttgctctctacaaagagaaggaatgggctctccagcttacgaacaagacctgattgttgccagcagacccaagtcctttattctcccaaagctggaccagttaagccgaaaccggggcaagacagaccgggtagcccggtattttgagtacaaacgggactgggactcaatacgtttacctggtgaagatcatagaaaggaattacgctggggtgtccgagagcagatgctttgtcgagcagaaccccaatccaaacctcagcatatatatgtcccaaacaattatctagtaccaacagagaagaaaaggtctgcactccgttggggtgttcgttgtgaccttgcaaatggtgtcatacccaggaagcttcccttccctctttctccttcttaaatctttttaaacttctttcacaggattgtttgagataacctagctctttatatcttcccttttaaatagaaacaactgtcttgagaagctcttcgaaacattttatggtaaggacttcacctatcattggtctttcctagctatatatcacattggtatcagatgatacttccaaattgccactcaaatccagcaattgcaagataaatcatatcagagaaagaacaacagacctggtctttctattttgtcaaattagtaagggccctttgtgtcctgtaactttttttacctatcaatatgagttgctgtgcttcagtgtgtgttttttaagttgctgggcattacacttaccaattaaagaattttggaaatt

SEQ ID NO: 141619 - DNA, 2061 bp, Homo sapiens
  Payload ID: 7845
  Gene Symbol: HYLS1
  Gene Name: hydrolethalus syndrome 1
  Uniprot ID: Q96M11
  ENST ID: ENST00000425380
  CDS Start-End: 782-1681
gcagccacgggtcacgccagggccctgcacaccatgcagaggaaaggaagagctcagtgcgccagggtttcatacagccgctctctcaggccccaaggaaacgtctagagcgcacaggcggactcaccccagactgttcgaaccgtccctgagcgcccgccctcgtctcccggcaccactggccccgcagcagccagttgagaagggcggaggctgattccaatgaagtggcagaccgttaggcggcctctccaaaaagccagctatgtcgccgttagccaaggtttgagggtcttctccttctcttcgagggcccaacctcccctccagatttagtacaccagaggcgtcgcagcaacggctgctgcctgcgcgcctcagctaggcgggctcggatatttttaaggccacattggaaatcccgggcatgctcccgccggcggagaaggcccagacaaaatgtgcgccaatcaggatacagacttggaggacgtttaccctcaggaccaataagagggagggcggaccgggccaagggtgccggttcgctctccggatttaaacctcagcggtcggcggttaaccgcaggctcggcgcgtgggccggcagtgcgcctgcgcaagttacgcgaaagctaacagaatctgcggtgctctgctggcgactggcaggacgcggtgcagagagcggacttccgcgacgcgggttttttttttacttgaatgtaaataccaatcaagatacattgaaataagaaggtcctacagtgtaggggaagcaatggaagaacttctacctgatggacaaatatgggctaatatggatccagaagaacgaatgttggcagctgctacagcttttacccacatctgtgcagggcagggtgaaggagatgtcaggagagaagcccaatctatccaatatgatccctacagtaaagcttcagtagccccagggaagcgacctgctcttcctgtgcaactacagtacccacatgtagaaagtaatgtcccttcagaaacagtctctgaggcctcccaaagactccgaaagccagtgatgaagagaaaggtgctgcgcagaaagccagatggggaagtattagtaacagatgagtcgattatcagtgaatcagaatctggtacagaaaatgatcaggatctctgggacttaagacaaaggctgatgaatgtacagttccaggaagacaaggaatcttcatttgatgtttcacaaaaatttaacctaccacatgaataccaaggaatttctcaagatcagctcatttgctctctacaaagagaaggaatgggctctccagcttacgaacaagacctgattgttgccagcagacccaagtcctttattctcccaaagctggaccagttaagccgaaaccggggcaagacagaccgggtagcccggtattttgagtacaaacgggactgggactcaatacgtttacctggtgaagatcatagaaaggaattacgctggggtgtccgagagcagatgctttgtcgagcagaaccccaatccaaacctcagcatatatatgtcccaaacaattatctagtaccaacagagaagaaaaggtctgcactccgttggggtgttcgttgtgaccttgcaaatggtgtcatacccaggaagcttcccttccctctttctccttcttaaatctttttaaacttctttcacaggattgtttgagataacctagctctttatatcttcccttttaaatagaaacaactgtcttgagaagctcttcgaaacattttatggtaaggacttcacctatcattggtctttcctagctatatatcacattggtatcagatgatacttccaaattgccactcaaatccagcaattgcaagataaatcatatcagagaaagaacaacagacctggtctttctattttgtcaaattagtaagggccctttgtgtcctgtaactttttttacctatcaatatgagttgctgtgcttcagtgtgtgttttttaagttgctgggcattacacttaccaattaaagaattttggaaattcatg

SEQ ID NO: 141620 - DNA, 1803 bp, Homo sapiens
  Payload ID: 7845
  Gene Symbol: HYLS1
  Gene Name: hydrolethalus syndrome 1
  Uniprot ID: Q96M11
  ENST ID: ENST00000526028
  CDS Start-End: 555-1454
ccggaagcggagggacgcggggacctggtggctgccggcccactgcggcgggagccctcgctccttttcccaccgtcgggacggtgcagagtggcagcttccctccgtggattccaggtcctgcctggcgagccgtccccaacgtctgcgttcctgagggaggcggccggggcagcgtgagctacaggcgatgtgcgcggcgggccgcagcccctggaggtcacggtgtgcgctggccgccgccgcggtctttgccccggtggcctttctgagctcctgggccgcgcccctgggaccaggcggaggccggggacggccccagggctggaggggagtcccgaaggccgctagcgacctgggtccaagccacgcccacggccaggcggggcgactgcgagctttgccgttgaaaggcggagcgtgtcttgtcgccttctagctgcaccttttgtggactgcagcatggaaccgtccaaggtgttttttttttacttgaatgtaaataccaatcaagatacattgaaataagaaggtcctacagtgtaggggaagcaatggaagaacttctacctgatggacaaatatgggctaatatggatccagaagaacgaatgttggcagctgctacagcttttacccacatctgtgcagggcagggtgaaggagatgtcaggagagaagcccaatctatccaatatgatccctacagtaaagcttcagtagccccagggaagcgacctgctcttcctgtgcaactacagtacccacatgtagaaagtaatgtcccttcagaaacagtctctgaggcctcccaaagactccgaaagccagtgatgaagagaaaggtgctgcgcagaaagccagatggggaagtattagtaacagatgagtcgattatcagtgaatcagaatctggtacagaaaatgatcaggatctctgggacttaagacaaaggctgatgaatgtacagttccaggaagacaaggaatcttcatttgatgtttcacaaaaatttaacctaccacatgaataccaaggaatttctcaagatcagctcatttgctctctacaaagagaaggaatgggctctccagcttacgaacaagacctgattgttgccagcagacccaagtcctttattctcccaaagctggaccagttaagccgaaaccggggcaagacagaccgggtagcccggtattttgagtacaaacgggactgggactcaatacgtttacctggtgaagatcatagaaaggaattacgctggggtgtccgagagcagatgctttgtcgagcagaaccccaatccaaacctcagcatatatatgtcccaaacaattatctagtaccaacagagaagaaaaggtctgcactccgttggggtgttcgttgtgaccttgcaaatggtgtcatacccaggaagcttcccttccctctttctccttcttaaatctttttaaacttctttcacaggattgtttgagataacctagctctttatatcttcccttttaaatagaaacaactgtcttgagaagctcttcgaaacattttatggtaaggacttcacctatcattggtctttcctagctatatatcacattggtatcagatgatacttccaaattgccactcaaatccagcaattgcaagataaatcatatcagagaaagaacaacagacctggtctttctattttgtcaaattagtaagggccctttgtgtcctgtaactttttttacctatcaatatgagttgctgtgcttcagtgtgtgttttttaagttgctgggcattaca

SEQ ID NO: 141621 - DNA, 1777 bp, Homo sapiens
  Payload ID: 7846
  Gene Symbol: HAO1
  Gene Name: hydroxyacid oxidase (glycolate oxidase) 1
  Uniprot ID: Q9UJM8
  ENST ID: ENST00000378789
  CDS Start-End: 53-1165
ttaaaaaaaaaaaaacaacgaactccatctgggatagcaataacctgtgaaaatgctcccccggctaatttgtatcaatgattatgaacaacatgctaaatcagtacttccaaagtctatatatgactattacaggtctggggcaaatgatgaagaaactttggctgataatattgcagcattttccagatggaagctgtatccaaggatgctccggaatgttgctgaaacagatctgtcgacttctgttttaggacagagggtcagcatgccaatatgtgtgggggctacggccatgcagcgcatggctcatgtggacggcgagcttgccactgtgagagcctgtcagtccctgggaacgggcatgatgttgagttcctgggccacctcctcaattgaagaagtggcggaagctggtcctgaggcacttcgttggctgcaactgtatatctacaaggaccgagaagtcaccaagaagctagtgcggcaggcagagaagatgggctacaaggccatatttgtgacagtggacacaccttacctgggcaaccgtctggatgatgtgcgtaacagattcaaactgccgccacaactcaggatgaaaaattttgaaaccagtactttatcattttctcctgaggaaaattttggagacgacagtggacttgctgcatatgtggctaaagcaatagacccatctatcagctgggaagatatcaaatggctgagaagactgacatcattgccaattgttgcaaagggcattttgagaggtgatgatgccagggaggctgttaaacatggcttgaatgggatcttggtgtcgaatcatggggctcgacaactcgatggggtgccagccactattgatgttctgccagaaattgtggaggctgtggaagggaaggtggaagtcttcctggacgggggtgtgcggaaaggcactgatgttctgaaagctctggctcttggcgccaaggctgtgtttgtggggagaccaatcgtttggggcttagctttccagggggagaaaggtgttcaagatgtcctcgagatactaaaggaagaattccggttggccatggctctgagtgggtgccagaatgtgaaagtcatcgacaagacattggtgaggaaaaatcctttggccgtttccaagatctgacagtgcacaatattttcccatctgtattattttttttcagcatgtattacttgacaaagagacactgtgcagagggtgaccacagtctgtaattccccacttcaatacaaagggtgtcgttcttttccaacaaaatagcaatcccttttatttcattgcttttgacttttcaatgggtgtcctaggaaccttttagaaagaaatggactttcatcctggaaatatattaactgttaaaaagaaaacattgaaaatgtgtttagacaacgtcatcccctggcaggctaaagtgctgtatcctttagtaaaattggaggtagcaaacactaaggtgaaaagataatgatctcattgtttattaacctgtattctgtttacatgtctttaaaacagtggttcttaaattgtaagctcaggttcaaagtgttggtaatgcctgattcacaactttgagaaggtagcactggagagaattggaatgggtggcggtaattggtgatacttctttgaatgtagatttccaatcacatctttagtgtctgaatatatccaaatgttttaggatgtatgttacttcttagagagaaataaagcatttttgggaagaatata

SEQ ID NO: 141622 - DNA, 1417 bp, Homo sapiens
  Payload ID: 7847
  Gene Symbol: HAO2
  Gene Name: hydroxyacid oxidase 2 (long chain)
  Uniprot ID: Q9NYQ3
  ENST ID: ENST00000325945
  CDS Start-End: 74-1129
gccaggctttgagtggctgcgtctaaacacttctttccctgaggactggaagacattagaataaggtccagaaatgtccttggtgtgtttgacagactttcaggcccatgcgcgagagcagctgtctaagtcaactcgggattttattgaaggtggagcagatgacagcatcacgcgggatgacaacattgcagcatttaaaagaattcgcctccgtccgcggtacctgagagatgtgtctgaggtggacaccagaaccacaatccaaggggaggagatcagtgcccctatttgtatcgcacccacagggttccactgccttgtctggcctgatggggaaatgagcacagcaagagctgcccaagcggctggtatctgctacatcaccagcacatttgccagctgtagccttgaagacattgtcattgcagctcccgaaggcctccgatggttccaactctatgtgcatccagacctgcagctgaacaaacagttgatccagagggtagaatccctaggtttcaaagctttggtaataactttggatacacctgtatgtggcaacaggcgacatgacattcgaaaccagttgaggaggaacttaacactaacagatcttcaatcacctaaaaagggaaatgcaataccttatttccagatgactcctatcagcacttctctctgctggaatgatctctcctggtttcagagcataactcgattgcccatcatcctgaaagggattttgacaaaagaggatgcagagttagctgtgaagcacaatgtccagggtatcattgtttccaaccatggtgggaggcagcttgatgaggttcttgcttcaattgatgctttgacagaagtggtggctgctgtaaaggggaaaattgaagtctacctggatggcggggtccgaactggcaatgatgtgctgaaggctctggcccttggagctaagtgcatttttcttgggagaccaatcctatggggccttgcctgcaagggtgaacatggtgttaaggaagttttgaacattttaacaaatgagttccacacttccatggcccttacaggctgccggtcggtcgctgagatcaatcgaaacttggtccagttttccaggctgtaagaaaaaagggccaataaccagactgctgaggttgcccacaggaggatcacaaactcacagcacagtgtgtgatgctgtccttcctggaccccattctgtccggaggctcatggcccatatttcccacatttctaataccaccacccctgtgcttcaggccctccaaacccctgtgttccccaaatgttccatgcccttctttgtatcactgactattatatgttgctctcttgcctaaatcttcctctgaagtaaaagatctcaaaaggacagatcattaatgactgg

SEQ ID NO: 141623 - DNA, 1668 bp, Homo sapiens
  Payload ID: 7847
  Gene Symbol: HAO2
  Gene Name: hydroxyacid oxidase 2 (long chain)
  Uniprot ID: Q9NYQ3
  ENST ID: ENST00000361035
  CDS Start-End: 284-1378
ggtgtgtttcctaacacctccggcagtgagccaggctttgagtggctgcgtctaaacacttctttccctgaggactggaagacattagaataagctccagacaattcaaacattgagattcctgggaactaccagatagtagcatcagttcaccaagaaatgaagctggtgaggcagtgaaaatccagggcctagaaagctgggaatgccatgacgtgggcacattgaaagacaagaggcaggcatgatcagccttgaactttaggaagatcccaggaagctgatggaagacaagatgtggagtgaatgtgaaggtccagaaatgtccttggtgtgtttgacagactttcaggcccatgcgcgagagcagctgtctaagtcaactcgggattttattgaaggtggagcagatgacagcatcacgcgggatgacaacattgcagcatttaaaagaattcgcctccgtccgcggtacctgagagatgtgtctgaggtggacaccagaaccacaatccaaggggaggagatcagtgcccctatttgtatcgcacccacagggttccactgccttgtctggcctgatggggaaatgagcacagcaagagctgcccaagcggctggtatctgctacatcaccagcacatttgccagctgtagccttgaagacattgtcattgcagctcccgaaggcctccgatggttccaactctatgtgcatccagacctgcagctgaacaaacagttgatccagagggtagaatccctaggtttcaaagctttggtaataactttggatacacctgtatgtggcaacaggcgacatgacattcgaaaccagttgaggaggaacttaacactaacagatcttcaatcacctaaaaagggaaatgcaataccttatttccagatgactcctatcagcacttctctctgctggaatgatctctcctggtttcagagcataactcgattgcccatcatcctgaaagggattttgacaaaagaggatgcagagttagctgtgaagcacaatgtccagggtatcattgtttccaaccatggtgggaggcagcttgatgaggttcttgcttcaattgatgctttgacagaagtggtggctgctgtaaaggggaaaattgaagtctacctggatggcggggtccgaactggcaatgatgtgctgaaggctctggcccttggagctaagtgcatttttcttgggagaccaatcctatggggccttgcctgcaagggtgaacatggtgttaaggaagttttgaacattttaacaaatgagttccacacttccatggcccttacaggctgccggtcggtcgctgagatcaatcgaaacttggtccagttttccaggctgtaagaaaaaagggccaataaccagactgctgaggttgcccacaggaggatcacaaactcacagcacagtgtgtgatgctgtccttcctggaccccattctgtccggaggctcatggcccatatttcccacatttctaataccaccacccctgtgcttcaggccctccaaacccctgtgttccccaaatgttccatgcccttctttgtatcactgactattatatgttgctctcttgcctaaatcttcctctgaagtaaaagatctcaaaaggacagatcattaatgactggaa

SEQ ID NO: 141624 - DNA, 691 bp, Homo sapiens
  Payload ID: 7847
  Gene Symbol: HAO2
  Gene Name: hydroxyacid oxidase 2 (long chain)
  ENST ID: ENST00000457318
  CDS Start-End: 133-691
ttctttagcctgaactgtgggtagtgatgtggtgtgtttcctaacacctccggcagtgagccaggctttgagtggctgcgtctaaacacttctttccctgaggactggaagacattagaataaggtccagaaatgtccttggtgtgtttgacagactttcaggcccatgcgcgagagcagctgtctaagtcaactcgggattttattgaaggtggagcagatgacagcatcacgcgggatgacaacattgcagcatttaaaagaattcgcctccgtccgcggtacctgagagatgtgtctgaggtggacaccagaaccacaatccaaggggaggagatcagtgcccctatttgtatcgcacccacagggttccactgccttgtctggcctgatggggaaatgagcacagcaagagctcccgaaggcctccgatggttccaactctatgtgcatccagacctgcagctgaacaaacagttgatccagagggtagaatccctaggtttcaaagctttggtaataactttggatacacctgtatgtggcaacaggcgacatgacattcgaaaccagttgaggaggaacttaacactaacagatcttcaatcacctaaaaagggaaatgcaataccttatttccagatgactcctatcagcacttctctctgctggaatgatctctcctggtttc

SEQ ID NO: 141625 - DNA, 1696 bp, Homo sapiens
  Payload ID: 7847
  Gene Symbol: HAO2
  Gene Name: hydroxyacid oxidase 2 (long chain)
  Uniprot ID: Q9NYQ3
  ENST ID: ENST00000622548
  CDS Start-End: 353-1408
ttctttagcctgaactgtgggtagtgatgtggtgtgtttcctaacacctccggcagtgagccaggctttgagtggctgcgtctaaacacttctttccctgaggactggaagacattagaataagctccagacaattcaaacattgagattcctgggaactaccagatagtagcatcagttcaccaagaaatgaagctggtgaggcagtgaaaatccagggcctagaaagctgggaatgccatgacgtgggcacattgaaagacaagaggcaggcatgatcagccttgaactttaggaagatcccaggaagctgatggaagacaagatgtggagtgaatgtgaaggtccagaaatgtccttggtgtgtttgacagactttcaggcccatgcgcgagagcagctgtctaagtcaactcgggattttattgaaggtggagcagatgacagcatcacgcgggatgacaacattgcagcatttaaaagaattcgcctccgtccgcggtacctgagagatgtgtctgaggtggacaccagaaccacaatccaaggggaggagatcagtgcccctatttgtatcgcacccacagggttccactgccttgtctggcctgatggggaaatgagcacagcaagagctgcccaagcggctggtatctgctacatcaccagcacatttgccagctgtagccttgaagacattgtcattgcagctcccgaaggcctccgatggttccaactctatgtgcatccagacctgcagctgaacaaacagttgatccagagggtagaatccctaggtttcaaagctttggtaataactttggatacacctgtatgtggcaacaggcgacatgacattcgaaaccagttgaggaggaacttaacactaacagatcttcaatcacctaaaaagggaaatgcaataccttatttccagatgactcctatcagcacttctctctgctggaatgatctctcctggtttcagagcataactcgattgcccatcatcctgaaagggattttgacaaaagaggatgcagagttagctgtgaagcacaatgtccagggtatcattgtttccaaccatggtgggaggcagcttgatgaggttcttgcttcaattgatgctttgacagaagtggtggctgctgtaaaggggaaaattgaagtctacctggatggcggggtccgaactggcaatgatgtgctgaaggctctggcccttggagctaagtgcatttttcttgggagaccaatcctatggggccttgcctgcaagggtgaacatggtgttaaggaagttttgaacattttaacaaatgagttccacacttccatggcccttacaggctgccggtcggtcgctgagatcaatcgaaacttggtccagttttccaggctgtaagaaaaaagggccaataaccagactgctgaggttgcccacaggaggatcacaaactcacagcacagtgtgtgatgctgtccttcctggaccccattctgtccggaggctcatggcccatatttcccacatttctaataccaccacccctgtgcttcaggccctccaaacccctgtgttccccaaatgttccatgcccttctttgtatcactgactattatatgttgctctcttgcctaaatcttcctctgaagtaaaagatctcaaaaggacagatcattaatgactgg

SEQ ID NO: 141626 - DNA, 1912 bp, Homo sapiens
  Payload ID: 7848
  Gene Symbol: HADH
  Gene Name: hydroxyacyl-CoA dehydrogenase
  Uniprot ID: Q16836
  ENST ID: ENST00000309522
  CDS Start-End: 150-1094
ccccgccttgtggcgtcacggggacgccgggggcgcgcgggctgcagggccgcgtaggtccccgcccccagagtctggctttccgcggctgcccgcctcgcgcgtcttccctgcccgggtctcctcgctgtcgccgccgctgccacaccatggccttcgtcaccaggcagttcatgcgttccgtgtcctcctcgtccaccgcctcggcctcggccaagaagataatcgtcaagcacgtgacggtcatcggcggcgggctgatgggcgccggcattgcccaggttgctgcagcaactggtcacacagtagtgttggtagaccagacagaggacatcctggcaaaatccaaaaagggaattgaggaaagccttaggaaagtggcaaagaagaagtttgcagaaaaccttaaggccggcgatgaatttgtggagaagaccctgagcaccatagcgaccagcacggatgcagcctccgttgtccacagcacagacttggtggtggaagccatcgtggagaatctgaaggtgaaaaacgagctcttcaaaaggctggacaagtttgctgctgaacatacaatctttgccagcaacacttcctccttgcagattacaagcatagctaatgccaccaccagacaagaccgattcgctggcctccatttcttcaacccagtgcctgtcatgaaacttgtggaggtcattaaaacaccaatgaccagccagaagacatttgaatctttggtagactttagcaaagccctaggaaagcatcctgtttcttgcaaggacactcctgggtttattgtgaaccgcctcctggttccatacctcatggaagcaatcaggctgtatgaacgaggtgacgcatccaaagaagacattgacactgctatgaaattaggagccggttaccccatgggcccatttgagcttctagattatgtcggactggatactacgaagttcatcgtggatgggtggcatgaaatggatgcagagaacccattacatcagcccagcccatccttaaataagctggtagcagagaacaagttcggcaagaagactggagaaggattttacaaatacaagtgatgtgcagcttctccggctctgagaagaacacctgagagcgctttccagccagtgccccgagtgcctgtgggaatgctctttggtcagacattccctcacacagtacagtttaataaatgtgcattttgattgtaatctatcgaagtgattattacaccagttacagcagtaatagattctccattaagaaataattcccttttttagtctgttcatttctgtgtattttctaaacagctttacacccttggtgccttggagcaaacatgttttttgaaccttgtcatttttgtgaagaattgcctagattccttctctcatcaacgggaaagtacttcctctgagagtgcgagtgcaccatgctcactgttgctgcgtgggagagtcacaagccactggcaagcaagtggtatagtctgtgaagcactgcagcgagcagcacctggatcttgcctttataagaacattttactacctgcagctttgagtcttgccctacattttgggcatgacataagatgtgtctttattcagctcgtcgtgaagatgctgctgctgaatgggtcagcatatctctgtttgcatggtttgcaggaggtcggttttcatggtcattcagttccacagatctgaatgattactgtctgtctgtgtcttttttccatgagaaatcactgttgcaaattgcctataaattgactctactaaaataacaatgtttcagtctgaaaatttgaattgaaaaaaatgtataatataaaattgtaatacactcaaatgattataaaagtaaaagttggtaatttaggcagaagcta

SEQ ID NO: 141627 - DNA, 2033 bp, Homo sapiens
  Payload ID: 7848
  Gene Symbol: HADH
  Gene Name: hydroxyacyl-CoA dehydrogenase
  ENST ID: ENST00000403312
  CDS Start-End: 43-1215
cgtgtatacccgctcaacgctgggacgttacagccagggccaatgggcagagcgggactcgaggccccgcccccgccttgtggcgtcacggggacgccgggggcgcgcgggctgcagggccgcgtaggtccccgcccccagagtctggctttccgcggctgcccgcctcgcgcgtcttccctgcccgggtctcctcgctgtcgccgccgctgccacaccatggccttcgtcaccaggcagttcatgcgttccgtgtcctcctcgtccaccgcctcggcctcggccaagaagataatcgtcaagcacgtgacggtcatcggcggcgggctgatgggcgccggcattgcccaggttgctgcagcaactggtcacacagtagtgttggtagaccagacagaggacatcctggcaaaatccaaaaagggaattgaggaaagccttaggaaagtggcaaagaagaagtttgcagaaaaccttaaggccggcgatgaatttgtggagaagaccctgagcaccatagcgaccagcacggatgcagcctccgttgtccacagcacagacttggtggtggaagccatcgtggagaatctgaaggtgaaaaacgagctcttcaaaaggctggacaagtttgctgctgaacatacaatctttgccagcaacacttcctccttgcagattacaagcatagctaatgccaccaccagacaagaccgattcgctggcctccatttcttcaacccagtgcctgtcatgaaacttgtggaggtcattaaaacaccaatgaccagccagaagacatttgaatctttggtagactttagcaaagccctaggaaagcatcctgtttcttgcaaggacactcctgggtttattgtgaaccgcctcctggttccatacctcatggaagcaatcaggctgtatgaacgagacttccaaacgtgtggtgattctaactcgggtttgggcttttctttaaaaggtgacgcatccaaagaagacattgacactgctatgaaattaggagccggttaccccatgggcccatttgagcttctagattatgtcggactggatactacgaagttcatcgtggatgggtggcatgaaatggatgcagagaacccattacatcagcccagcccatccttaaataagctggtagcagagaacaagttcggcaagaagactggagaaggattttacaaatacaagtgatgtgcagcttctccggctctgagaagaacacctgagagcgctttccagccagtgccccgagtgcctgtgggaatgctctttggtcagacattccctcacacagtacagtttaataaatgtgcattttgattgtaatctatcgaagtgattattacaccagttacagcagtaatagattctccattaagaaataattcccttttttagtctgttcatttctgtgtattttctaaacagctttacacccttggtgccttggagcaaacatgttttttgaaccttgtcatttttgtgaagaattgcctagattccttctctcatcaacgggaaagtacttcctctgagagtgcgagtgcaccatgctcactgttgctgcgtgggagagtcacaagccactggcaagcaagtggtatagtctgtgaagcactgcagcgagcagcacctggatcttgcctttataagaacattttactacctgcagctttgagtcttgccctacattttgggcatgacataagatgtgtctttattcagctcgtcgtgaagatgctgctgctgaatgggtcagcatatctctgtttgcatggtttgcaggaggtcggttttcatggtcattcagttccacagatctgaatgattactgtctgtctgtgtcttttttccatgagaaatcactgttgcaaattgcctataaattgactctactaaaataacaatgtttcagtctgaaaatttgaattgaaaaaaatgtataatataaaattgtaatacactcaaatgattataaaagtaaaagttggtaatttaggcagaagcta

SEQ ID NO: 141628 - DNA, 571 bp, Homo sapiens
  Payload ID: 7848
  Gene Symbol: HADH
  Gene Name: hydroxyacyl-CoA dehydrogenase
  ENST ID: ENST00000511742
  CDS Start-End: 79-237
agtctggctttccgcggctgcccgcctcgcgcgtcttccctgcccgggtctcctcgctgtcgccgccgctgccacaccatggccttcgtcaccaggcagttcatgcgttccgtgtcctcctcgtccaccgcctcggcctcggccaagaagataatcgtcaagcacgtgacggtcatcggcggcgggctgatgggcgccggcattgcccaggaaagaggttggcctcagcagcaatgagggataattctttcaagaaaggaatgaagagagaagttagatggaaaagagatttttaaggtcaaaagaagcagctgaagaacatgtgtaggacagccttaggagttactacacttcaagacctgggtgtctgctggaggaaggaacatgaccctgcggagatgttaagggttgggagagctgagcttggaggctggaagcccagctgggaggctattgttaaagagaattaatacaagtgtattctggatgatttgaatgtttcatcactaacgagatctgagatatccatccccttatgtgcatttgtgttcatattattatttgtgccaag

SEQ ID NO: 141629 - DNA, 2044 bp, Homo sapiens
  Payload ID: 7848
  Gene Symbol: HADH
  Gene Name: hydroxyacyl-CoA dehydrogenase
  ENST ID: ENST00000505878
  CDS Start-End: 274-1230
gtctcctcgctgtcgccgccgctgccacaccatggccttcgtcaccaggcagttcatgcgttccgtgtcctcctcgtccaccgcctcggcctcggccaagaagataatcgtcaagcacgtgacggtcatcggcggcgggctgatgggcgccggcattgcccaggaaagaggttggcctcagcagcaatgagggataattctttcaagaaaggaatgaagagagaagttagatggaaaagagatttttaaggtcaaaagaagcagctgaagaacatgtgtaggacagccttaggagttactacacttcaagacctgggtgtctgctggaggaaggaacatgaccctgcggagatgttaagggttgggagagctgagcttggaggctggaagcccagctgggaggctattgttaaagaggttgctgcagcaactggtcacacagtagtgttggtagaccagacagaggacatcctggcaaaatccaaaaagggaattgaggaaagccttaggaaagtggcaaagaagaagtttgcagaaaaccttaaggccggcgatgaatttgtggagaagaccctgagcaccatagcgaccagcacggatgcagcctccgttgtccacagcacagacttggtggtggaagccatcgtggagaatctgaaggtgaaaaacgagctcttcaaaaggctggacaagtttgctgctgaacatacaatctttgccagcaacacttcctccttgcagattacaagcatagctaatgccaccaccagacaagaccgattcgctggcctccatttcttcaacccagtgcctgtcatgaaacttgtggaggtcattaaaacaccaatgaccagccagaagacatttgaatctttggtagactttagcaaagccctaggaaagcatcctgtttcttgcaaggacactcctgggtttattgtgaaccgcctcctggttccatacctcatggaagcaatcaggctgtatgaacgaggtgacgcatccaaagaagacattgacactgctatgaaattaggagccggttaccccatgggcccatttgagcttctagattatgtcggactggatactacgaagttcatcgtggatgggtggcatgaaatggatgcagagaacccattacatcagcccagcccatccttaaataagctggtagcagagaacaagttcggcaagaagactggagaaggattttacaaatacaagtgatgtgcagcttctccggctctgagaagaacacctgagagcgctttccagccagtgccccgagtgcctgtgggaatgctctttggtcagacattccctcacacagtacagtttaataaatgtgcattttgattgtaatctatcgaagtgattattacaccagttacagcagtaatagattctccattaagaaataattcccttttttagtctgttcatttctgtgtattttctaaacagctttacacccttggtgccttggagcaaacatgttttttgaaccttgtcatttttgtgaagaattgcctagattccttctctcatcaacgggaaagtacttcctctgagagtgcgagtgcaccatgctcactgttgctgcgtgggagagtcacaagccactggcaagcaagtggtatagtctgtgaagcactgcagcgagcagcacctggatcttgcctttataagaacattttactacctgcagctttgagtcttgccctacattttgggcatgacataagatgtgtctttattcagctcgtcgtgaagatgctgctgctgaatgggtcagcatatctctgtttgcatggtttgcaggaggtcggttttcatggtcattcagttccacagatctgaatgattactgtctgtctgtgtcttttttccatgagaaatcactgttgcaaattgcctataaattgactctactaaaataacaatgtttcagtctgaaaatttgaattgaaaaaaatgtataatataaaattgtaatacactcaaatgattataaaagtaaaagttggtaatttaggcagaa

SEQ ID NO: 141630 - DNA, 2032 bp, Homo sapiens
  Payload ID: 7848
  Gene Symbol: HADH
  Gene Name: hydroxyacyl-CoA dehydrogenase
  Uniprot ID: Q16836
  ENST ID: ENST00000603302
  CDS Start-End: 220-1215
cgtgtatacccgctcaacgctgggacgttacagccagggccaatgggcagagcgggactcgaggccccgcccccgccttgtggcgtcacggggacgccgggggcgcgcgggctgcagggccgcgtaggtccccgcccccagagtctggctttccgcggctgcccgcctcgcgcgtcttccctgcccgggtctcctcgctgtcgccgccgctgccacaccatggccttcgtcaccaggcagttcatgcgttccgtgtcctcctcgtccaccgcctcggcctcggccaagaagataatcgtcaagcacgtgacggtcatcggcggcgggctgatgggcgccggcattgcccaggttgctgcagcaactggtcacacagtagtgttggtagaccagacagaggacatcctggcaaaatccaaaaagggaattgaggaaagccttaggaaagtggcaaagaagaagtttgcagaaaaccttaaggccggcgatgaatttgtggagaagaccctgagcaccatagcgaccagcacggatgcagcctccgttgtccacagcacagacttggtggtggaagccatcgtggagaatctgaaggtgaaaaacgagctcttcaaaaggctggacaagtttgctgctgaacatacaatctttgccagcaacacttcctccttgcagattacaagcatagctaatgccaccaccagacaagaccgattcgctggcctccatttcttcaacccagtgcctgtcatgaaacttgtggaggtcattaaaacaccaatgaccagccagaagacatttgaatctttggtagactttagcaaagccctaggaaagcatcctgtttcttgcaaggacactcctgggtttattgtgaaccgcctcctggttccatacctcatggaagcaatcaggctgtatgaacgagacttccaaacgtgtggtgattctaactcgggtttgggcttttctttaaaaggtgacgcatccaaagaagacattgacactgctatgaaattaggagccggttaccccatgggcccatttgagcttctagattatgtcggactggatactacgaagttcatcgtggatgggtggcatgaaatggatgcagagaacccattacatcagcccagcccatccttaaataagctggtagcagagaacaagttcggcaagaagactggagaaggattttacaaatacaagtgatgtgcagcttctccggctctgagaagaacacctgagagcgctttccagccagtgccccgagtgcctgtgggaatgctctttggtcagacattccctcacacagtacagtttaataaatgtgcattttgattgtaatctatcgaagtgattattacaccagttacagcagtaatagattctccattaagaaataattcccttttttagtctgttcatttctgtgtattttctaaacagctttacacccttggtgccttggagcaaacatgttttttgaaccttgtcatttttgtgaagaattgcctagattccttctctcatcaacgggaaagtacttcctctgagagtgcgagtgcaccatgctcactgttgctgcgtgggagagtcacaagccactggcaagcaagtggtatagtctgtgaagcactgcagcgagcagcacctggatcttgcctttataagaacattttactacctgcagctttgagtcttgccctacattttgggcatgacataagatgtgtctttattcagctcgtcgtgaagatgctgctgctgaatgggtcagcatatctctgtttgcatggtttgcaggaggtcggttttcatggtcattcagttccacagatctgaatgattactgtctgtctgtgtcttttttccatgagaaatcactgttgcaaattgcctataaattgactctactaaaataacaatgtttcagtctgaaaatttgaattgaaaaaaatgtataatataaaattgtaatacactcaaatgattataaaagtaaaagttggtaatttaggcagaagct

SEQ ID NO: 141631 - DNA, 1774 bp, Homo sapiens
  Payload ID: 7848
  Gene Symbol: HADH
  Gene Name: hydroxyacyl-CoA dehydrogenase
  ENST ID: ENST00000626637
  CDS Start-End: 1-957
atgtgtaggacagccttaggagttactacacttcaagacctgggtgtctgctggaggaaggaacatgaccctgcggagatgttaagggttgggagagctgagcttggaggctggaagcccagctgggaggctattgttaaagaggttgctgcagcaactggtcacacagtagtgttggtagaccagacagaggacatcctggcaaaatccaaaaagggaattgaggaaagccttaggaaagtggcaaagaagaagtttgcagaaaaccttaaggccggcgatgaatttgtggagaagaccctgagcaccatagcgaccagcacggatgcagcctccgttgtccacagcacagacttggtggtggaagccatcgtggagaatctgaaggtgaaaaacgagctcttcaaaaggctggacaagtttgctgctgaacatacaatctttgccagcaacacttcctccttgcagattacaagcatagctaatgccaccaccagacaagaccgattcgctggcctccatttcttcaacccagtgcctgtcatgaaacttgtggaggtcattaaaacaccaatgaccagccagaagacatttgaatctttggtagactttagcaaagccctaggaaagcatcctgtttcttgcaaggacactcctgggtttattgtgaaccgcctcctggttccatacctcatggaagcaatcaggctgtatgaacgaggtgacgcatccaaagaagacattgacactgctatgaaattaggagccggttaccccatgggcccatttgagcttctagattatgtcggactggatactacgaagttcatcgtggatgggtggcatgaaatggatgcagagaacccattacatcagcccagcccatccttaaataagctggtagcagagaacaagttcggcaagaagactggagaaggattttacaaatacaagtgatgtgcagcttctccggctctgagaagaacacctgagagcgctttccagccagtgccccgagtgcctgtgggaatgctctttggtcagacattccctcacacagtacagtttaataaatgtgcattttgattgtaatctatcgaagtgattattacaccagttacagcagtaatagattctccattaagaaataattcccttttttagtctgttcatttctgtgtattttctaaacagctttacacccttggtgccttggagcaaacatgttttttgaaccttgtcatttttgtgaagaattgcctagattccttctctcatcaacgggaaagtacttcctctgagagtgcgagtgcaccatgctcactgttgctgcgtgggagagtcacaagccactggcaagcaagtggtatagtctgtgaagcactgcagcgagcagcacctggatcttgcctttataagaacattttactacctgcagctttgagtcttgccctacattttgggcatgacataagatgtgtctttattcagctcgtcgtgaagatgctgctgctgaatgggtcagcatatctctgtttgcatggtttgcaggaggtcggttttcatggtcattcagttccacagatctgaatgattactgtctgtctgtgtcttttttccatgagaaatcactgttgcaaattgcctataaattgactctactaaaataacaatgtttcagtctgaaaatttgaattgaaaaaaatgtataatataaaattgtaatacactcaaatgattataaaagtaaaagttggtaatttaggcagaagct

SEQ ID NO: 141632 - DNA, 3037 bp, Homo sapiens
  Payload ID: 7849
  Gene Symbol: HADHA
  Gene Name: hydroxyacyl-CoA dehydrogenase/3-ketoacyl-CoA thiolase /enoyl-CoA hydratase (trifunctional protein), alpha subunit
  Uniprot ID: P40939
  ENST ID: ENST00000380649
  CDS Start-End: 131-2422
cggccactcggcatctgggttttagtcaggcagtgctccaggcgcctggctgccaggctacgggagaaaagtcctccgctcggccgcacccgttagaggcgctctccactgctgtcctcttcagctcaagatggtggcctgccgggcgattggcatcctcagccgcttttctgccttcaggatcctccgctcccgaggttatatatgccgcaattttacagggtcttctgctttgctgaccagaacccatattaactatggagtcaaaggggatgtggcagttgttcgaattaactctcccaattcaaaggtaaatacactgagtaaagagctacattcagagttctcagaagttatgaatgaaatctgggctagtgatcaaatcagaagtgccgtccttatctcatcaaagccaggctgctttattgcaggtgctgatatcaacatgttagccgcttgcaagacccttcaagaagtaacacagctatcacaagaagcacagagaatagttgagaaacttgaaaagtccacaaagcctattgtggctgccatcaatggatcctgcctgggaggaggacttgaggttgccatttcatgccaatacagaatagcaacaaaagacagaaaaacagtattaggtacccctgaagttttgctgggggccttaccaggagcaggaggcacacaaaggctgcccaaaatggtgggtgtgcctgctgctttggacatgatgctgactggtagaagcattcgtgcagacagggcaaagaaaatgggactggttgaccaactggtggaacccctgggaccaggactaaaacctccagaggaacggacaatagaatacctagaagaagttgcaattacttttgccaaaggactagctgataagaagatctctccaaagagagacaagggattggtggaaaaattgacagcgtatgccatgactattccatttgtcaggcaacaggtttacaaaaaagtggaagaaaaagtgcgaaagcagactaaaggcctttatcctgcacctctgaaaataattgatgtggtaaagactggaattgagcaagggagtgatgccggttatctctgtgaatctcagaaatttggagagcttgtaatgaccaaagaatcaaaggccttgatgggactctaccatggtcaggtcctgtgcaagaagaataaatttggagctccacagaaggatgttaagcatctggctattcttggtgcagggctgatgggagcaggcatcgcccaagtctccgtggataaggggctaaagactatacttaaagatgccaccctcactgcgctagaccgaggacagcaacaagtgttcaaaggattgaatgacaaagtgaagaagaaagctctaacatcatttgaaagggattccatcttcagcaacttgactgggcagcttgattaccaaggttttgaaaaggccgacatggtgattgaagctgtgtttgaggaccttagtcttaagcacagagtgctaaaggaagtagaagcggtgattccagatcactgtatctttgccagtaacacatctgctctcccaatcagtgaaatcgctgctgtcagcaaaagacctgagaaggtgattggcatgcactacttctctcccgtggacaagatgcagctgctggagattatcacgaccgagaaaacttccaaagacaccagtgcttcagctgtagcagttggtctcaagcaggggaaggtcatcattgtggttaaggatggacctggcttctatactaccaggtgtcttgcgcccatgatgtctgaagtcatccgaatcctccaggaaggagttgacccgaagaagctggattccctgaccacaagctttggctttcctgtgggtgccgccacactggtggatgaagttggtgtggatgtagcgaaacatgtggcggaagatctgggcaaagtctttggggagcggtttggaggtggaaacccagaactgctgacacagatggtgtccaagggcttcctaggtcgtaaatctgggaagggcttttacatctatcaggagggtgtgaagaggaaggatttgaattctgacatggatagtattttagcgagtctgaagctgcctcctaagtctgaagtctcatcagacgaagacatccagttccgcctggtgacaagatttgtgaatgaggcagtcatgtgcctgcaagaggggatcttggccacacctgcagagggagacatcggagccgtctttgggcttggcttcccgccttgtctgggagggcctttccgctttgtggatctgtatggcgcccagaagatagtggaccggctcaagaaatatgaagctgcctatggaaaacagttcaccccatgccagctgctagctgaccatgctaacagccctaacaagaagttctaccagtgagcaggcctcatgcctcgctcagtcagtgcactaaccccagctgccggcagtgctggttctccaacagagtggtgtctagatttatcagagtaacgagaagacaaactccggcactgggtttgctccctgattaaagtgccttcagccaagaccatctctccctcctggtgaagtgtgacttcgaattagtttgcacttcctgttggaaggtagagcccactgctcattgtataagccccgaggcctagagtggcagccaagagccatctgaagccacctctctgcctgttcctcccaagaggccagggtggccaggggtggtgagggcagttctgcacccagccaaacacataacaataaaaaccaaactctgtgtcagcatctttgcccttctggtttaaacgcctccttcaaaaagcaatctggaagaaagccctgtgctttgggggagtaagaatgtgtgtgcagaattctaggcagcaccttagggagggactgggatgagagaaagtgggacctggtgggctcaaccacacacacctgtctgtgcagatgctttgcccaggcttctcaccacggtgtaccgggatattaaacctctttccccagcctgga

SEQ ID NO: 141633 - DNA, 752 bp, Homo sapiens
  Payload ID: 7849
  Gene Symbol: HADHA
  Gene Name: hydroxyacyl-CoA dehydrogenase/3-ketoacyl-CoA thiolase /enoyl-CoA hydratase (trifunctional protein), alpha subunit
  ENST ID: ENST00000492433
  CDS Start-End: 1-752
gagaaaacttccaaagacaccagtgcttcagctgtagcagttggtctcaagcaggggaaggtcatcattgtggttaaggatggacctggcttctatactaccaggtgtcttgcgcccatgatgtctgaagtcatccgaatcctccaggaaggagttgacccgaagaagctggattccctgaccacaagctttggctttcctgtgggtgccgccacactggtggatgaagttggtgtggatgtagcgaaacatgtggcggaagatctgggcaaagtctttggggagcggtttggaggtggaaacccagaactgctgacacagatggtgtccaagggcttcctaggtcgtaaatctgggaagggcttttacatctatcaggagggtgtgaagaggaaggatttgaattctgacatggatagtattttagcgagtctgaagctgcctcctaagtctgaagtctcatcagacgaagacatccagttccgcctggtgacaagatttgtgaatgaggcagtcatgtgcctgcaagaggggatcttggccacacctgcagagggagacatcggagccgtctttgggcttggcttcccgccttgtctgggaggttggtctcgcaggttgggaaggaagctcactttagcctggagcccgtgttgcgtctccttcaacgaagtcctctttctctattcagggcctttccgctttgtggatctgtatggcgcccagaagatagtggaccggctcaagaaata

SEQ ID NO: 141634 - DNA, 2044 bp, Homo sapiens
  Payload ID: 7850
  Gene Symbol: HADHB
  Gene Name: hydroxyacyl-CoA dehydrogenase/3-ketoacyl-CoA thiolase /enoyl-CoA hydratase (trifunctional protein), beta subunit
  Uniprot ID: P55084
  ENST ID: ENST00000317799
  CDS Start-End: 105-1529
cctttctgggcaggacccgccccttggtcccgcagagccttggtacttggacctgaaccttgctccgagagggagtcctcgcggacgtcagccaagattccagaatgactatcttgacttacccctttaaaaatcttcccactgcatcaaaatgggccctcagattttccataagacctctgagctgttcctcccagctacgagctgccccagctgtccagaccaaaacgaagaagacgttagccaaacccaatataaggaatgttgtggtggtggatggtgttcgcactccatttttgctgtctggcacttcatataaagacctgatgccacatgatttggctagagcagcgcttacgggtttgttgcatcggaccagtgtccctaaggaagtagttgattatatcatctttggtacagttattcaggaagtgaaaacaagcaatgtggctagagaggctgcccttggagctggcttctctgacaagactcctgctcacactgtcaccatggcttgtatctctgccaaccaagccatgaccacaggtgttggcttgattgcttctggccagtgtgatgtgatcgtggcaggtggtgttgagttgatgtccgatgtccctattcgtcactcaaggaaaatgagaaaactgatgcttgatctcaataaggccaaatctatgggccagcgactgtctttaatctctaaattccgatttaatttcctagcacctgagctccctgcggtttctgagttctccaccagtgagaccatgggccactctgcagaccgactggccgctgcctttgctgtttctcggctggaacaggatgaatatgcactgcgctctcacagtctagccaagaaggcacaggatgaaggactcctttctgatgtggtacccttcaaagtaccaggaaaagatacagttaccaaagataatggcatccgtccttcctcactggagcagatggccaaactaaaacctgcattcatcaagccctacggcacagtgacagctgcaaattcttctttcttgactgatggtgcatctgcaatgttaatcatggcggaggaaaaggctctggccatgggttataagccgaaggcatatttgagggattttatgtatgtgtctcaggatccaaaagatcaactattacttggaccaacatatgctactccaaaagttctagaaaaggcaggattgaccatgaatgatattgatgcttttgaatttcatgaagctttctcgggtcagattttggcaaattttaaagccatggattctgattggtttgcagaaaactacatgggtagaaaaaccaaggttggattgcctcctttggagaagtttaataactggggtggatctctgtccctgggacacccatttggagccactggctgcaggttggtcatggctgctgccaacagattacggaaagaaggaggccagtatggcttagtggctgcgtgtgcagctggagggcagggccatgctatgatagtggaagcttatccaaaataatagatccagaagaagtgacctgaagtttctgtgcaacactcacactaggcaatgccatttcaatgcattactaaatgacatttgtagttcctagctcctcttaggaaaacagttcttgtggccttctattaaatagtttgcacttaagccttgccagtgttctgagcttttcaataatcagtttactgctctttcagggatttctaagccaccagaatctcacatgagatgtgtgggtggttgtttttggtctctgttgtcactaaagactaaatgagggtttgcagttgggaaagaggtcaactgagatttggaaatcatctttgtaatatttgcaaattatacttgttcttatctgtgtcctaaagatgtgttctctataaaatacaaaccaacgtgcctaattaattatggaaaaataattcagaatctaaacaccactgaaaacttataaaaaatgtttagatacataaatatggtggtcagcgttaataaagtggagaaatattggagaa

SEQ ID NO: 141635 - DNA, 1588 bp, Homo sapiens
  Payload ID: 7850
  Gene Symbol: HADHB
  Gene Name: hydroxyacyl-CoA dehydrogenase/3-ketoacyl-CoA thiolase /enoyl-CoA hydratase (trifunctional protein), beta subunit
  ENST ID: ENST00000405867
  CDS Start-End: 74-1129
gcagagccttggtacttggacctgaaccttgctccgagagggagtcctcgcggacgtcagccaagattccagaatgactatcttgacttacccctttaaaaatcttcccactgcatcaaaatgggccctcagattttccataagacctctgagctgttcctcccagctacgagctgccccagctgtccagaccaaaacgaagaagacgttagccaaacccaatataaggaatgttgtggtggtggatggtgttcgcactccatttttgctgtctggcacttcatataaagacctgatgccacatgatttggctagagcagcgcttacgggtttgttgcatcggaccagtgtccctaaggaagtagttgattatatcatctttggtacagttattcaggaagtgaaaacaagcaatgtggctagagaggctgcccttggagctggcttctctgacaagactcctgctcacactgtcaccatggcttgtatctctgccaaccaagccatgaccacaggaaaagatacagttaccaaagataatggcatccgtccttcctcactggagcagatggccaaactaaaacctgcattcatcaagccctacggcacagtgacagctgcaaattcttctttcttgactgatggtgcatctgcaatgttaatcatggcggaggaaaaggctctggccatgggttataagccgaaggcatatttgagggattttatgtatgtgtctcaggatccaaaagatcaactattacttggaccaacatatgctactccaaaagttctagaaaaggcaggattgaccatgaatgatattgatgcttttgaatttcatgaagctttctcgggtcagattttggcaaattttaaagccatggattctgattggtttgcagaaaactacatgggtagaaaaaccaaggttggattgcctcctttggagaagtttaataactggggtggatctctgtccctgggacacccatttggagccactggctgcaggttggtcatggctgctgccaacagattacggaaagaaggaggccagtatggcttagtggctgcgtgtgcagctggagggcagggccatgctatgatagtggaagcttatccaaaataatagatccagaagaagtgacctgaagtttctgtgcaacactcacactaggcaatgccatttcaatgcattactaaatgacatttgtagttcctagctcctcttaggaaaacagttcttgtggccttctattaaatagtttgcacttaagccttgccagtgttctgagcttttcaataatcagtttactgctctttcagggatttctaagccaccagaatctcacatgagatgtgtgggtggttgtttttggtctctgttgtcactaaagactaaatgagggtttgcagttgggaaagaggtcaactgagatttggaaatcatctttgtaatatttgcaaattatacttgttcttatctgtgtcctaaagatgtgttctctataaaatacaaaccaacgtgcctaattaattatggaaaaataattcagaatctaaacaccactgaaaacttataaaaaat

SEQ ID NO: 141636 - DNA, 696 bp, Homo sapiens
  Payload ID: 7850
  Gene Symbol: HADHB
  Gene Name: hydroxyacyl-CoA dehydrogenase/3-ketoacyl-CoA thiolase /enoyl-CoA hydratase (trifunctional protein), beta subunit
  ENST ID: ENST00000425035
  CDS Start-End: 170-696
acgtcagccaaggtgagacggcgagccctcagctctccgcccgggctttcccaaaggcgagattccacttccttccccgcaactgtcgccggtgcccccggccccctcccctccctgggaaagtgggagttgagggagcggaaggaaactcctcggacaagattccagaatgactatcttgacttacccctttaaaaatcttcccactgcatcaaaatgggccctcagattttccataagacctctgagctgttcctcccagctacgagctgccccagctgtccagaccaaaacgaagaagacgttagccaaacccaatataaggaatgttgtggtggtggatggtgttcgcactccatttttgctgtctggcacttcatataaagacctgatgccacatgatttggctagagcagcgcttacgggtttgttgcatcggaccagtgtccctaaggaagtagttgattatatcatctttggtacagttattcaggaagtgaaaacaagcaatgtggctagagaggctgcccttggagctggcttctctgacaagactcctgctcacactgtcaccatggcttgtatctctgccaaccaagccatgaccacaggtgttggcttgattgcttctggccagtgtgatgtgatcgtggcaggtggtgttgagttgatgtccgatgtccctattcgtcactc

SEQ ID NO: 141637 - DNA, 574 bp, Homo sapiens
  Payload ID: 7850
  Gene Symbol: HADHB
  Gene Name: hydroxyacyl-CoA dehydrogenase/3-ketoacyl-CoA thiolase /enoyl-CoA hydratase (trifunctional protein), beta subunit
  ENST ID: ENST00000412805
  CDS Start-End: 321-574
ctcggacaaggtcggcagtgctagctgcagttaggacagtgacttggactagcgttccagctgaagttcgggacagtagtgtcacctgcgccctaatttatcatcacaagttaacgaagtctgggggtgtgggggtgtgtgtgtgtgtgtgggtgtgtgtgggcgtgtgtgggcgtcggccttaatgtaaccctggtctgcgtagaagtgtgtgttgtttcgcctgcttcccctgtacccaggtcggcggctatagagattgtggacggcgccatgggtttgcccgatttctgctgtaaagaataagactagattccagaatgactatcttgacttacccctttaaaaatcttcccactgcatcaaaatgggccctcagattttccataagacctctgagctgttcctcccagctacgagctgccccagctgtccagaccaaaacgaagaagacgttagccaaacccaatataaggaatgttgtggtggtggatggtgttcgcactccatttttgctgtctggcacttcatataaagacctgatgccacatgatttggctagagcagcgcttac

SEQ ID NO: 141638 - DNA, 557 bp, Homo sapiens
  Payload ID: 7850
  Gene Symbol: HADHB
  Gene Name: hydroxyacyl-CoA dehydrogenase/3-ketoacyl-CoA thiolase /enoyl-CoA hydratase (trifunctional protein), beta subunit
  ENST ID: ENST00000448743
  CDS Start-End: 109-557
aaagtaacacagctagtgactagaaccacgtgccctggctaccacttccgagtgacatcagctgccgatccataagaaataccttcaaaccaatgcagggattccagaatgactatcttgacttacccctttaaaaatcttcccactgcatcaaaatgggccctcagattttccataagacctctgagctgttcctcccagctacgagctgccccagctgtccagaccaaaacgaagaagacgttagccaaacccaatataaggaatgttgtggtggtggatggtgttcgcactccatttttgctgtctggcacttcatataaagacctgatgccacatgatttggctagagcagcgcttacgggtttgttgcatcggaccagtgtccctaaggaagtagttgattatatcatctttggtacagttattcaggaagtgaaaacaagcaatgtggctagagaggctgcccttggagctggcttctctgacaagactcctgctcacactgtcaccatggcttgtatctctgccaaccaagccatgaccacaggtgttgg

SEQ ID NO: 141639 - DNA, 1870 bp, Homo sapiens
  Payload ID: 7850
  Gene Symbol: HADHB
  Gene Name: hydroxyacyl-CoA dehydrogenase/3-ketoacyl-CoA thiolase /enoyl-CoA hydratase (trifunctional protein), beta subunit
  Uniprot ID: P55084
  ENST ID: ENST00000545822
  CDS Start-End: 1-1359
atgacactggtttctggttggctcctatatggatggatcattgctgtccagaccaaaacgaagaagacgttagccaaacccaatataaggaatgttgtggtggtggatggtgttcgcactccatttttgctgtctggcacttcatataaagacctgatgccacatgatttggctagagcagcgcttacgggtttgttgcatcggaccagtgtccctaaggaagtagttgattatatcatctttggtacagttattcaggaagtgaaaacaagcaatgtggctagagaggctgcccttggagctggcttctctgacaagactcctgctcacactgtcaccatggcttgtatctctgccaaccaagccatgaccacaggtgttggcttgattgcttctggccagtgtgatgtgatcgtggcaggtggtgttgagttgatgtccgatgtccctattcgtcactcaaggaaaatgagaaaactgatgcttgatctcaataaggccaaatctatgggccagcgactgtctttaatctctaaattccgatttaatttcctagcacctgagctccctgcggtttctgagttctccaccagtgagaccatgggccactctgcagaccgactggccgctgcctttgctgtttctcggctggaacaggatgaatatgcactgcgctctcacagtctagccaagaaggcacaggatgaaggactcctttctgatgtggtacccttcaaagtaccaggaaaagatacagttaccaaagataatggcatccgtccttcctcactggagcagatggccaaactaaaacctgcattcatcaagccctacggcacagtgacagctgcaaattcttctttcttgactgatggtgcatctgcaatgttaatcatggcggaggaaaaggctctggccatgggttataagccgaaggcatatttgagggattttatgtatgtgtctcaggatccaaaagatcaactattacttggaccaacatatgctactccaaaagttctagaaaaggcaggattgaccatgaatgatattgatgcttttgaatttcatgaagctttctcgggtcagattttggcaaattttaaagccatggattctgattggtttgcagaaaactacatgggtagaaaaaccaaggttggattgcctcctttggagaagtttaataactggggtggatctctgtccctgggacacccatttggagccactggctgcaggttggtcatggctgctgccaacagattacggaaagaaggaggccagtatggcttagtggctgcgtgtgcagctggagggcagggccatgctatgatagtggaagcttatccaaaataatagatccagaagaagtgacctgaagtttctgtgcaacactcacactaggcaatgccatttcaatgcattactaaatgacatttgtagttcctagctcctcttaggaaaacagttcttgtggccttctattaaatagtttgcacttaagccttgccagtgttctgagcttttcaataatcagtttactgctctttcagggatttctaagccaccagaatctcacatgagatgtgtgggtggttgtttttggtctctgttgtcactaaagactaaatgagggtttgcagttgggaaagaggtcaactgagatttggaaatcatctttgtaatatttgcaaattatacttgttcttatctgtgtcctaaagatgtgttctctataaaatacaaaccaacgtgcctaattaattatggaaaaataattcagaatctaaacaccactgaaaacttataaaaaatgtttagatacataaatatggtggtcagcgttaataaagtggagaaatattgg

SEQ ID NO: 141640 - DNA, 2142 bp, Homo sapiens
  Payload ID: 7850
  Gene Symbol: HADHB
  Gene Name: hydroxyacyl-CoA dehydrogenase/3-ketoacyl-CoA thiolase /enoyl-CoA hydratase (trifunctional protein), beta subunit
  ENST ID: ENST00000537713
  CDS Start-End: 252-1631
tcgctcctggctaacatggccgaaaggtcgtattctccgggggaggacgggggcccggagaggagggggtggagtgcctggttttccagtcaggcggccggagggcagccctcaagaacggccctgaccgcccgcggggtgaggggccctttctgggcaggacccgccccttggtcccgcagagccttggtacttggacctgaaccttgctccgagagggagtcctcgcggacgtcagccaagattccagaatgactatcttgacttacccctttaaaaatcttcccactgcatcaaaatgggccctcagattttccataagacctctgagctgttcctcccagctacgagctgccccagctgtccagaccaaaacgaagaagacgttagccaaacccaatataaggaatgttgtggtggtggatggtgttcgcactccatttttgctgtctggcacttcgggtttgttgcatcggaccagtgtccctaaggaagtagttgattatatcatctttggtacagttattcaggaagtgaaaacaagcaatgtggctagagaggctgcccttggagctggcttctctgacaagactcctgctcacactgtcaccatggcttgtatctctgccaaccaagccatgaccacaggtgttggcttgattgcttctggccagtgtgatgtgatcgtggcaggtggtgttgagttgatgtccgatgtccctattcgtcactcaaggaaaatgagaaaactgatgcttgatctcaataaggccaaatctatgggccagcgactgtctttaatctctaaattccgatttaatttcctagcacctgagctccctgcggtttctgagttctccaccagtgagaccatgggccactctgcagaccgactggccgctgcctttgctgtttctcggctggaacaggatgaatatgcactgcgctctcacagtctagccaagaaggcacaggatgaaggactcctttctgatgtggtacccttcaaagtaccaggaaaagatacagttaccaaagataatggcatccgtccttcctcactggagcagatggccaaactaaaacctgcattcatcaagccctacggcacagtgacagctgcaaattcttctttcttgactgatggtgcatctgcaatgttaatcatggcggaggaaaaggctctggccatgggttataagccgaaggcatatttgagggattttatgtatgtgtctcaggatccaaaagatcaactattacttggaccaacatatgctactccaaaagttctagaaaaggcaggattgaccatgaatgatattgatgcttttgaatttcatgaagctttctcgggtcagattttggcaaattttaaagccatggattctgattggtttgcagaaaactacatgggtagaaaaaccaaggttggattgcctcctttggagaagtttaataactggggtggatctctgtccctgggacacccatttggagccactggctgcaggttggtcatggctgctgccaacagattacggaaagaaggaggccagtatggcttagtggctgcgtgtgcagctggagggcagggccatgctatgatagtggaagcttatccaaaataatagatccagaagaagtgacctgaagtttctgtgcaacactcacactaggcaatgccatttcaatgcattactaaatgacatttgtagttcctagctcctcttaggaaaacagttcttgtggccttctattaaatagtttgcacttaagccttgccagtgttctgagcttttcaataatcagtttactgctctttcagggatttctaagccaccagaatctcacatgagatgtgtgggtggttgtttttggtctctgttgtcactaaagactaaatgagggtttgcagttgggaaagaggtcaactgagatttggaaatcatctttgtaatatttgcaaattatacttgttcttatctgtgtcctaaagatgtgttctctataaaatacaaaccaacgtgcctaattaattatggaaaaataattcagaatctaaacaccactgaaaacttataaaaaatgtttagatacataaatatggtggtcagcgttaataaagtggagaaatattgg

SEQ ID NO: 141641 - DNA, 1257 bp, Homo sapiens
  Payload ID: 7851
  Gene Symbol: HAGH
  Gene Name: hydroxyacylglutathione hydrolase
  Uniprot ID: Q16775
  ENST ID: ENST00000397353
  CDS Start-End: 295-1077
gacgccggtgttttgcagtcctgggcagctcggcagtccagcccggcccgggtcatggtggtgggccgagggctgctcggccgccgcagcctcgccgcgctgggagccgcctgcgcccgccgaggcctcggtgcctaaggccgcgctgccgggctcgagcggaggcggcgcaggcgctgaggctggcgcggagcgggcgcggggccgcgggtgcggaaagcgctaggtccagccctgctgggagttttctgccacacagatttgcggaagaacctgaccgtggacgagggcaccatgaaggtagaggtgctgcctgccctgaccgacaactacatgtacctggtcattgatgatgagaccaaggaggctgccattgtggatccggtgcagccccagaaggtcgtggacgcggcgagaaagcacggggtgaaactgaccacagtgctcaccacccaccaccactgggaccatgctggcgggaatgagaaactggtcaagctggagtcgggactgaaggtgtacgggggtgacgaccgtatcggggccctgactcacaagatcactcacctgtccacactgcaggtggggtctctgaacgtcaagtgcctggcgaccccgtgccacacttcaggacacatttgttacttcgtgagcaagcccggaggctcggagccccctgccgtgttcacaggtgacaccttgtttgtggctggctgcgggaagttctatgaagggactgcggatgagatgtgtaaagctctgctggaggtcttgggccggctccccccggacacaagagtctactgtggccacgagtacaccatcaacaacctcaagtttgcacgccacgtggagcccggcaatgccgccatccgggagaagctggcctgggccaaggagaagtacagcatcggggagcccacagtgccatccaccctggcagaggagtttacctacaaccccttcatgagagtgagggagaagacggtgcagcagcacgcaggtgagacggacccggtgaccaccatgcgggccgtgcgcagggagaaggaccagttcaagatgccccgggactgaggccgccctgcaccttcagcggatttggggattaggctcttttaggtaactggctttcctgctggtccgtgcgggaaattcagtcttgatttaaccttaattttacagcccttggcttgtgttatcggacattctaatgcatatttataagagaagtttaacaagtatttattcccataa

SEQ ID NO: 141642 - DNA, 2984 bp, Homo sapiens
  Payload ID: 7851
  Gene Symbol: HAGH
  Gene Name: hydroxyacylglutathione hydrolase
  Uniprot ID: Q16775
  ENST ID: ENST00000397356
  CDS Start-End: 408-1334
agctgatgcctacggcatcccggagaggaccaactgcctcggaacgctgtcccccgcagcgacggcccgttccacctcgcgatctgccgggtacccgggcggcgtggcgctcggcctccagggatccactgtgcggtgccaaaaaagaggcggaggctcgcggcacagctctcccggcgcagctctcgggccgccgccgccgctcccaggcccgtctcccggcccgtggcagtcggggctcgcggacaaaacaagttgagcgcgagcgcgttgattggttggcggacggtgcgaggtggacgctgattggctgagggcagcgcgaggcgggcgctgattggctgcgacgcgccgacgccggtgttttgcagtcctgggcagctcggcagtccagcccggcccgggtcatggtggtgggccgagggctgctcggccgccgcagcctcgccgcgctgggagccgcctgcgcccgccgaggcctcggtccagccctgctgggagttttctgccacacagatttgcggaagaacctgaccgtggacgagggcaccatgaaggtagaggtgctgcctgccctgaccgacaactacatgtacctggtcattgatgatgagaccaaggaggctgccattgtggatccggtgcagccccagaaggtcgtggacgcggcgagaaagcacggggtgaaactgaccacagtgctcaccacccaccaccactgggaccatgctggcgggaatgagaaactggtcaagctggagtcgggactgaaggtgtacgggggtgacgaccgtatcggggccctgactcacaagatcactcacctgtccacactgcaggtggggtctctgaacgtcaagtgcctggcgaccccgtgccacacttcaggacacatttgttacttcgtgagcaagcccggaggctcggagccccctgccgtgttcacaggtgacaccttgtttgtggctggctgcgggaagttctatgaagggactgcggatgagatgtgtaaagctctgctggaggtcttgggccggctccccccggacacaagagtctactgtggccacgagtacaccatcaacaacctcaagtttgcacgccacgtggagcccggcaatgccgccatccgggagaagctggcctgggccaaggagaagtacagcatcggggagcccacagtgccatccaccctggcagaggagtttacctacaaccccttcatgagagtgagggagaagacggtgcagcagcacgcaggtgagacggacccggtgaccaccatgcgggccgtgcgcagggagaaggaccagttcaagatgccccgggactgaggccgccctgcaccttcagcggatttggggattaggctcttttaggtaactggctttcctgctggtccgtgcgggaaattcagtcttgatttaaccttaattttacagcccttggcttgtgttatcggacattctaatgcatatttataagagaagtttaacaagtatttattcccataacttccccttgcagactgttttcttctggcctttaggcctctgcttgtcccctcgggcctccttcctcctccgtgagccactgcagtccccccacccacgcttcaggtcaggcgtgagccggtgcctttgctgtggccttggctgggtgctgatgggactgtcaggcccactgctgcggtcggtacctttgcagcctgtgcttgtggtctgatctgctcaggcccccggcagggagaggtggccgcgtcttcttcctggaggcggccagatcgcgcgacctccaggcagtgctcctactcggcagcacccacctgcctctgcttgagaaagcacaaaccgccctctggggaagcagccagctggggagtgctctcggcctgtgaccccgggagggctgggtaggtggccacatgtcctgccccggctctgggtgtggctggtggcagagggtctatgagggaagggcaggacaaaggcaacccctaaggctaatctgaaatttagggctgggcgtggtggctaagcctgtgatcccagcactttgggaggccgaggcgggtggatcacgaggtcaggagatcgagtccatcctggctaacatggtgaaaccccgtctctactaaaaatacaaaaaattagccaggtgtggtggcagacacctgtagtcccggctactcgggaggctaaggcaggagaatggtgtgaacccaggaggcggggcttgcagtgagccgagatagcgccactgcactccagcctgggagacagagcaagactctgtctcaaaaaaaaaaaaatatgaaatttaataataatctttttaaaaagttacctgggcagggtggtgtgcagctgtagtcctagctactcaggaggctgaggcaggaggatcgcttgagcccgggagtccaaggctgcagtgagcattgcttgtgccactgcattctggcttggggaacagggagaccctgtctcaaagaaattaattaatcatgcagttgagtggtatttagtccattcacaatgctgcagccgcctctcgcgtgttctgaaacatttgacctattcactgactgactgactgctctgtcagtgagctgtgaggggaggtgactctgtgtggggcccacaccctctgccacctggtcctatagacagactcttctgagtggaggggcagagcggccctgggacctaggagcaagcctggcccgaggcttgtggattgaagaggaaggctggcactgcacttcagaccacatgcatgccctccccccggaggggtcactggtctgttcgcatactcgcagacccctctgggatgccacggaagccaggcgtgtgtgaggaggcagggcagactgcttctccggctttcttctcccactacccccgccccagcgcaaagagtttgttctattgttcagcaaatattcttaggccagaatcttaaatgtttccattctataa

SEQ ID NO: 141643 - DNA, 1276 bp, Homo sapiens
  Payload ID: 7851
  Gene Symbol: HAGH
  Gene Name: hydroxyacylglutathione hydrolase
  Uniprot ID: Q16775
  ENST ID: ENST00000455446
  CDS Start-End: 48-758
gtgttttgcagtcctgggcagctcggcagtccagcccggcccgggtcatggtggtgggccgagggctgctcggccgccgcagcctcgccgcgctgggagccgcctgcgcccgccgaggcctcggtccagccctgctgggagttttctgccacacagatttgcggaagaacctgaccgtggacgagggcaccatgaaggtagaggtgctgcctgccctgaccgacaactacatgtacctggtcattgatgatgagaccaaggaggctgccattgtggatccggtgcagccccagaaggtcgtggacgcggcgagaaagcacggggtgaaactgaccacagtgctcaccacccaccaccactgggaccatgctggcgggaatgagaaactggtcaagctggagtcgggactgaaggtgtacgggggtgacgaccgtatcggggccctgactcacaagatcactcacctgtccacactgcaggtgacaccttgtttgtggctggctgcgggaagttctatgaagggactgcggatgagatgtgtaaagctctgctggaggtcttgggccggctccccccggacacaagagtctactgtggccacgagtacaccatcaacaacctcaagtttgcacgccacgtggagcccggcaatgccgccatccgggagaagctggcctgggccaaggagaagtacagcatcggggagcccacagtgccatccaccctggcagaggagtttacctacaaccccttcatgagagtgagggagaagacggtgcagcagcacgcaggtgagacggacccggtgaccaccatgcgggccgtgcgcagggagaaggaccagttcaagatgccccgggactgaggccgccctgcaccttcagcggatttggggattaggctcttttaggtaactggctttcctgctggtccgtgcgggaaattcagtcttgatttaaccttaattttacagcccttggcttgtgttatcggacattctaatgcatatttataagagaagtttaacaagtatttattcccataacttccccttgcagactgttttcttctggcctttaggcctctgcttgtcccctcgggcctccttcctcctccgtgagccactgcagtccccccacccacgcttcaggtcaggcgtgagccggtgcctttgctgtggccttggctgggtgctgatgggactgtcaggcccactgctgcggtcggtacctttgcagcctgtgcttgtggtctgatctgctcaggcccccggcag

SEQ ID NO: 141644 - DNA, 864 bp, Homo sapiens
  Payload ID: 7851
  Gene Symbol: HAGH
  Gene Name: hydroxyacylglutathione hydrolase
  ENST ID: ENST00000564445
  CDS Start-End: 1-718
caaggaggctgccattgtggatccggtgcagccccagaaggtcgtggacgcggcgagaaagcacggggtgaaactgaccacagtgctcaccacccaccaccactgggaccatgctggcgggaatgagaaactggtcaagctggagtcgggactgaaggtgtacgggggtgacgaccgtatcggggccctgactcacaagatcactcacctgtccacactgcaggtggggtctctgaacgtcaagtgcctggcgaccccgtgccacacttcaggacacatttgttacttcgtgagcaagcccggaggctcggagccccctgccgtgttcacaggtgacaccttgtttgtggctggctgcgggaagttctatgaagggactgcggatgagatgtgtaaagctctgctggaggtcttgggccggctccccccggacacaagagtctactgtggccacgagtacaccatcaacaacctcaagtttgcacgccacgtggagcccggcaatgccgccatccgggagaagctggcctgggccaaggagaagtacagcatcggggagcccacagtgccatccaccctggcagaggagtttacctacaaccccttcatgagagtgagggagaagacggtgcagcagcacgcaggtgagacggacccggtgaccaccatgcgggccgtgcgcagggagaaggaccagttcaagatgccccgggactgaggccgccctgcaccttcagcggatttggggattaggctcttttagaaatcagccagctaactagaaaatcggcaagagaccgaaaccagcagtggctgaggccagatgaccctgtggctgtgtgctggacaagatgctcggtctcc

SEQ ID NO: 141645 - DNA, 1291 bp, Homo sapiens
  Payload ID: 7851
  Gene Symbol: HAGH
  Gene Name: hydroxyacylglutathione hydrolase
  ENST ID: ENST00000566709
  CDS Start-End: 286-1062
ctcggaacgctgtcccccgcagcgacggcccgttccacctcgcgatctgccgggtacccgggcggcgtggcgctcggcctccagggatccactgtgcggtgccaaaaaagaggcggaggctcgcggcacagctctcccggcgcagctctcgggccgccgccgccgctcccaggcccgtctcccggcccgtggcagtcggggctcgcggacaaaacaagtccagccctgctgggagttttctgccacacagatttgcggaagaacctgaccgtggacgagggcaccatgaaggtagaggtgctgcctgccctgaccgacaactacatgtacctggtcattgatgatgagaccaaggaggctgccattgtggatccggtgcagccccagaaggtcgtggacgcggcgagaaagcacggggtgaaactgaccacagtgctcaccacccaccaccactgggaccatgctggcgggaatgagaaactggtcaagctggagtcgggactgaaggtgtacgggggtgacgaccgtatcggggccctgactcacaagatcactcacctgtccacactgcaggtggggtctctgaacgtcaagtgcctggcgaccccgtgccacacttcaggacacatttgttacttcgtgagcaagcccggaggctcggagccccctgccgtgttcacaggtgacaccttgtttgtggctggctgcgggaagttctatgaagggactgcggatgagatgtgtaaagctctgctggaggtcttgggccggctccccccggacacaagagtctactgtggccacgagtacaccatcaacaacctcaagtttgcacgccacgtggagcccggcaatgccgccatccgggagaagctggcctgggccaaggagaagtacagcatcggggagcccacagtgccatccaccctggcagaggagtttacctacaaccccttcatgagagtgagtggccctggctcctccggtgggcgtggctcggcacagcctgcagcccggtgctggcctccgcagggagaagacggtgcagcagcacgcaggtgagacggacccggtgaccaccatgcgggccgtgcgcagggagaaggaccagttcaagatgccccgggactgaggccgccctgcaccttcagcggatttggggattaggctcttttaggtaactggctttcctgctggtccgtgcgggaaattcagtcttgatttaaccttaattttacagcccttggcttgtgttatcggacattctaatgcatatttataagagaagttt

SEQ ID NO: 141646 - DNA, 820 bp, Homo sapiens
  Payload ID: 7851
  Gene Symbol: HAGH
  Gene Name: hydroxyacylglutathione hydrolase
  ENST ID: ENST00000569339
  CDS Start-End: 341-820
ggccgagggctgctcggccgccgcagcctcgccgcgctgggagccgcctgcgcccgccgaggcctcggtgggtgcggcggggcggtgcgggccgggggacgcgggcctggcggggcgggcagcgggcggcgccgggccgtcgtttggcgaccgctgacgcggtgtctgttgcgcaggtgcctaaggccgcgctgccgggctcgagcggaggcggcgcaggcgctgaggctggcgcggagcgggcgcggggccgcgggtgcggaaagcgctaggtccagccctgctgggagttttctgccacacagatttgcggaagaacctgaccgtggacgagggcaccatgaaggtagaggtgctgcctgccctgaccgacaactacatgtacctggtcattgatgatgagaccaaggaggctgccattgtggatccggtgcagccccagaaggtcgtggacgcggcgagaaagcacggggtgaaactgaccacagtgctcaccacccaccaccactgggaccatgctggcgggaatgagaaactggtcaagctggagtcgggactgaaggtgtacgggggtgacgaccgtatcggggccctgactcacaagatcactcacctgtccacactgcaggtggggtctctgaacgtcaagtgcctggcgaccccgtgccacacttcaggacacatttgttacttcgtgagcaagcccggaggctcggagccccctgccgtgttcacaggtgacaccttgtttgtggctggctgcgggaagttctatgaagggactgcggatgagatgtgtaaagctctgctggaggtcttg

SEQ ID NO: 141647 - DNA, 612 bp, Homo sapiens
  Payload ID: 7851
  Gene Symbol: HAGH
  Gene Name: hydroxyacylglutathione hydrolase
  ENST ID: ENST00000566644
  CDS Start-End: 1-195
ctggcctgggccaaggagaagtacagcatcggggagcccacagtgccatccaccctggcagaggagtttacctacaaccccttcatgagagtgagggagaagacggtgcagcagcacgcaggtgagacggacccggtgaccaccatgcgggccgtgcgcagggagaaggaccagttcaagatgccccgggactgaggccgccctgcaccttcagcggatttggggattaggctcttttagacagactcttctgagtggaggggcagagcggccctgggacctaggagcaagcctggcccgaggcttgtggattgaagaggaaggctggcactgcacttcagaccacatgcatgccctccccccggaggggtcactggtctgttcgcatactcgcagacccctctgggatgccacggaagccaggcgtgtgtgaggaggcagggcagactgcttctccggctttcttctcccactacccccgccccagcgcaaagagtttgttctattgttcagcaaatattcttaggccagaatcttaaatgtttccattctataacaaacactgtgctcatttgtcaaccaataagtaattttaacagccctctttggatg

SEQ ID NO: 141648 - DNA, 1701 bp, Homo sapiens
  Payload ID: 7852
  Gene Symbol: HAGHL
  Gene Name: hydroxyacylglutathione hydrolase-like
  Uniprot ID: Q6PII5
  ENST ID: ENST00000341413
  CDS Start-End: 282-1154
ggccttgtggtctcatcgcgcgcaggatccgggccgggcgggggcgggggcggggcgcgtccgcggaggggggcggttggcggctcccgagcccagcgccgcgctcagtccggaccccgtgaccggcggccgaggccccgcctccgtcagtctgtccttcgggtcctcagcacagccgtgccgcccttcctagggtgtggagagcgggccccgccctgaaggggcaccgtgggctggggggcctgttttggagcaggcaccggtggccgagctccgtgaccatgaaggtcaaggtcatccccgtgctcgaggacaactacatgtacctggtcatcgaggagctcacgcgcgaggcggtggccgtggacgtggctgtgcccaagaggctgctggagatcgtgggccgggagggggtgtctctgaccgctgtgctgaccacccaccatcactgggaccacgcgcggggaaacccggagctggcgcggcttcgtcccgggctggcggtgctgggcgcggacgagcgcatcttctcgctgacgcgcaggctggcgcacggcgaggagctgcggttcggggccatccacgtgcgttgcctcctgacgcccggccacaccgccggccacatgagctacttcctgtgggaggacgattgcccggacccacccgccctgttctcgggcgacgcgctgtcggtggccggctgcggctcgtgcctggagggcagcgcccagcagatgtaccagagcctggccgagctgggtaccctgccccccgagacgaaggtgttctgcggccacgagcacacgcttagcaacctggagtttgcccagaaagtggagccctgcaacgaccacgtgagagccaagctgtcctgggctaaggcacggcccctttcccgccgcggcaagagggtggggggggagggaacaggcttcggggtggggggggctctcagacaaggcctaatggtgaccggggcctgtggtcactccagaagagggatgaggatgacgtgcccactgtgccgtcgactctgggcgaggagcgcctctacaaccccttcctgcgggtggcgtgagtatggctgttgtcccggggcctccaccgttacgtggacccttaggaaggcatctggggactgcgtgttgggctgagtgagcatctctggcttgggggaggctgctcattaagtgcctgcctgcccgcccacccctcggcgccatgctcccgcgtgggcagcgggccctgcgcctcactgcacccctccctgcagagaggagccggtgcgcaagttcacgggcaaggcggtccccgccgacgtcctggaggcgctatgcaaggagcgggcgcgcttcgaacaggcgggcgagccgcggcagccacaggcgcgggccctccttgcgctgcagtgggggctcctgagtgcagccccacacgactgagccacccagaccctcacagggctggggcctgcgtccctcctcgtgacctcggccagctggacccacatgagggccacctctggaaccttcttcgaggccctggccagccatctgcccagcctcggagggtgggcaacctggtgcttcccgggtggacacacaggaccactcagtggggcctgtgtgggcgccgagacctgggtgtctgggaagtggggcacacggggcctccgaactatgaataaagctttgaaaggcc

SEQ ID NO: 141649 - DNA, 1347 bp, Homo sapiens
  Payload ID: 7852
  Gene Symbol: HAGHL
  Gene Name: hydroxyacylglutathione hydrolase-like
  Uniprot ID: Q6PII5
  ENST ID: ENST00000389703
  CDS Start-End: 240-1088
gccggggctggttggggaccggccgggttccgctcctgctggagcccggtgcgtggaattccacgcgagtgccggggagttcctggggagccgggcttctcttttggcccccagcgtgttgaccgagcccgcttcgcacagcccttcctagggtgtggagagcgggccccgccctgaaggggcaccgtgggctggggggcctgttttggagcaggcaccggtggccgagctccgtgaccatgaaggtcaaggtcatccccgtgctcgaggacaactacatgtacctggtcatcgaggagctcacgcgcgaggcggtggccgtggacgtggctgtgcccaagaggctgctggagatcgtgggccgggagggggtgtctctgaccgctgtgctgaccacccaccatcactgggaccacgcgcggggaaacccggagctggcgcggcttcgtcccgggctggcggtgctgggcgcggacgagcgcatcttctcgctgacgcgcaggctggcgcacggcgaggagctgcggttcggggccatccacgtgcgttgcctcctgacgcccggccacaccgccggccacatgagctacttcctgtgggaggacgattgcccggacccacccgccctgttctcgggcgacgcgctgtcggtggccggctgcggctcgtgcctggagggcagcgcccagcagatgtaccagagcctggccgagctgggtaccctgccccccgagacgaaggtgttctgcggccacgagcacacgcttagcaacctggagtttgcccagaaagtggagccctgcaacgaccacgtgagagccaagctgtcctgggctaagaagagggatgaggatgacgtgcccactgtgccgtcgactctgggcgaggagcgcctctacaaccccttcctgcgggtggcagaggagccggtgcgcaagttcacgggcaaggcggtccccgccgacgtcctggaggcgctatgcaaggagcgggcgcgcttcgaacaggcgggcgagccgcggcagccacaggcgcgggccctccttgcgctgcagtgggggctcctgagtgcagccccacacgactgagccacccagaccctcacagggctggggcctgcgtccctcctcgtgacctcggccagctggacccacatgagggccacctctggaaccttcttcgaggccctggccagccatctgcccagcctcggagggtgggcaacctggtgcttcccgggtggacacacaggaccactcagtggggcctgtgtgggcgccgagacctgggtgtctgggaagtggggcacacggggcctccgaactatgaataaagctttgaaaggcc

SEQ ID NO: 141650 - DNA, 1820 bp, Homo sapiens
  Payload ID: 7852
  Gene Symbol: HAGHL
  Gene Name: hydroxyacylglutathione hydrolase-like
  Uniprot ID: Q6PII5
  ENST ID: ENST00000549114
  CDS Start-End: 304-912
ccgggcacgcgcaccgccggcgggccttgtggtctcatcgcgcgcaggatccgggccgggcgggggcgggggcggggcgcgtccgcggaggggggcggttggcggctcccgagcccagcgccgcgctcagtccggaccccgtgaccggcggccgaggccccgcctccgtcagtctgtccttcgggtcctcagcacagccgtgccgcccttcctagggtgtggagagcgggccccgccctgaaggggcaccgtgggctggggggcctgttttggagcaggcaccggtggccgagctccgtgaccatgaaggtcaaggtcatccccgtgctcgaggacaactacatgtacctggtcatcgaggagctcacgcgcgaggcggtggccgtggacgtggctgtgcccaagaggctgctggagatcgtgggccgggagggggtgtctctgaccgctgtgctgaccacccaccatcactgggaccacgcgcggggaaacccggagctggcgcggcttcgtcccgggctggcggtgctgggcgcggacgagcgcatcttctcgctgacgcgcaggctggcgcacggcgaggagctgcggttcggggccatccacgtgcgttgcctcctgacgcccggccacaccgccggccacatgagctacttcctgtgggaggacgattgcccggacccacccgccctgttctcgggtacccgcagcgcggagcgcgcccaccccgcctcccgccggccccgccccatctgctctgacccgccctcccccgccaggcgacgcgctgtcggtggccggctgcggctcgtgcctggagggcagcgcccagcagatgtaccagagcctggccgagctgggtaccctgccccccgagacgaaggtgttctgcggccacgagcacacgcttagcaacctggagtttgcccagaaagtggagccctgcaacgaccacgtgagagccaagctgtcctgggctaaggcacggcccctttcccgccgcggcaagagggtggggggggagggaacaggcttcggggtggggggggctctcagacaaggcctaatggtgaccggggcctgtggtcactccagaagagggatgaggatgacgtgcccactgtgccgtcgactctgggcgaggagcgcctctacaaccccttcctgcgggtggcgtgagtatggctgttgtcccggggcctccaccgttacgtggacccttaggaaggcatctggggactgcgtgttgggctgagtgagcatctctggcttgggggaggctgctcattaagtgcctgcctgcccgcccacccctcggcgccatgctcccgcgtgggcagcgggccctgcgcctcactgcacccctccctgcagagaggagccggtgcgcaagttcacgggcaaggcggtccccgccgacgtcctggaggcgctatgcaaggagcgggcgcgcttcgaacaggcgggcgagccgcggcagccacaggcgcgggccctccttgcgctgcagtgggggctcctgagtgcagccccacacgactgagccacccagaccctcacagggctggggcctgcgtccctcctcgtgacctcggccagctggacccacatgagggccacctctggaaccttcttcgaggccctggccagccatctgcccagcctcggagggtgggcaacctggtgcttcccgggtggacacacaggaccactcagtggggcctgtgtgggcgccgagacctgggtgtctgggaagtggggcacacggggcctccgaactatgaataaagctttgaaaggccgttgtcagtgttggcaga

SEQ ID NO: 141651 - DNA, 663 bp, Homo sapiens
  Payload ID: 7852
  Gene Symbol: HAGHL
  Gene Name: hydroxyacylglutathione hydrolase-like
  ENST ID: ENST00000564545
  CDS Start-End: 249-503
gggggcggagccggggctggttggggaccggccgggttccgctcctgctggagcccggtgcgtggaattccacgcgagtgccggggagttcctggggagccgggcttctcttttggcccccagcgtgttgaccgagcccgcttcgcacagcccttcctagggtgtggagagcgggccccgccctgaaggggcaccgtgggctggggggcctgttttggagcaggcaccggtggccgagctccgtgaccatgaaggtcaaggtcatccccgtgctcgaggacaactacatgtacctggtcatcgaggagctcacgcgcgaggcggtggccgtggacgtggctgtgcccaagaggggaccacgcgcggggaaacccggagctggcgcggcttcgtcccgggctggcggtgctgggcgcggacgagcgcatcttctcgctgacgcgcaggctggcgcacggcgaggagctgcggaaggtgttctgcggccacgagcacacgcttagcaacctggagtttgcccagaaagtggagccctgcaacgaccacgtgagagccaagctgtcctgggctaaggcacggcccctttcccgccgcggcaagagggtggggggggagggaacaggcttcggggtggggggggctctcagacaaggcctaatggtg

SEQ ID NO: 141652 - DNA, 740 bp, Homo sapiens
  Payload ID: 7852
  Gene Symbol: HAGHL
  Gene Name: hydroxyacylglutathione hydrolase-like
  ENST ID: ENST00000568141
  CDS Start-End: 165-740
ggagttcctggggagccgggcttctcttttggcccccagcgtgttgaccgagcccgcttcgcacagcccttcctagggtgtggagagcgggccccgccctgaaggggcaccgtgggctggggggcctgttttggagcaggcaccggtggccgagctccgtgaccatgaaggtcaaggtcatccccgtgctcgaggacaactacatgtacctggtcatcgaggagctcacgcgcgaggcggtggccgtggacgtggctgtgcccaagaggctgctggagatcgtgggccgggagggggtgtctctgaccgctgtgctgaccacccaccatcactgggaccacgcgcggggaaacccggagctggcgcggcttcgtcccgggctggcggtgctgggcgcggacgagcgcatcttctcgctgacgcgcaggctggcgcacggcgaggagctgcggttcggggccatccacgtgcgttgcctcctgacgcccggccacaccgccggccacatgagctacttcctgtgggaggacgattgcccggacccacccgccctgttctcgggtacccgcagcgcggagcgcgcccaccccgcctcccgccggccccgccccatctgctctgacccgccctcccccgccaggcgacgcgctgtcggtggccggctgcggctcgtgcctggagggcagcgcccagcagatgtaccagagcctggccgagctgggtaccctgccccccgagac

SEQ ID NO: 141653 - DNA, 493 bp, Homo sapiens
  Payload ID: 7852
  Gene Symbol: HAGHL
  Gene Name: hydroxyacylglutathione hydrolase-like
  ENST ID: ENST00000563792
  CDS Start-End: 170-493
gtttatcttggggctccctgaagttacggcacctctggcctccgccctttcgctgctgcctggcggtccctgcacgcgctgggcgcagtcaccgcccgctgggtccccgctccccggcgctccccggggctctggccggcctggggcagtgagcgcggcggatcccgatatggagggagtgggccaccgggaccgtctgtgttaccgtcactcccgtccctttcagctgctggagatcgtgggccgggagggggtgtctctgaccgctgtgctgaccacccaccatcactgggaccacgcgcggggaaacccggagctggcgcggcttcgtcccgggctggcggtgctgggcgcggacgagcgcatcttctcgctgacgcgcaggctggcgcacggcgaggagctgcggttcggggccatccacgtgcgttgcctcctgacgcccggccacaccgccggccacatgagctacttcctgtgggaggacgattgc

SEQ ID NO: 141654 - DNA, 1041 bp, Homo sapiens
  Payload ID: 7852
  Gene Symbol: HAGHL
  Gene Name: hydroxyacylglutathione hydrolase-like
  ENST ID: ENST00000561546
  CDS Start-End: 265-948
gactggggctcggactgggggcggagccggggctggttggggaccggccgggttccgctcctgctggagcccggtgcgtggaattccacgcgagtgccggggagttcctggggagccgggcttctcttttggcccccagcgtgttgaccgagcccgcttcgcacagcccttcctagggtgtggagagcgggccccgccctgaaggggcaccgtgggctggggggcctgttttggagcaggcaccggtggccgagctccgtgaccatgaaggtcaaggtcatccccgtgctcgaggacaactacatgtacctggtcatcgaggagctcacgcgcgaggcggtggccgtggacgtggctgtgcccaagaggctgctggagatcgtgggccgggagggggtgtctctgaccgctgtgctgaccacccaccatcactgggaccacgcgcggggaaacccggagctggcgcggcttcgtcccgggctggcggtgctgggcgcggacgagcgcatcttctcgctgacgcgcaggctggcgcacggcgaggagctgcggttcggggccatccacgtgcgttgcctcctgacgcccggccacaccgccggccacatgagctacttcctgtgggaggacgattgcccggacccacccgccctgttctcgggcgacgcgctgtcggtggccggctgcggctcgtgcctggagggcagcgcccagcagatgtaccagagcctggccgagctgggtaccctgccccccgagacgaaggtgttctgcggccacgagcacacgcttagcaacctggagtttgcccagaaagtggagccctgcaacgaccacgtgagagccaagctgtcctgggctaagaagagggatgaggatgacgtgcccactgtgccgtcgactctgggcgaggagcgcctctacaaccccttcctgcgggtggcgtgagtatggctgttgtcccggggcctccaccgttacgtggacccttaggaaggcatctggggactgcgtgttgggctgagtgagcatctctggctt

SEQ ID NO: 141655 - DNA, 650 bp, Homo sapiens
  Payload ID: 7852
  Gene Symbol: HAGHL
  Gene Name: hydroxyacylglutathione hydrolase-like
  ENST ID: ENST00000562141
  CDS Start-End: 51-650
ggtcctcagcacagccgtgccgcaggcaccggtggccgagctccgtgaccatgaaggtcaaggtcatccccgtgctcgaggacaactacatgtacctggtcatcgaggagctcacgcgcgaggcggtggccgtggacgtggctgtgcccaagaggctgctggagatcgtgggccgggagggggtgtctctgaccgctgtgctgaccacccaccatcactgggaccacgcgcggggaaacccggagctggcgcggcttcgtcccgggctggcggtgctgggcgcggacgagcgcatcttctcgctgacgcgcaggctggcgcacggcgaggagctgcggttcggggccatccacgtgcgttgcctcctgacgcccggccacaccgccggccacatgagctacttcctgtgggaggacgattgcccggacccacccgccctgttctcgggcgacgcgctgtcggtggccggctgcggctcgtgcctggagggcagcgcccagcagatgtaccagagcctggccgagctgggtaccctgccccccgagacgaaggtgttctgcggccacgagcacacgcttagcaacctggagtttgcccagaaagtggagccctgcaacgaccacgtgagagccaagctgtcctgggctaag

SEQ ID NO: 141656 - DNA, 1667 bp, Homo sapiens
  Payload ID: 7852
  Gene Symbol: HAGHL
  Gene Name: hydroxyacylglutathione hydrolase-like
  Uniprot ID: Q6PII5
  ENST ID: ENST00000564537
  CDS Start-End: 169-777
agtctgtccttcgggtcctcagcacagccgtgccggtgaggcgggcggcgggggaacgcggctgtcccggcccttcctagggtgtggagagcgggccccgccctgaaggggcaccgtgggctggggggcctgttttggagcaggcaccggtggccgagctccgtgaccatgaaggtcaaggtcatccccgtgctcgaggacaactacatgtacctggtcatcgaggagctcacgcgcgaggcggtggccgtggacgtggctgtgcccaagaggctgctggagatcgtgggccgggagggggtgtctctgaccgctgtgctgaccacccaccatcactgggaccacgcgcggggaaacccggagctggcgcggcttcgtcccgggctggcggtgctgggcgcggacgagcgcatcttctcgctgacgcgcaggctggcgcacggcgaggagctgcggttcggggccatccacgtgcgttgcctcctgacgcccggccacaccgccggccacatgagctacttcctgtgggaggacgattgcccggacccacccgccctgttctcgggtacccgcagcgcggagcgcgcccaccccgcctcccgccggccccgccccatctgctctgacccgccctcccccgccaggcgacgcgctgtcggtggccggctgcggctcgtgcctggagggcagcgcccagcagatgtaccagagcctggccgagctgggtaccctgccccccgagacgaaggtgttctgcggccacgagcacacgcttagcaacctggagtttgcccagaaagtggagccctgcaacgaccacgtgagagccaagctgtcctgggctaaggcacggcccctttcccgccgcggcaagagggtggggggggagggaacaggcttcggggtggggggggctctcagacaaggcctaatggtgaccggggcctgtggtcactccagaagagggatgaggatgacgtgcccactgtgccgtcgactctgggcgaggagcgcctctacaaccccttcctgcgggtggcgtgagtatggctgttgtcccggggcctccaccgttacgtggacccttaggaaggcatctggggactgcgtgttgggctgagtgagcatctctggcttgggggaggctgctcattaagtgcctgcctgcccgcccacccctcggcgccatgctcccgcgtgggcagcgggccctgcgcctcactgcacccctccctgcagagaggagccggtgcgcaagttcacgggcaaggcggtccccgccgacgtcctggaggcgctatgcaaggagcgggcgcgcttcgaacaggcgggcgagccgcggcagccacaggcgcgggccctccttgcgctgcagtgggggctcctgagtgcagccccacacgactgagccacccagaccctcacagggctggggcctgcgtccctcctcgtgacctcggccagctggacccacatgagggccacctctggaaccttcttcgaggccctggccagccatctgcccagcctcggagggtgggcaacctggtgcttcccgggtggacacacaggaccactcagtggggcctgtgtgggcgccgagacctgggtgtctgggaagtggggcacacggggcctccgaactatgaataaagctttgaaaggcc

SEQ ID NO: 141657 - DNA, 434 bp, Homo sapiens
  Payload ID: 7852
  Gene Symbol: HAGHL
  Gene Name: hydroxyacylglutathione hydrolase-like
  ENST ID: ENST00000561561
  CDS Start-End: 1-285
ggccacaccgccggccacatgagctacttcctgtgggaggacgattgcccggacccacccgccctgttctcgggtacccgcagcgcggagcgcgcccaccccgcctcccgccggccccgccccatctgctctgacccgccctcccccgccaggcgacgcgctgtcggtggccggctgcggctcgtgcctggagggcagcgcccagcagatgtaccagagcctggccgagctgggtaccctgccccccgagacgaaggtgttctgcggccacgagcacacgcttagcaacctggagtttgcccagaaagtggagccctgcaacgaccacgtgagagccaagctgtcctgggctaagaagagggatgaggatgacgtgcccactgtgccgtcgactctgggcgaggagcgcctctacaaccccttcctgcgggtgg

SEQ ID NO: 141658 - DNA, 440 bp, Homo sapiens
  Payload ID: 7852
  Gene Symbol: HAGHL
  Gene Name: hydroxyacylglutathione hydrolase-like
  ENST ID: ENST00000569385
  CDS Start-End: 1-65
ctggccgagctgggtaccctgccccccgagacgaaggtgttctgcggccacgagcacacgcttagcaacctggagtttgcccagaaagtggagccctgcaacgaccacgtgagagccaagctgtcctgggctaagaagagggatgaggatgacgtgcccactgtgccgtcgactctgggcgaggagcgcctctacaaccccttcctgcgggtggcgtgagtatggctgttgtcccggggcctccaccgttacgtggacccttaggaaggcatctggggactgcgtgttgggctgagtgagcatctctggcttgggggaggctgctcattaagtgcctgcctgcccgcccacccctcggcgccatgctcccgcgtgggcagcgggccctgcgcctcactgcacccctccctgcagagaggagccggtgcgcaagttcacgg

SEQ ID NO: 141659 - DNA, 100 bp, Homo sapiens
  Payload ID: 7852
  Gene Symbol: HAGHL
  Gene Name: hydroxyacylglutathione hydrolase-like
  ENST ID: ENST00000562187
  CDS Start-End: 61-100
agtctgtccttcgggtcctcagcacagccgtgccggcaccggtggccgagctccgtgaccatgaaggtcaaggtcatccccgtgctcgaggacaactaca

SEQ ID NO: 141660 - DNA, 735 bp, Homo sapiens
  Payload ID: 7852
  Gene Symbol: HAGHL
  Gene Name: hydroxyacylglutathione hydrolase-like
  ENST ID: ENST00000567414
  CDS Start-End: 218-735
ccgggttccgctcctgctggagcccggtgcgtggaattccacgcgagtgccggggagttcctggggagccgggcttctcttttggcccccagcgtgttgaccgagcccgcttcgcacagcccttcctagggtgtggagagcgggccccgccctgaaggggcaccgtgggctggggggcctgttttggagcaggcaccggtggccgagctccgtgaccatgaaggtcaaggtcatccccgtgctcgaggacaactacatgtacctggtcatcgaggagctcacgcgcgaggcggtggccgtggacgtggctgtgcccaagaggctgctggagatcgtgggccgggagggggtgtctctgaccgctgtgctgaccacccaccatcactgggaccacgcgcggggaaacccggagctggcgcggcttcgtcccgggctggcggtgctgggcgcggacgagcgcatcttctcgctgacgcgcaggctggcgcacggcgaggagctgcggttcggggccatccacgtgcgttgcctcctgacgcccggccacaccgccggccacatgagctacttcctgtgggaggacgattgcccggacccacccgccctgttctcgggcgacgcgctgtcggtggccggctgcggctcgtgcctggagggcagcgcccagcagatgtaccagagcctggccgagctgggtaccctgccccccgagacggtgagcgggcctgggccctc

SEQ ID NO: 141661 - DNA, 888 bp, Homo sapiens
  Payload ID: 7853
  Gene Symbol:
  Gene Name: Hydroxyacyl-thioester dehydratase type 2, mitochondrial  [Source:UniProtKB/Swiss-Prot
  Acc:P86397]
  ENST ID: ENST00000474660
  CDS Start-End: 660-888
gggcgggacgaggagaagccaaacgtaaagacaccaggagtttctcgggcccagctgtggctgctgccggggagccccaagccttggcgggtccttgcggcgaataggagtctggtcaggcgtcaggctagtccgacgaagagtggagaatttcaagattgtggagttggactgaatgctgcacagttcaaacagctgcttatttcggctgtgaaggacctgtttggggaggctggagtgcaatggcacgatcttggctcaccgcaccctccgcctcccaggttcaagcgattctcctgcctcagcctcgcaagtagctgggattacaggttgatgccgccttacctttggacatcctaacctatgaagagaagaccttgtcagccatcttgagaatatgtagcagtggtcttgtcaaattgtggagctctttgaccctgttaggatcctataaaggcaaaaaatgtgctttccgggtgattcaggtttctccatttcttcttgcattatctggtaatagtagggaactagtattggattgaatgaatagtcttccattttggaaacgttcatccactctcatatttattttttggtgcctgcatgtttgaagactgaagcaggctaaaagctcttgatgaaatttgagggtgctgaagatgttcccactaatttccagccatcacctttggtggggtgggcttcggaggacagtctgtctgaacctgccagtgctgaccctgcagcactttcagcatatgcacatcaaagttggagaccgcgctgaacttaggagggccttcacacagactgatgtggctaccttctcagaattaacaggggatgtcaatcctttgcatttgaatgaagactttgcaaaacacacca

SEQ ID NO: 141662 - DNA, 847 bp, Homo sapiens
  Payload ID: 7853
  Gene Symbol:
  Gene Name: Hydroxyacyl-thioester dehydratase type 2, mitochondrial  [Source:UniProtKB/Swiss-Prot
  Acc:P86397]
  ENST ID: ENST00000476007
  CDS Start-End: 633-847
tggtgaatatatttaataccagtctgtacaaaataatttcccaggtatcctctcctttaatgtcagaacagcctgcagagggcagtgctgtcatttgtaagtctttttttttttttttaattgcaaaaaatacgtgacataaaatttatcgtaagtagcattgagtacattcacaacgctgtgcagccatcaccactgtccatctcgtgaatgttgtagaatttcaagattgtggagttggactgaatgctgcacagttcaaacagctgcttatttcggctgtgaaggacctgtttggggaggttgatgccgccttacctttggacatcctaacctatgaagagaagaccttgtcagccatcttgagaatatgtagcagtggtcttgtcaaattgtggagctctttgaccctgttaggatcctataaaggcaaaaaatgtgctttccgggtgattcaggtttctccatttcttcttgcattatctggtaatagtagggaactagtattggattgaatgaatagtcttccattttggaaacgttcatccactctcatatttattttttggtgcctgcatgtttgaagactgaagcaggctaaaagctcttgatgaaatttgagggtgctgaagatgttcccactaatttccagccatcacctttggtggggtgggcttcggaggacagtctgtctgaacctgccagtgctgaccctgcagcactttcagcatatgcacatcaaagttggagaccgcgctgaacttaggagggccttcacacagactgatgtggctaccttctcagaattaacaggggatgtcaatcctttgcatttgaatgaagactt

SEQ ID NO: 141663 - DNA, 1531 bp, Homo sapiens
  Payload ID: 7853
  Gene Symbol:
  Gene Name: Hydroxyacyl-thioester dehydratase type 2, mitochondrial  [Source:UniProtKB/Swiss-Prot
  Acc:P86397]
  Uniprot ID: P86397
  ENST ID: ENST00000477305
  CDS Start-End: 661-1167
gggcgggacgaggagaagccaaacgtaaagacaccaggagtttctcgggcccagctgtggctgctgccggggagccccaagccttggcgggtccttgcggcgaataggagtctggtcaggcgtcaggctagtccgacgaagagtggagaatttcaagattgtggagttggactgaatgctgcacagttcaaacagctgcttatttcggctgtgaaggacctgtttggggaggctggagtgcaatggcacgatcttggctcaccgcaccctccgcctcccaggttcaagcgattctcctgcctcagcctcgcaacattattccatatgcaggttgatgccgccttacctttggacatcctaacctatgaagagaagaccttgtcagccatcttgagaatatgtagcagtggtcttgtcaaattgtggagctctttgaccctgttaggatcctataaaggcaaaaaatgtgctttccgggtgattcaggtttctccatttcttcttgcattatctggtaatagtagggaactagtattggattgaatgaatagtcttccattttggaaacgttcatccactctcatatttattttttggtgcctgcatgtttgaagactgaagcaggctaaaagctcttgatgaaatttgagggtgctgaagatgttcccactaatttccagccatcacctttggtggggtgggcttcggaggacagtctgtctgaacctgccagtgctgaccctgcagcactttcagcatatgcacatcaaagttggagaccgcgctgaacttaggagggccttcacacagactgatgtggctaccttctcagaattaacaggggatgtcaatcctttgcatttgaatgaagactttgcaaaacacaccaagtttggaaatacaattgtacatggagttttgatcaacggacttatctcagctctcctaggaactaaaatgccagggccaggctgtgtatttctttcccaggaaattagctttccagcccctttatatattggagaagttgttttagcttctgcagaagtgaaaaagctgaagcggttcattgctattattgcagtgtcatgttctgtaatagaaagtaaaaagactgttatggaaggctgggttaaagttatggttccagaagcttccaaatcctgaaatagatgttttaaagatgcaacctcaaacaccaatgctgttgttaaagagcctatggggaattgctgctctttaccaaagaatggttgataggcccagaagcccatcttagttaggggaagggagcaggaagagggttgttcaaatgcccactttccagtttggccttatgcttcatgcagacttgagtgtatgcaggatttcattatctgcctgggttttttgtttgttttttgttttttaattcaagaagtaggctgggcccggtggctcatgcctgtaatcctggcactttgggaggctgcggcaggcggatcacttgaggtcaggagtccaagaccagcctggccaacatggtgaaacc

SEQ ID NO: 141664 - DNA, 648 bp, Homo sapiens
  Payload ID: 7853
  Gene Symbol:
  Gene Name: Hydroxyacyl-thioester dehydratase type 2, mitochondrial  [Source:UniProtKB/Swiss-Prot
  Acc:P86397]
  ENST ID: ENST00000475412
  CDS Start-End: 487-648
acgcttcgtggggcgggacgaggagaagccaaacgtaaagacaccaggagtttctcgggcccagctgtggctgctgccggggagccccaagccttggcgggtccttgcggcgaataggagtctggtcaggcgtcaggctagtccgacgaagagtgggttgatgccgccttacctttggacatcctaacctatgaagagaagaccttgtcagccatcttgagaatatgtagcagtggtcttgtcaaattgtggagctctttgaccctgttaggatcctataaaggcaaaaaatgtgctttccgggtgattcaggtttctccatttcttcttgcattatctggtaatagtagggaactagtattggattgaatgaatagtcttccattttggaaacgttcatccactctcatatttattttttggtgcctgcatgtttgaagactgaagcaggctaaaagctcttgatgaaatttgagggtgctgaagatgttcccactaatttccagccatcacctttggtggggtgggcttcggaggacagtctgtctgaacctgccagtgctgaccctgcagcactttcagcatatgcacatcaaagttggagaccgcgctgaacttaggagggccttcacacagactgatgtggct

SEQ ID NO: 141665 - DNA, 1378 bp, Homo sapiens
  Payload ID: 7853
  Gene Symbol:
  Gene Name: Hydroxyacyl-thioester dehydratase type 2, mitochondrial  [Source:UniProtKB/Swiss-Prot
  Acc:P86397]
  Uniprot ID: P86397
  ENST ID: ENST00000481972
  CDS Start-End: 520-1026
tctcgggcccagctgtggctgctgccggggagccccaagccttggcgggtccttgcggcgaataggagtctggtcaggcgtcaggctagtccgacgaagagtggagaatttcaagattgtggagttggactgaatgctgcacagttcaaacagctgcttatttcggctgtgaaggacctgtttggggaggttgatgccgccttacctttggacatcctaacctatgaagagaagaccttgtcagccatcttgagaatatgtagcagtggtcttgtcaaattgtggagctctttgaccctgttaggatcctataaaggcaaaaaatgtgctttccgggtgattcaggtttctccatttcttcttgcattatctggtaatagtagggaactagtattggattgaatgaatagtcttccattttggaaacgttcatccactctcatatttattttttggtgcctgcatgtttgaagactgaagcaggctaaaagctcttgatgaaatttgagggtgctgaagatgttcccactaatttccagccatcacctttggtggggtgggcttcggaggacagtctgtctgaacctgccagtgctgaccctgcagcactttcagcatatgcacatcaaagttggagaccgcgctgaacttaggagggccttcacacagactgatgtggctaccttctcagaattaacaggggatgtcaatcctttgcatttgaatgaagactttgcaaaacacaccaagtttggaaatacaattgtacatggagttttgatcaacggacttatctcagctctcctaggaactaaaatgccagggccaggctgtgtatttctttcccaggaaattagctttccagcccctttatatattggagaagttgttttagcttctgcagaagtgaaaaagctgaagcggttcattgctattattgcagtgtcatgttctgtaatagaaagtaaaaagactgttatggaaggctgggttaaagttatggttccagaagcttccaaatcctgaaatagatgttttaaagatgcaacctcaaacaccaatgctgttgttaaagagcctatggggaattgctgctctttaccaaagaatggttgataggcccagaagcccatcttagttaggggaagggagcaggaagagggttgttcaaatgcccactttccagtttggccttatgcttcatgcagacttgagtgtatgcaggatttcattatctgcctgggttttttgtttgttttttgttttttaattcaagaagtaggctgggcccggtggctcatgcctgtaatcctggcactttgggaggctgcggcaggcggatcacttgaggtcaggagtccaagaccagcctggccaa

SEQ ID NO: 141666 - DNA, 1508 bp, Homo sapiens
  Payload ID: 7853
  Gene Symbol:
  Gene Name: Hydroxyacyl-thioester dehydratase type 2, mitochondrial  [Source:UniProtKB/Swiss-Prot
  Acc:P86397]
  Uniprot ID: P86397
  ENST ID: ENST00000461393
  CDS Start-End: 548-1054
gtcctctccgaccccgggcgctgagggcctctgtacggcgccgcgtagggtctcggccgcagaacgtggccgagaggcccgggcgagacttcgggaccgtgtcctgagcgctctccatgcgcccggcgcgagagaatttcaagattgtggagttggactgaatgctgcacagttcaaacagctgcttatttcggctgtgaaggacctgtttggggaggttgatgccgccttacctttggacatcctaacctatgaagagaagaccttgtcagccatcttgagaatatgtagcagtggtcttgtcaaattgtggagctctttgaccctgttaggatcctataaaggcaaaaaatgtgctttccgggtgattcaggtttctccatttcttcttgcattatctggtaatagtagggaactagtattggattgaatgaatagtcttccattttggaaacgttcatccactctcatatttattttttggtgcctgcatgtttgaagactgaagcaggctaaaagctcttgatgaaatttgagggtgctgaagatgttcccactaatttccagccatcacctttggtggggtgggcttcggaggacagtctgtctgaacctgccagtgctgaccctgcagcactttcagcatatgcacatcaaagttggagaccgcgctgaacttaggagggccttcacacagactgatgtggctaccttctcagaattaacaggggatgtcaatcctttgcatttgaatgaagactttgcaaaacacaccaagtttggaaatacaattgtacatggagttttgatcaacggacttatctcagctctcctaggaactaaaatgccagggccaggctgtgtatttctttcccaggaaattagctttccagcccctttatatattggagaagttgttttagcttctgcagaagtgaaaaagctgaagcggttcattgctattattgcagtgtcatgttctgtaatagaaagtaaaaagactgttatggaaggctgggttaaagttatggttccagaagcttccaaatcctgaaatagatgttttaaagatgcaacctcaaacaccaatgctgttgttaaagagcctatggggaattgctgctctttaccaaagaatggttgataggcccagaagcccatcttagttaggggaagggagcaggaagagggttgttcaaatgcccactttccagtttggccttatgcttcatgcagacttgagtgtatgcaggatttcattatctgcctgggttttttgtttgttttttgttttttaattcaagaagtaggctgggcccggtggctcatgcctgtaatcctggcactttgggaggctgcggcaggcggatcacttgaggtcaggagtccaagaccagcctggccaacatggtgaaaccccatctctaccaaaaaaaaaaaaaaaaaaaaagtgcaactagctgtgcttggtgacttggccctgtagtcccagttgcttgggaggctga

SEQ ID NO: 141667 - DNA, 4768 bp, Homo sapiens
  Payload ID: 7854
  Gene Symbol: HCAR1
  Gene Name: hydroxycarboxylic acid receptor 1
  Uniprot ID: Q9BXC0
  ENST ID: ENST00000432564
  CDS Start-End: 505-1545
aatgtttggatttctccaccaggagggaggacaaacaagctttcttcttgccttctgggcagctttgtgtgctctccagcacggagtccgaggaggaacagcgaagctgaaaatgaaaattactctggcgctggacccaatcgctcctctacggcatcaatctcatcggacccccccaccctaccgcctctcagaaatgaccacttttgcaaaattgcatgcatttccaagcttcatccggctccaggcttggcctctcccagaggcaggcggcttgtgagacgggctccagagaaaggacctccctgggtctctcatttcctggctgaagtttctcttctcgctgctgtggcagcatccaacccacacacacaggacccgcatcctgggtgatgaagtcagacacgcagcagctgggtgagtgctaacgctcagataagcatctgtgccattgtggggactccctgggctgctctgcacccggacacttgctctgtccccgccatgtacaacgggtcgtgctgccgcatcgagggggacaccatctcccaggtgatgccgccgctgctcattgtggcctttgtgctgggcgcactaggcaatggggtcgccctgtgtggtttctgcttccacatgaagacctggaagcccagcactgtttaccttttcaatttggccgtggctgatttcctccttatgatctgcctgccttttcggacagactattacctcagacgtagacactgggcttttggggacattccctgccgagtggggctcttcacgttggccatgaacagggccgggagcatcgtgttccttacggtggtggctgcggacaggtatttcaaagtggtccacccccaccacgcggtgaacactatctccacccgggtggcggctggcatcgtctgcaccctgtgggccctggtcatcctgggaacagtgtatcttttgctggagaaccatctctgcgtgcaagagacggccgtctcctgtgagagcttcatcatggagtcggccaatggctggcatgacatcatgttccagctggagttctttatgcccctcggcatcatcttattttgctccttcaagattgtttggagcctgaggcggaggcagcagctggccagacaggctcggatgaagaaggcgacccggttcatcatggtggtggcaattgtgttcatcacatgctacctgcccagcgtgtctgctagactctatttcctctggacggtgccctcgagtgcctgcgatccctctgtccatggggccctgcacataaccctcagcttcacctacatgaacagcatgctggatcccctggtgtattatttttcaagcccctcctttcccaaattctacaacaagctcaaaatctgcagtctgaaacccaagcagccaggacactcaaaaacacaaaggccggaagagatgccaatttcgaacctcggtcgcaggagttgcatcagtgtggcaaatagtttccaaagccagtctgatgggcaatgggatccccacattgttgagtggcactgaacaagcagaccaacaacactgaggaagatagagtggtgacttagaattaactcgtgctaaggggtcgggggctttgaaaatgccacccccctttcttattgcaagacggcttctcgcacatgaactgcatccttctcattctgtcggaaatgaaattcacacaactataccttttggggaggttccagttgattgaagtgagttggctgcattttcttatctgatcacaatggcaggggacagaatgtgcatggagtggagcatgtgtgtgttgggaggggggctaggaactgcacagcccttgtgtaattttcgttgtttgtttttgttttgagacagagtctcactctgtgtcccaggctggagtgcagtggcacagtctcggctcactgcaacctctgcctcccgggttcaagcaattctcctgcctcagcctcccgagtagctgggattagaggcgccagccaacacacccggctaatttttgtatttttagtagagacagggttttgccatgttggccaggctggtctcgagctcctgacctcaggtgatccgcctgccttggcctcccaaagtggtgggatcacaggcgtgagccaccgtgcctggcctcccctgtgtcattttaaatggctaagtaaatgggtatatgtgtttgaatggggcatgttcactctcttaggggctatggggcagttagcagcatttcctatcctctgaccttaaatcattccttatctcagaaaacagaaaccgggctcagtcaatcaatgctttatttcaggccgaatgaggctctttagattgggatctattgatctatcaattttcatctttacatttctttgtacatctgtacattttgtccaaatgtacatctgtacgtctgtcatcattgtgacttcctggtagcccaagaagaacaacaacaaaacaatctgctctgaccttcttcaaatctttgtatttcaaagaaggtgctgagggatctgtttccttgccctggcttctccagtgggatgtgctgagtccaatacaattgcttttataattgcttttgacaacttgtcatgtgactgtgaattgaaattattcacttattttccaagtatttactgaattcgtatttggtggcaggcagtatactgtgtaatttttagtggagggtcattagtcaactcttatgtgacagtaaagttttttgggggggtggggacagagaagttaagagctttcatcctttcacggaatacagtttctagaccgattctgtgtgaacatcagttttgtcctcttattgcaagactccctcatacacatgagtttcccaaatgtgtacctggacccctcgaaacagaggactctacgaaatgacaagctgcccctgccctgaattagggggaaacattccaggccaactctagctcctttctcaagctacaaagtggtgaacatggttctcaactccttaatttatactctctcaaatgcccaggatactctacccacttaagaaccttgccaacttctgggggttgggcatggtggctcacgcttgtgatcccagcactttgggagactgaggcggatcacctgaggtcaggagttctagaccagcctgaccaacatggagaaacctcgtctctactaaaaattcaaaattagcctggtgtggtggcgcatgcctataatcccagctattcgggaggctgaggcaggagaatcacttgaaccgaggaggtggaggttgcggtgaggtgacatcgtgccattgcactccagactgggccacaggagtgaaacgccgtctcaaaaaaaaaaaagaactttgccaacttctagttctttggcctcaaaacacccctctaggctgtccctattattccttttttcagaggcactgtgcagcctagtgatgaaaagtacgagctatagagcattagaagcatcgaagtttgaatctcagctcaagcatttactaggcctgtgatcttagggcagcttgtgtttttagacactgaatcttgctctgttgcccaggctggagtgcagtgagtggcatgatcatagctcactgcagcctcaaactcctgggctcaagtgttcctcccacctcagcctcctgaatagctgggagtacaggcataagccaccacactcagctaatttttaaattttttttatagagacgaggtctcactcactgtgttgcccaagctggtctcaaactcctggcctccagcaatcctcccaccttggcctcccaaagtattgcgattgccagcatgagccactgctcccagcctggcatatatatagatatatatagagatatatagatatctatctatctatatatatatatatttttttttttttttttgagacagagtcttgctctatcacccaggctggagtacagtggcccaatctcagctcactgcaagctctgcctcctgggtccacgccattctcctgcctcagcctccagagtagctgggactacgggcgccccaccaccacgcccggctaattttttgtatttttagtacagacggggtttcattgtgttagccgggatggtcttgatctcctgacttgtgatccgcctgcctcggcctcccaaagtgcttggattacaggtgtaagccaccgcaccccgcccagcctggcagattttatttaatcatttgtagcttcattttcctcgtctgtcaaacagggatactgtaatacaacctcagtgtgtcattgggcagtttaaatgaatgtacattcctgaggcatcagaactttgttcactgttatatacccaatgcctagaagaggacctgcacatagcaggtgctcagtaaatgtttgttgaatgaatgattaagtgcatgtaaagcattaagcatagcgcctggcagtaagtgctcaatattatgacttcttatattaacacgttttacatataaagaaatggaggcaagaaagcatttcctttggggtttagagcgcttaagttgttcctctgttatcatgcctgaattcccccgcccctcagttacctggggaagagtaaaggcaagaattcttaccagcattagtcatacatcctcctgataggaatctgcgaaaacacacacttctgcttttagttctattcttagaattctctcctgggctgttgctcctttgttccttcattgtaataaaaatggattctgaaagcaaa

SEQ ID NO: 141668 - DNA, 2051 bp, Homo sapiens
  Payload ID: 7855
  Gene Symbol: HCAR2
  Gene Name: hydroxycarboxylic acid receptor 2
  Uniprot ID: Q8TDS4
  ENST ID: ENST00000328880
  CDS Start-End: 61-1152
cacctccttgctggagcattcactaggcgaggcgctccatcggactcactagccgcactcatgaatcggcaccatctgcaggatcactttctggaaatagacaagaagaactgctgtgtgttccgagatgacttcattgtcaaggtgttgccgccggtgttggggctggagtttatcttcgggcttctgggcaatggccttgccctgtggattttctgtttccacctcaagtcctggaaatccagccggattttcctgttcaacctggcagtggctgactttctactgatcatctgcctgcccttcctgatggacaactatgtgaggcgttgggactggaagtttggggacatcccttgccggctgatgctcttcatgttggctatgaaccgccagggcagcatcatcttcctcacggtggtggcggtagacaggtatttccgggtggtccatccccaccacgccctgaacaagatctccaatcggacagcagccatcatctcttgccttctgtggggcatcactattggcctgacagtccacctcctgaagaagaagatgccgatccagaatggcggtgcaaatttgtgcagcagcttcagcatctgccataccttccagtggcacgaagccatgttcctcctggagttcttcctgcccctgggcatcatcctgttctgctcagccagaattatctggagcctgcggcagagacaaatggaccggcatgccaagatcaagagagccatcaccttcatcatggtggtggccatcgtctttgtcatctgcttccttcccagcgtggttgtgcggatccgcatcttctggctcctgcacacttcgggcacgcagaattgtgaagtgtaccgctcggtggacctggcgttctttatcactctcagcttcacctacatgaacagcatgctggaccccgtggtgtactacttctccagcccatcctttcccaacttcttctccactttgatcaaccgctgcctccagaggaagatgacaggtgagccagataataaccgcagcacgagcgtcgagctcacaggggaccccaacaaaaccagaggcgctccagaggcgttaatggccaactccggtgagccatggagcccctcttatctgggcccaacctctccttaaataaccatgccaagaagggacattgtcaccaagaaccaggatctctggagaaacagttgggctgttgcatcgagtaatgtcactggactcggcctaaggtttcctggaacttccagattcagagaatgcgatttagggaaacggtggcagatgagtgggagactggttgcaaggtgtgaccgcaggaatcctggaggaatagagagtaaagcttctaggcatctgaaacttttgcttcatctctgacgctcgcaggactgaagatgggcaaattgtaggcatttctgctgagcagagttggagccagagatctacttgtgacttgttggccttcttcccacatctgcctcagactggagggggctcagctcctggggtgatatctagcctgcttgtgagctctagcagggataaggagagctgagattggagggaattgtgttgctcctggagggagcccaggcatcattaaacaagccagtaggtcacctggcttccgtggaccaattcatctttcagacaagctttagcagaaatggactcagggaagagactcacacgctttggttaatatctgtgtttccggtgggtgtaataggggattagccccagaagggactgagctaaacagtgttattatgggaaaggaaatggcattgctgctttcaaccagcgactaatgcaatccattcctctcttgtttatagtaatctaagggttgggcagttaaaacggcttcaggatagaaagctgtttcccacctctgtttgcttttaacattaaaagggaaatgtgcctctgccccacagttagaggggtgcacgttcctcctggttccttcgcttgtgtttctgtacttaccaaaaatctaccatttcaataaattttgataggagaca

SEQ ID NO: 141669 - DNA, 2137 bp, Homo sapiens
  Payload ID: 7856
  Gene Symbol: HCAR3
  Gene Name: hydroxycarboxylic acid receptor 3
  Uniprot ID: P49019
  ENST ID: ENST00000528880
  CDS Start-End: 156-1319
ttcgtagtttcctgataaccattcagtcatctatttcaacaccctgacatgacataaaggcaggcacggaaccacacgttcaccatacagacacacgccactttgctggagcattcactaggcgaggcgctccatcggactcactagctgcactcatgaatcggcaccatctgcaggatcactttctggaaatagacaagaagaactgctgtgtgttccgagatgacttcattgccaaggtgttgccgccggtgttggggctggagtttatctttgggcttctgggcaatggccttgccctgtggattttctgtttccacctcaagtcctggaaatccagccggattttcctgttcaacctggcagtagctgactttctactgatcatctgcctgccgttcgtgatggactactatgtgcggcgttcagactggaagtttggggacatcccttgccggctggtgctcttcatgtttgccatgaaccgccagggcagcatcatattcctcacggtggtggcggtagacaggtatttccgggtggtccatccccaccacgccctgaacaagatctccaattggacagcagccatcatctcttgccttctgtggggcatcactgttggcctaacagtccacctcctgaagaagaagttgctgatccagaatggcactgcaaatgtgtgcatcagcttcagcatctgccataccttccggtggcacgaagctatgttcctcctggagttcttcctgcccctgggcatcatcctgttctgctcagccagaattatctggagcctgcggcagagacaaatggaccggcatgccaagatcaagagagccatcaccttcatcatggtggtggccatcgtctttgtcatctgcttccttcccagcgtggttgtgcggatccacatcttctggctcctgcacacttcgggcacgcagaattgtgaagtgtaccgctcggtggacctggcgttctttatcactctcagcttcacctacatgaacagcatgctggaccccgtggtgtactacttctccagcccatcctttcccaacttcttctccactttgatcaaccgctgcctccagaggaagataacaggtgagccagataataaccgcagcacgagcgtcgagctcacaggggaccccaacaaaaccagaggcgctccagaggcgttaatcgccaactccggtgagccatggagcccctcttatctgggcccaacctcaaataaccattccaagaagggacattgtcaccaagaaccagcatctctggagaaacagttgggctgttgcatcgagtaatgtcactggactcggcctaagatttcctggaacttccagattcagagaatctgatttagggaaactgtggcagatgagtgggagactggttgcaaggtgtgaccgcaggaatcctggaggaacagagagtaaagcttctaggcatctgaaacttgcttcatctctgacgctcgcaggactgaagatgggcaaattgtaggcgtttctgctgagcagagttggagccagagatctacttgtgacttgttggccttcttcccacatctgcctcagactggagggggctcagctcctggggtgatatctagcctgcttgtgagctctagcagggataaggagagctgagattggagggaattgtgttgttcctggaggaagcccaggcatcattaaacaagccagtaggtcacctggcttccgtggaccaattcatctttcagacaatctttagcagaaatggactcagggaagagactcacatgctttggttagtatctgtgtttccggtgggtgtaataggggattagccccagaagggactgagctaaacagtgttattatgggaaaggaaatggcattgctgctttcaaccagcgactaatgcaatccattcctctcttgtttatagtaatctaagggttgaacagttaaaacggcttcaggatagaaagctgtttcccacctgtttgcttttaccattaaaagggaaacgtgcctctgccccacgggtagaggggtgcacgttcctcctggttccttcgcttgtgtttctgtacttaccaaaaatctaccatttcaataaattttgataggagaca

SEQ ID NO: 141670 - DNA, 1676 bp, Homo sapiens
  Payload ID: 7857
  Gene Symbol: HSD3B1
  Gene Name: hydroxy-delta-5-steroid dehydrogenase, 3 beta- and steroid delta-isomerase 1
  Uniprot ID: P14060
  ENST ID: ENST00000369413
  CDS Start-End: 146-1267
aggaaatgaggtgagaagtacgtccactcttctgtccagcttttaacaatctaactaatgccctctccagggtcaccctagaatcagatctgctccccagcatcttctgtttcctggtgagtgattcctgctactttggatggccatgacgggctggagctgccttgtgacaggagcaggagggtttctgggacagaggatcatccgcctcttggtgaaggagaaggagctgaaggagatcagggtcttggacaaggccttcggaccagaattgagagaggaattttctaaactccagaacaagaccaagctgacagtgctggaaggagacattctggatgagccattcctgaagagagcctgccaggacgtctcggtcatcatccacaccgcctgtatcattgatgtcttcggtgtcactcacagagagtctatcatgaatgtcaatgtgaaaggtacccagctcctgttagaggcctgtgtccaagctagtgtgccagtcttcatctacaccagtagcatagaggtagccgggcccaactcctacaaggaaatcatccagaatggccatgaagaagagcctctggaaaacacatggcccgctccatacccacacagcaaaaagcttgctgagaaggctgtactggcggctaacgggtggaatctgaaaaacggcggcaccctgtacacttgtgccttacgacccatgtatatctatggggaaggaagccgattcctttctgctagtataaacgaggccctgaacaacaatgggatcctgtcaagtgttggaaagttctccactgttaacccagtctatgttggcaatgtggcctgggcccacattctggccttgagggccctgcaggaccccaagaaggccccaagcatccgaggacagttctactatatctcagatgacacgcctcaccaaagctatgataaccttaattacaccctgagcaaagagttcggcctccgccttgattccagatggagctttcctttatccctgatgtattggattggcttcctgctggaaatagtgagcttcctactcaggccaatttacacctatcgaccgcccttcaaccgccacatagtcacattgtcaaatagcgtattcaccttctcttataagaaggctcagcgagatctggcgtataagccactctacagctgggaggaagccaagcagaaaacggtggagtgggttggttcccttgtggaccggcacaaggagaccctgaagtccaagactcagtgatttaaggatgacagagatgtgcatgtgggtattgttaggagatgtcatcaagctccaccctcctggcctcatacagaaagtgacaagggcacaagctcaggtcctgctgcctccctttcatacaatggccaacttattgtattcctcatgtcatcaaaacctgcgcagtcattggcccaacaagaaggtttctgtcctaatcatataccagaggaaagaccatgtggtttgctgttaccaaatctcagtagctgattctgaacaatttagggactcttttaacttgagggtcgttttgactactagagctccatttctactcttaaatgagaaaggatttcctttctttttaatcttccattccttcacatagtttgataaaaagatcaataaatgtttgaatgtttaa

SEQ ID NO: 141671 - DNA, 1436 bp, Homo sapiens
  Payload ID: 7857
  Gene Symbol: HSD3B1
  Gene Name: hydroxy-delta-5-steroid dehydrogenase, 3 beta- and steroid delta-isomerase 1
  Uniprot ID: P14060
  ENST ID: ENST00000528909
  CDS Start-End: 160-1281
gtttgcaaaaaaaatggggtggaggaaaatgaggcatctgtgtgagtatataaccatttgacatctctttttagccctctccagggtcaccctagaatcagatctgctccccagcatcttctgtttcctggtgagtgattcctgctactttggatggccatgacgggctggagctgccttgtgacaggagcaggagggtttctgggacagaggatcatccgcctcttggtgaaggagaaggagctgaaggagatcagggtcttggacaaggccttcggaccagaattgagagaggaattttctaaactccagaacaagaccaagctgacagtgctggaaggagacattctggatgagccattcctgaagagagcctgccaggacgtctcggtcatcatccacaccgcctgtatcattgatgtcttcggtgtcactcacagagagtctatcatgaatgtcaatgtgaaaggtacccagctcctgttagaggcctgtgtccaagctagtgtgccagtcttcatctacaccagtagcatagaggtagccgggcccaactcctacaaggaaatcatccagaatggccatgaagaagagcctctggaaaacacatggcccgctccatacccacacagcaaaaagcttgctgagaaggctgtactggcggctaacgggtggaatctgaaaaacggcggcaccctgtacacttgtgccttacgacccatgtatatctatggggaaggaagccgattcctttctgctagtataaacgaggccctgaacaacaatgggatcctgtcaagtgttggaaagttctccactgttaacccagtctatgttggcaatgtggcctgggcccacattctggccttgagggccctgcaggaccccaagaaggccccaagcatccgaggacagttctactatatctcagatgacacgcctcaccaaagctatgataaccttaattacaccctgagcaaagagttcggcctccgccttgattccagatggagctttcctttatccctgatgtattggattggcttcctgctggaaatagtgagcttcctactcaggccaatttacacctatcgaccgcccttcaaccgccacatagtcacattgtcaaatagcgtattcaccttctcttataagaaggctcagcgagatctggcgtataagccactctacagctgggaggaagccaagcagaaaacggtggagtgggttggttcccttgtggaccggcacaaggagaccctgaagtccaagactcagtgatttaaggatgacagagatgtgcatgtgggtattgttaggagatgtcatcaagctccaccctcctggcctcatacagaaagtgacaagggcacaagctcaggtcctgctgcctccctttcatacaatggccaacttattgtattcctcatgtcatc

SEQ ID NO: 141672 - DNA, 352 bp, Homo sapiens
  Payload ID: 7857
  Gene Symbol: HSD3B1
  Gene Name: hydroxy-delta-5-steroid dehydrogenase, 3 beta- and steroid delta-isomerase 1
  ENST ID: ENST00000531340
  CDS Start-End: 108-352
gccacaggaaatgaggtgagaaccctctccagggtcaccctagaatcagatctgctccccagcatcttctgtttcctggtgagtgattcctgctactttggatggccatgacgggctggagctgccttgtgacaggagcaggagggtttctgggacagaggatcatccgcctcttggtgaaggagaaggagctgaaggagatcagggtcttggacaaggccttcggaccagaattgagagaggaattttctaaactccagaacaagaccaagctgacagtgctggaaggagacattctggatgagccattcctgaagagagcctgccaggacgtctcggtcatcatccacac

SEQ ID NO: 141673 - DNA, 1741 bp, Homo sapiens
  Payload ID: 7858
  Gene Symbol: HSD3B2
  Gene Name: hydroxy-delta-5-steroid dehydrogenase, 3 beta- and steroid delta-isomerase 2
  Uniprot ID: P26439
  ENST ID: ENST00000369416
  CDS Start-End: 209-1327
gttcaaggtaataagggctgagacacaagccacagagcataaagctccagtccttcctccagggatgaggcagtaaggacttggactcctctgtccagcttttaacaatctaagttacgccctcttctgggtcacgctagaatcagatctgctctccagcatcttctgtttcctggcaagtgtttcctgctactttggattggccacgatgggctggagctgccttgtgacaggagcaggagggcttctgggtcagaggatcgtccgcctgttggtggaagagaaggaactgaaggagatcagggccttggacaaggccttcagaccagaattgagagaggaattttctaagctccagaacaggaccaagctgactgtacttgaaggagacattctggatgagccattcctgaaaagagcctgccaggacgtctcggtcgtcatccacaccgcctgtatcattgatgtctttggtgtcactcacagagagtccatcatgaatgtcaatgtgaaaggtacccagctactgttggaggcctgtgtccaagccagtgtgccagtcttcatctacaccagtagcatagaggtagccgggcccaactcctacaaggaaatcatccagaacggccacgaagaagagcctctggaaaacacatggcccactccatacccgtacagcaaaaagcttgctgagaaggctgtgctggcggctaatgggtggaatctaaaaaatggtgataccttgtacacttgtgcgttaagacccacatatatctatggggaaggaggcccattcctttctgccagtataaatgaggccctgaacaacaatgggatcctgtcaagtgttggaaagttctctacagtcaacccagtctatgttggcaacgtggcctgggcccacattctggccttgagggctctgcgggaccccaagaaggccccaagtgtccgaggtcaattctattacatctcagatgacacgcctcaccaaagctatgataaccttaattacatcctgagcaaagagtttggcctccgccttgattccagatggagccttcctttaaccctgatgtactggattggcttcctgctggaagtagtgagcttcctactcagcccaatttactcctatcaaccccccttcaaccgccacacagtcacattatcaaatagtgtgttcaccttctcttacaagaaggctcagcgagatctggcgtataagccactctacagctgggaggaagccaagcagaaaaccgtggagtgggttggttcccttgtggaccggcacaaggagaccctgaagtccaagactcagtgatttaaggatgacagagatgtgcatgtgggtattgttaggaaatgtcatcaaactccacccacctggcttcatacagaaggcaacaggggcacaagcccaggtcctgctgcctctctttcacacaatgcccaacttactgtcttcttcatgtcatcaaaatctgcacagtcactggcccaaccagaactttctgtcctaatcatacaccagaagacaaacaatatgatttgctgttaccaaatctcagtggctgattctgaacaattgtggtctctcttaacttgaggttctcttttgactaatagagctccatttcccctcttaaatgagaaagcatttcttttctctttaatctcctattccttcacacagttcaacataaagagcaataaatgttttaatgcttaacatgga

SEQ ID NO: 141674 - DNA, 717 bp, Homo sapiens
  Payload ID: 7858
  Gene Symbol: HSD3B2
  Gene Name: hydroxy-delta-5-steroid dehydrogenase, 3 beta- and steroid delta-isomerase 2
  ENST ID: ENST00000433745
  CDS Start-End: 131-717
tggaggaggagggagcaatgagtatgtggcaggagttcaagccctcttctgggtcacgctagaatcagatctgctctccagcatcttctgtttcctggcaagtgtttcctgctactttggattggccacgatgggctggagctgccttgtgacaggagcaggagggcttctgggtcagaggatcgtccgcctgttggtggaagagaaggaactgaaggagatcagggccttggacaaggccttcagaccagaattgagagaggaattttctaagctccagaacaggaccaagctgactgtacttgaaggagacattctggatgagccattcctgaaaagagcctgccaggacgtctcggtcgtcatccacaccgcctgtatcattgatgtctttggtgtcactcacagagagtccatcatgaatgtcaatgtgaaaggtacccagctactgttggaggcctgtgtccaagccagtgtgccagtcttcatctacaccagtagcatagaggtagccgggcccaactcctacaaggaaatcatccagaacggccacgaagaagagcctctggaaaacacatggcccactccatacccgtacagcaaaaagcttgctgagaaggctgtgctggcggctaatgggtggaatctaaaaaatggtgataccttgtacacttgtgcgttaagacccacatatatctatggggaaggaggcccatt

SEQ ID NO: 141675 - DNA, 1783 bp, Homo sapiens
  Payload ID: 7858
  Gene Symbol: HSD3B2
  Gene Name: hydroxy-delta-5-steroid dehydrogenase, 3 beta- and steroid delta-isomerase 2
  Uniprot ID: P26439
  ENST ID: ENST00000543831
  CDS Start-End: 250-1368
aaggctaaagccaagactctttatcacactgtggccttaagattggatttctcttcctgttcctgggaagaattagagatataacctaaaggtcactattattctgagaaaagggattctggaggaggagggagcaatgagtatgtggcaggagttcaagccctcttctgggtcacgctagaatcagatctgctctccagcatcttctgtttcctggcaagtgtttcctgctactttggattggccacgatgggctggagctgccttgtgacaggagcaggagggcttctgggtcagaggatcgtccgcctgttggtggaagagaaggaactgaaggagatcagggccttggacaaggccttcagaccagaattgagagaggaattttctaagctccagaacaggaccaagctgactgtacttgaaggagacattctggatgagccattcctgaaaagagcctgccaggacgtctcggtcgtcatccacaccgcctgtatcattgatgtctttggtgtcactcacagagagtccatcatgaatgtcaatgtgaaaggtacccagctactgttggaggcctgtgtccaagccagtgtgccagtcttcatctacaccagtagcatagaggtagccgggcccaactcctacaaggaaatcatccagaacggccacgaagaagagcctctggaaaacacatggcccactccatacccgtacagcaaaaagcttgctgagaaggctgtgctggcggctaatgggtggaatctaaaaaatggtgataccttgtacacttgtgcgttaagacccacatatatctatggggaaggaggcccattcctttctgccagtataaatgaggccctgaacaacaatgggatcctgtcaagtgttggaaagttctctacagtcaacccagtctatgttggcaacgtggcctgggcccacattctggccttgagggctctgcgggaccccaagaaggccccaagtgtccgaggtcaattctattacatctcagatgacacgcctcaccaaagctatgataaccttaattacatcctgagcaaagagtttggcctccgccttgattccagatggagccttcctttaaccctgatgtactggattggcttcctgctggaagtagtgagcttcctactcagcccaatttactcctatcaaccccccttcaaccgccacacagtcacattatcaaatagtgtgttcaccttctcttacaagaaggctcagcgagatctggcgtataagccactctacagctgggaggaagccaagcagaaaaccgtggagtgggttggttcccttgtggaccggcacaaggagaccctgaagtccaagactcagtgatttaaggatgacagagatgtgcatgtgggtattgttaggaaatgtcatcaaactccacccacctggcttcatacagaaggcaacaggggcacaagcccaggtcctgctgcctctctttcacacaatgcccaacttactgtcttcttcatgtcatcaaaatctgcacagtcactggcccaaccagaactttctgtcctaatcatacaccagaagacaaacaatatgatttgctgttaccaaatctcagtggctgattctgaacaattgtggtctctcttaacttgaggttctcttttgactaatagagctccatttcccctcttaaatgagaaagcatttcttttctctttaatctcctattccttcacacagttcaacataaagagcaataaatgttttaatgcttaacatggag

SEQ ID NO: 141676 - DNA, 2200 bp, Homo sapiens
  Payload ID: 7859
  Gene Symbol: HSD3B7
  Gene Name: hydroxy-delta-5-steroid dehydrogenase, 3 beta- and steroid delta-isomerase 7
  Uniprot ID: Q9H2F3
  ENST ID: ENST00000262520
  CDS Start-End: 291-881
agcggaaggacggtgtgcgggccggccagccctggacgaaagaagagggcccctccaggccagtctgggcaccctgggatagcggctgcagcccgcccctctctccgtaactcagccatcagcaggggcagacggcaggtggcctggttgctgcagctcccaggatcagctctgccctccccgcaaacgccagcctcgtcaccgctccagggcacctccagcagtaacaggtggttgcagcaggtggcagccagcccctggatgagccaaggtctcttccccagccaggcatggccgactctgcacaggcccagaagctggtgtacctggtcacagggggctgtggcttcctgggagagcacgtggtgcgaatgctgctgcagcgggagccccggctcggggagctgcgggtctttgaccaacacctgggtccctggctggaggagctgaagacagggcctgtgagggtgactgccatccagggggacgtgacccaggcccatgaggtggcagcagctgtggccggagcccatgtggtcatccacacggctgggctggtagacgtgtttggcagggccagtcccaagaccatccatgaggtcaacgtgcagggtacccggaacgtgatcgaggcttgtgtgcagaccggaacacggttcctggtctacaccagcagcatggaagttgtggggcctaacaccaaaggtcaccccttctacaggggcaacgaagacaccccatacgaagcagtgcacaggcacccctatccttgcagcaaggccctggccgagtggctggtcctggaggccaacgggaggaaggcaatgttgcctggatgcacgtgctggcagcccgggagctggagcagcgggcaaccctgatgggcggccaggtatacttctgctacgatggatcaccctacaggagctacgaggatttcaacatggagttcctgggcccctgcggactgcggctggtgggcgcccgcccattgctgccctactggctgctggtgttcctggctgccctcaatgccctgctgcagtggctgctgcggccactggtgctctacgcacccctgctgaacccctacacgctggccgtggccaacaccaccttcaccgtcagcaccgacaaggctcagcgccatttcggctatgagcccctgttctcgtgggaggatagccggacccgtaccattctctgggtacaggccgctacgggttcagcccagtgacggtggggctggggcctggaggcccagatacagcacatccacccaggtcccgagccctcacaccctggacgggaagggacagctgcattccagagcaggaggcagggctctggggccagaatggctgtccttgtcgtagagccctccacattttctttttcttttttgagacagggtcttgctctgtcacccagactggagtgcagtggtgtgatcatagctcactgcaccctcaacctcctgggttcaagcaatcctcctgcctcagcctcctgaacagctgggaccacaggtgcacgccaccacacctggcttttttttgttgtttttagagacagggtctcactatattgctcaggctggtcttgaactcctgggctcaagtgatcttcccacgtgggcctcccaaaacgctggaactacaagtgtgagccaccgcgcctggcccaagccctccacattttcaatccaggagccttgagtctgtgttgtgtcctgacacctccaagttctagggccgtcaggacacgggagggtttggggacagagtgtccttcctctgtcctctcatcccagtcctgatggccgcttggtgagtgtctggtgccctggtggcctgccccagctctcttctggctttctgagcaggaagcgagcagaggctccacaggcttacgctgctctcctgacagccacacgcgaccctcggtgcagagtgcagaggcggctctggttcctccagccacctcagtccctctttgggaggtgatgttcccattgtttttcaaaggcctcaccttcaactgtctgtcttagaattcccctctggagggctatggcctccctatgctttcacttcccacctctctacctaagttccttcccagcacatcgccagccctgggcctggggatgtccccaatgctgtacctggctgaccccggattaaaagcctcatccacg

SEQ ID NO: 141677 - DNA, 2172 bp, Homo sapiens
  Payload ID: 7859
  Gene Symbol: HSD3B7
  Gene Name: hydroxy-delta-5-steroid dehydrogenase, 3 beta- and steroid delta-isomerase 7
  Uniprot ID: Q9H2F3
  ENST ID: ENST00000297679
  CDS Start-End: 94-1203
gaaggacggtgtgcgggccggccagccctggacgaaagaagagggcccctccaggccagtctgggcaccctgggatagcggctgcagccaggcatggccgactctgcacaggcccagaagctggtgtacctggtcacagggggctgtggcttcctgggagagcacgtggtgcgaatgctgctgcagcgggagccccggctcggggagctgcgggtctttgaccaacacctgggtccctggctggaggagctgaagacagggcctgtgagggtgactgccatccagggggacgtgacccaggcccatgaggtggcagcagctgtggccggagcccatgtggtcatccacacggctgggctggtagacgtgtttggcagggccagtcccaagaccatccatgaggtcaacgtgcagggtacccggaacgtgatcgaggcttgtgtgcagaccggaacacggttcctggtctacaccagcagcatggaagttgtggggcctaacaccaaaggtcaccccttctacaggggcaacgaagacaccccatacgaagcagtgcacaggcacccctatccttgcagcaaggccctggccgagtggctggtcctggaggccaacgggaggaaggtccgtggggggctgcccctggtgacgtgtgcccttcgtcccacgggcatctacggtgaaggccaccagatcatgagggacttctaccgccagggcctgcgcctgggaggttggctcttccgggccatcccggcctctgtggagcatggccgggtctatgtgggcaatgttgcctggatgcacgtgctggcagcccgggagctggagcagcgggcaaccctgatgggcggccaggtatacttctgctacgatggatcaccctacaggagctacgaggatttcaacatggagttcctgggcccctgcggactgcggctggtgggcgcccgcccattgctgccctactggctgctggtgttcctggctgccctcaatgccctgctgcagtggctgctgcggccactggtgctctacgcacccctgctgaacccctacacgctggccgtggccaacaccaccttcaccgtcagcaccgacaaggctcagcgccatttcggctatgagcccctgttctcgtgggaggatagccggacccgtaccattctctgggtacaggccgctacgggttcagcccagtgacggtggggctggggcctggaggcccagatacagcacatccacccaggtcccgagccctcacaccctggacgggaagggacagctgcattccagagcaggaggcagggctctggggccagaatggctgtccttgtcgtagagccctccacattttctttttcttttttgagacagggtcttgctctgtcacccagactggagtgcagtggtgtgatcatagctcactgcaccctcaacctcctgggttcaagcaatcctcctgcctcagcctcctgaacagctgggaccacaggtgcacgccaccacacctggcttttttttgttgtttttagagacagggtctcactatattgctcaggctggtcttgaactcctgggctcaagtgatcttcccacgtgggcctcccaaaacgctggaactacaagtgtgagccaccgcgcctggcccaagccctccacattttcaatccaggagccttgagtctgtgttgtgtcctgacacctccaagttctagggccgtcaggacacgggagggtttggggacagagtgtccttcctctgtcctctcatcccagtcctgatggccgcttggtgagtgtctggtgccctggtggcctgccccagctctcttctggctttctgagcaggaagcgagcagaggctccacaggcttacgctgctctcctgacagccacacgcgaccctcggtgcagagtgcagaggcggctctggttcctccagccacctcagtccctctttgggaggtgatgttcccattgtttttcaaaggcctcaccttcaactgtctgtcttagaattcccctctggagggctatggcctccctatgctttcacttcccacctctctacctaagttccttcccagcacatcgccagccctgggcctggggatgtccccaatgctgtacctggctgaccccggattaaaagcctcatccacgaccgtg

SEQ ID NO: 141678 - DNA, 746 bp, Homo sapiens
  Payload ID: 7859
  Gene Symbol: HSD3B7
  Gene Name: hydroxy-delta-5-steroid dehydrogenase, 3 beta- and steroid delta-isomerase 7
  ENST ID: ENST00000574447
  CDS Start-End: 217-746
acggtgtgcgggccggccagccctggacgaaagaagagggcccctccaggccagtctgggcaccctgggatagcggctgcagctcccaggatcagctctgccctccccgcaaacgccagcctcgtcaccgctccagggcacctccagcagtaacaggtggttgcagcaggtggcagccagcccctggatgagccaaggtctcttccccagccaggcatggccgactctgcacaggcccagaagctggtgtacctggtcacagggggctgtggcttcctgggagagcacgtggtgcgaatgctgctgcagcgggagccccggctcggggagctgcgggtctttgaccaacacctgggtccctggctggaggagctgaagacagggcctgtgagggtgactgccatccagggggacgtgacccaggcccatgaggtggcagcagctgtggccggagcccatgtggtcatccacacggctgggctggtagacgtgtttggcagggccagtcccaagaccatccatgaggtcaacgtgcagggtacccggaacgtgatcgaggcttgtgtgcagaccggaacacggttcctggtctacaccagcagcatggaagttgtggggcctaacaccaaaggtcaccccttctacaggggcaacgaagacaccccatacgaagcagtgcacaggcacccctatccttgcagcaaggccctggccgagtggctggtcctggaggccaacgggaggaa

SEQ ID NO: 141679 - DNA, 746 bp, Homo sapiens
  Payload ID: 7859
  Gene Symbol: HSD3B7
  Gene Name: hydroxy-delta-5-steroid dehydrogenase, 3 beta- and steroid delta-isomerase 7
  ENST ID: ENST00000562932
  CDS Start-End: 90-746
gacggtgtgcgggccggccagccctggacgaaagaagagggcccctccaggccagtctgggcaccctgggatagcggctgcagccaggcatggccgactctgcacaggcccagaagctggtgtacctggtcacagggggctgtggcttcctgggagagcacgtggtgcgaatgctgctgcagcgggagccccggctcggggagctgcgggtctttgaccaacacctgggtccctggctggaggagctgaagacaggttcttgttgggggagcttgtggtggagagggtgtggacgcttccccaacccttcccaagctgggatccccacccctgcagtggaacagatgatgctggtttctgtccacatggatgggtcgaggcctgtgagggtgactgccatccagggggacgtgacccaggcccatgaggtggcagcagctgtggccggagcccatgtggtcatccacacggctgggctggtagacgtgtttggcagggccagtcccaagaccatccatgaggtcaacgtgcagggtacccggaacgtgatcgaggcttgtgtgcagaccggaacacggttcctggtctacaccagcagcatggaagttgtggggcctaacaccaaaggtcaccccttctacaggggcaacgaagacaccccatacgaagcagtgcacaggcacccctatccttgcagcaaggccctggccgagtggctggtcctggaggccaacgggaggaaggtg

SEQ ID NO: 141680 - DNA, 1235 bp, Homo sapiens
  Payload ID: 7860
  Gene Symbol: HYKK
  Gene Name: hydroxylysine kinase
  Uniprot ID: A2RU49
  ENST ID: ENST00000388988
  CDS Start-End: 114-1235
gcgggcgctgcggcccctgctctacctcctagcgccggtgcgcggccgaggccgcactacctgtctgcgggaaagcgggatccaccccaggacgtcgggtcgctgccgacataatgtcaagtggaaactatcagcagtcagaggctcttagcaaacccactttcagtgaggaacaagcctctgcgttagtggagtcagtgtttgggttgaaagtttccaaggtccggccacttcctagctatgatgaccaaaactttcatgtctacgtttcaaaaaccaaagatggcccaactgaatatgtcctcaaaataagcaacaccaaggctagcaaaaatccagacctgattgaagtgcagaatcacatcatcatgtttctgaaagccgctggatttccaacagcctctgtgtgtcacactaaaggagacaacacagcttctctcgtgtctgtagatagtggctctgaaatcaaaagctacttggtgaggctgctgacttacctcccaggaagacccatcgctgagcttcccgtcagcccccagctattgtatgaaattggaaaactagctgccaaattggataagacactgcagagattccatcacccaaagttaagtagtcttcatcgggagaacttcatctggaatctgaaaaatgttcctcttctggagaaatacctgtatgccctgggccagaatcgaaaccgagagattgttgagcatgtcattcatctgttcaaggaggaagtaatgaccaaattaagtcattttcgagaatgtatcaatcacggagatcttaatgaccataatattttaatagagtccagcaagtcagcctctggaaatgctgaatatcaagtgtctgggattttagactttggtgacatgagctatggctactatgtgtttgaagtggcaattaccatcatgtacatgatgattgagagcaagagtcctatacaagtaggaggccatgtccttgcagggtttgaaagcatcaccccactgacagctgtagagaagggtgctttgtttttacttgtatgcagtcgtttttgtcagtcacttgtcatggctgcatactcttgccagctatacccagagaacaaagactatctcatggttactgcaaaaaccgggtggaaacacttacagcaaatgtttgacatgggtcagaaagctgtagaagaaatctggtttgaaactgccaaatcctatgaatctgggatctccatgtga

SEQ ID NO: 141681 - DNA, 847 bp, Homo sapiens
  Payload ID: 7860
  Gene Symbol: HYKK
  Gene Name: hydroxylysine kinase
  Uniprot ID: A2RU49
  ENST ID: ENST00000408962
  CDS Start-End: 114-776
gcgggcgctgcggcccctgctctacctcctagcgccggtgcgcggccgaggccgcactacctgtctgcgggaaagcgggatccaccccaggacgtcgggtcgctgccgacataatgtcaagtggaaactatcagcagtcagaggctcttagcaaacccactttcagtgaggaacaagcctctgcgttagtggagtcagtgtttgggttgaaagtttccaaggtccggccacttcctagctatgatgaccaaaactttcatgtctacgtttcaaaaaccaaagatggcccaactgaatatgtcctcaaaataagcaacaccaaggctagcaaaaatccagacctgattgaagtgcagaatcacatcatcatgtttctgaaagccgctggatttccaacagcctctgtgtgtcacactaaaggagacaacacagcttctctcgtgtctgtagatagtggctctgaaatcaaaagctacttggtgaggctgctgacttacctcccaggaagacccatcgctgagcttcccgtcagcccccagctattgtatgaaattggaaaactagctgccaaattggataagacactgcagagattccatcacccaaagttaagtagtcttcatcgggagaacttcatctggaatctgaaaaatgttcctcttctggagaaatacctgtatgccctgggccagaatcgaaaccgagagattgttgagcatgtcattcatctgttcaaggaggaagtaatgaccaaattaagtcattttcgagaatgacctagcaccgtgccaggcccctagaagacccagtaaagatctgttgaataaactgtaagaatgaacacacc

SEQ ID NO: 141682 - DNA, 734 bp, Homo sapiens
  Payload ID: 7860
  Gene Symbol: HYKK
  Gene Name: hydroxylysine kinase
  Uniprot ID: A2RU49
  ENST ID: ENST00000563233
  CDS Start-End: 1-663
atgtcaagtggaaactatcagcagtcagaggctcttagcaaacccactttcagtgaggaacaagcctctgcgttagtggagtcagtgtttgggttgaaagtttccaaggtccggccacttcctagctatgatgaccaaaactttcatgtctacgtttcaaaaaccaaagatggcccaactgaatatgtcctcaaaataagcaacaccaaggctagcaaaaatccagacctgattgaagtgcagaatcacatcatcatgtttctgaaagccgctggatttccaacagcctctgtgtgtcacactaaaggagacaacacagcttctctcgtgtctgtagatagtggctctgaaatcaaaagctacttggtgaggctgctgacttacctcccaggaagacccatcgctgagcttcccgtcagcccccagctattgtatgaaattggaaaactagctgccaaattggataagacactgcagagattccatcacccaaagttaagtagtcttcatcgggagaacttcatctggaatctgaaaaatgttcctcttctggagaaatacctgtatgccctgggccagaatcgaaaccgagagattgttgagcatgtcattcatctgttcaaggaggaagtaatgaccaaattaagtcattttcgagaatgacctagcaccgtgccaggcccctagaagacccagtaaagatctgttgaataaactgtaagaatgaacacacc

SEQ ID NO: 141683 - DNA, 4097 bp, Homo sapiens
  Payload ID: 7860
  Gene Symbol: HYKK
  Gene Name: hydroxylysine kinase
  Uniprot ID: A2RU49
  ENST ID: ENST00000569878
  CDS Start-End: 1-1122
atgtcaagtggaaactatcagcagtcagaggctcttagcaaacccactttcagtgaggaacaagcctctgcgttagtggagtcagtgtttgggttgaaagtttccaaggtccggccacttcctagctatgatgaccaaaactttcatgtctacgtttcaaaaaccaaagatggcccaactgaatatgtcctcaaaataagcaacaccaaggctagcaaaaatccagacctgattgaagtgcagaatcacatcatcatgtttctgaaagccgctggatttccaacagcctctgtgtgtcacactaaaggagacaacacagcttctctcgtgtctgtagatagtggctctgaaatcaaaagctacttggtgaggctgctgacttacctcccaggaagacccatcgctgagcttcccgtcagcccccagctattgtatgaaattggaaaactagctgccaaattggataagacactgcagagattccatcacccaaagttaagtagtcttcatcgggagaacttcatctggaatctgaaaaatgttcctcttctggagaaatacctgtatgccctgggccagaatcgaaaccgagagattgttgagcatgtcattcatctgttcaaggaggaagtaatgaccaaattaagtcattttcgagaatgtatcaatcacggagatcttaatgaccataatattttaatagagtccagcaagtcagcctctggaaatgctgaatatcaagtgtctgggattttagactttggtgacatgagctatggctactatgtgtttgaagtggcaattaccatcatgtacatgatgattgagagcaagagtcctatacaagtaggaggccatgtccttgcagggtttgaaagcatcaccccactgacagctgtagagaagggtgctttgtttttacttgtatgcagtcgtttttgtcagtcacttgtcatggctgcatactcttgccagctatacccagagaacaaagactatctcatggttactgcaaaaaccgggtggaaacacttacagcaaatgtttgacatgggtcagaaagctgtagaagaaatctggtttgaaactgccaaatcctatgaatctgggatctccatgtgactgagatctccatgtgactcaaagttcactttaacttgggtaattaaaataggacccagtcaaattttaggaaggattttcctgcatagttaaaaatcaactgatggaatggatcaattctgaatatgacagagcacatgaaatccctaaggtcttcaagcaatctcgtgacaattttttaaaattcacaaaagtaccacaagcaagcatatttttctgtgagtcttacttgccatatctataaaacacatataatgataccattttgaagcagataatctcacaagatctattcctgccctgagattaatgactattttaattttaaaaataatatatacatatagatatattgacatattttaaatatctggacataacatactgacctagataacatactaccagttctatgaaacctcctctgatctctcctttctctagaatcccagtgcattgtgtctttttcatggcccatcactttgtataatggatcgtggttgtgcagtcatcttgcctgagagctactgagggcggagaccatgtaaaacttatttttgtctcctcagcccttcttttttttttttttttttttttgagacggagtctcgctctgtcgcccaggctggagtgcagtggcacgatctcggctcattgcaagctccgcttctcgagttcacgccattctcctgcctcagcctcctgagtagctgggactacaggcgcccaccaccacgcccggctaattttttttgtatttttagtagagacagggtttcaccgtgttagccagaatggtctcgatctcctgaccttgtgatccacccgcctcgatctcccaaagtgctgggattacaggcatgagtcaccgtgcccggcctcctcatcccttcttatcacacctgctattatagtgcctttcctacagagaggtctttaaaaatatttgaaaataaatgcgtgctagaagaagggatggagaaggcacacactaagatgctttaggagaaagcattgacagcattcttggagaaaaaattttaacttgtctgagagggtggttgaaactggaactccagagatagatgctggaagaccctgggaactgcaaggaagcaaataatgacatccaggcaaggccactaacccctgagctacttaaatataatggttcctttcagactgataccaggaacctccttaagcatataagcatatattttttaattctctataatctgtttctttttggatgactatgaagtagattgggtagactgaagctcactgtattcttggctgacggtatcccactgtgtttccttcactggtttctcgtcatgtctcctttagtatgatttagtaaatggctgtttactattcttatgatttcaactattcattgtctacagatgactcaagtctagaaccctggccattcaaatactcaatagttatctttctatatatatgaacaggcattgatcctatctccatctttctgtctacctacctagtcttcccaaactagatatttctctaaattgtcttatatggttcatttttcacttctttgtccctcaatttcatttcatttctttttcttttcttttcttttctttttttttttttttggtggtggggcggcagggacagggtttcactgcagcctcaacctcctaggctcaggtgatcctcccacctcagcctccctagtagctgggacttcaggcatgtgccaccatgtctggctaattctttaattttttgtagagattggggtaatacctatctcatagaattaatagagttcattgtgaagatttcataagagaacagtgccaagtgcttaacacagtgtgtggcacatagttaggactcagtaactatttactcaataaatgaaccatattccaggttacccaaactcaaaatattggagtaattttttgcttgcctctcttatattcagtgagccctactggtttttagaattgtagaattttaggaatctctgtctttactggattttttgtttgttttgggcttttttgtttgtttgtttgagatagggtctcactccgtcaccgacgctggagtgcagtggtgtgatcacagctcactgcaacctctacctcctgggctcaagcaatcctcccacctcagcctcctgagtagctgggactacaggcatgtgccaccatgcccaactaatttattttattttgtagagatagggtctcactatgttgcccaggctggtctcaaacccctggactcaagcaatcctcctgccttggcctccctaaatgctaggattataggcgtgagctatcatacccagcctgtgttgttttttaacaatatataataaaagccaacatttattcagcactgaagtattttatacacattagctcacttaatttttacaacaaacctgtgtgggaagtactgttataattaatcgtcattttcagataagaaaatagcagctgaaaaagtaaaaataatttcctcaaagacagccagggcttaaatcaggcctttctgatgtagaccatgctcttcactaccacagagttccatgctactttctctccctctccctcctctcctgtccctgctacacacacacacacacacacacacacacacacatgcacactcactcacacacactaggaggaacaaatgagatcattcacatgaaagcacttatgtttctgaaatttaagggactgtggtttttatctaggttgacctctcaagctaaaaactgggaaccagaataatggactgaaacttgggtttcacttccagaccagtgttgatcctctgaattgatgaaactgtatagatttccctcttgattgcccctgctaacatggatttcctttcactcaattcctaatgcaaatattgctgaccactgtttagatgtttacatgctgcattacattgatattttacta

SEQ ID NO: 141684 - DNA, 2180 bp, Homo sapiens
  Payload ID: 7860
  Gene Symbol: HYKK
  Gene Name: hydroxylysine kinase
  Uniprot ID: A2RU49
  ENST ID: ENST00000566289
  CDS Start-End: 96-614
gctctacctcctagcgccggtgcgcggccgaggccgcactacctgtctgcgggaaagcgggatccaccccaggacgtcgggtcgctgccgacataatgtcaagtggaaactatcagcagtcagaggctcttagcaaacccactttcagtgaggaacaagcctctgcgttagtggagtcagtgtttgggttgaaagtttccaaggtccggccacttcctagctatgatgaccaaaactttcatgtctacgtttcaaaaaccaaagatggcccaactgaatatgtcctcaaaataagcaacaccaaggctagcaaaaatccagacctgattgaagtgcagaatcacatcatcatgtttctgaaagccgctggatttccaacagcctctgtgtgtcacactaaaggagacaacacagcttctctcgtgtctgtagatagtggctctgaaatcaaaagctacttggtgaggctgctgacttacctcccaggaagacccatcgctgagcttcccgtcagcccccagctattgtatgaaattggaaaactagctgccaaattggataagacactgcaggagggtaagccccgcgttacacccctattggccaaaaactgaagaccaggccgggcgcagtagcttacgcctataatcccagcactttgggaggccgaggcaggtggatcacctgaagtcaggagttagagaccagctggccaacatggtgaaaccccatctactaaaaatacaaaaattagccagagattccatcacccaaagttaagtagtcttcatcgggagaacttcatctggaatctgaaaaatgttcctcttctggagaaatacctgtatgccctgggccagaatcgaaaccgagagattgttgagcatgtcattcatctgttcaaggaggaagtaatgaccaaattaagtcattttcgagaatgtgagtattctcccaattaagtatttttcttgatatttaaactgtccaatttcatatcatcagaaaagtatggaggtacaatttagctttatcaaatcttaaaattttgccatatttgctcctattgctttttaaataataatatttttactttcctcaaaattgctacatttgaagcctcctctaaactttacatgagtctacctctcttcttcccattaaatttgcacattacatatgtatgatttataaattatttatagtagggtttgtgtttttcaaactttatatcaatggtatcacactgtgtattattattctgcaacctgccttttctattcagcatgttttgcagattgatccatatgaatatttgtagttttaatttagtttattagttttaactgctaaatagtattccatagtatgaatataccataatttatttgcatgtactataattttttggtccattctcttgttaatggaattttaggttgcttcccatttctttgctacataaattatgctgcaatgaaccctctagtacaggagtccccaaaccccaggaactgggccacacagcaggaggtgagcagagggaaagcaagcattactgcctgagctctgcctcctgtcaaatcagcagcagcatttgattctcataggagcacaaaccctactgtgaactgcgcatgcaagggatctaagtgagaatctaatgcctgatgatctgagatgaaacagttttatcccaaaaccatccttccgctgtctcctgtccatggaaaaattgtcttccatgaaaccagtccctgatgccaaaaaggttgggaactactgctctagtatatatctatctccctgtgtacacagacaggtgtttctctaggctatatttctagatataaccagccttttcatccagcattaagtactggtcaaaggcaaggaactggctgggtgtggtggctcccgcctgtaatcccagcactttgggaggccgaggtgggtggatcacttgaggtcaggagtttgagactagcctggccaacgtggtgaaaccctgtttctaataaaaatgcaaaaactagctgggcatggtgacgcgtgcctgtaatctcagctactcagaggctgaggcagaagaattgcttgaaccctagaggtggaggttgcagtgggcctaggttgtgccactgcactccagcctgggcaacagagcgaaatccgtctcc

SEQ ID NO: 141685 - DNA, 1422 bp, Homo sapiens
  Payload ID: 7860
  Gene Symbol: HYKK
  Gene Name: hydroxylysine kinase
  ENST ID: ENST00000566332
  CDS Start-End: 61-741
gcactacctgtctgcgggaaagcgggatccaccccaggacgtcgggtcgctgccgacataatgtcaagtggaaactatcagcagtcagaggctcttagcaaacccactttcagtgaggaacaagcctctgcgttagtggagtcagtgtttgggttgaaagtttccaaggtccggccacttcctagctatgatgaccaaaactttcatgtctacgtttcaaaaaccaaagatggcccaactgaatatgtcctcaaaataagcaacaccaaggctagcaaaaatccagacctgattgaagtgcagaatcacatcatcatgtttctgaaagccgctggatttccaacagcctctgtgtgtcacactaaaggagacaacacagcttctctcgtgtctgtagatagtggctctgaaatcaaaagctacttggtgaggctgctgacttacctcccaggaagacccatcgctgagcttcccgtcagcccccagctattgtatgaaattggaaaactagctgccaaattggataagacactgcagagattccatcacccaaagttaagtagtcttcatcgggagaacttcatctggaatctgaaaaatgttcctcttctggagaaatacctgtatgccctgggccagaatcgaaaccgagagattgttgagcatgtcattcatctgttcaaggaggaagtaatgaccaaattaagtcattttcgagaatgtgagtattctcccaattaagtatttttcttgatatttaaactgtccaatttcatatcatcagaaaagtatggaggtacaatttagctttatcaaatcttaaaattttgccatatttgctcctattgctttttaaataataatatttttactttcctcaaaattgctacatttgaagcctcctctaaactttacatgagtctacctctcttcttcccattaaatttgcacattacatatgtatgatttataaattatttatagtagggtttgtgtttttcaaactttatatcaatggtatcacactgtgtattattattctgcaacctgccttttctattcagcatgttttgcagattgatccatatgaatatttgtagttttaatttagtttattagttttaactgctaaatagtattccatagtatgaatataccataatttatttgcatgtactataattttttggtccattctcttgttaatggaattttaggttgcttcccatttctttgctacataaattatgctgcaatgaaccctctagtacaggagtccccaaaccccaggaactgggccacacagcaggaggtgagcagagggaaagcaagcattactgcctgagctctgcctcctgtcaaatcagcagcagcatttgattctcataggagcacaaaccctactgtgaactgcgcatgcaa

SEQ ID NO: 141686 - DNA, 1501 bp, Homo sapiens
  Payload ID: 7861
  Gene Symbol: HMBS
  Gene Name: hydroxymethylbilane synthase
  Uniprot ID: P08397
  ENST ID: ENST00000278715
  CDS Start-End: 152-1237
gtgacgcgaggctctgcggagaccaggagtcagactgtaggacgacctcgggtcccacgtgtccccggtactcgccggccggagcccccggcttcccggggccgggggaccttagcggcacccacacacagcctactttccaagcggagccatgtctggtaacggcaatgcggctgcaacggcggaagaaaacagcccaaagatgagagtgattcgcgtgggtacccgcaagagccagcttgctcgcatacagacggacagtgtggtggcaacattgaaagcctcgtaccctggcctgcagtttgaaatcattgctatgtccaccacaggggacaagattcttgatactgcactctctaagattggagagaaaagcctgtttaccaaggagcttgaacatgccctggagaagaatgaagtggacctggttgttcactccttgaaggacctgcccactgtgcttcctcctggcttcaccatcggagccatctgcaagcgggaaaaccctcatgatgctgttgtctttcacccaaaatttgttgggaagaccctagaaaccctgccagagaagagtgtggtgggaaccagctccctgcgaagagcagcccagctgcagagaaagttcccgcatctggagttcaggagtattcggggaaacctcaacacccggcttcggaagctggacgagcagcaggagttcagtgccatcatcctggcaacagctggcctgcagcgcatgggctggcacaaccgggtggggcagatcctgcaccctgaggaatgcatgtatgctgtgggccagggggccttgggcgtggaagtgcgagccaaggaccaggacatcttggatctggtgggtgtgctgcacgatcccgagactctgcttcgctgcatcgctgaaagggccttcctgaggcacctggaaggaggctgcagtgtgccagtagccgtgcatacagctatgaaggatgggcaactgtacctgactggaggagtctggagtctagacggctcagatagcatacaagagaccatgcaggctaccatccatgtccctgcccagcatgaagatggccctgaggatgacccacagttggtaggcatcactgctcgtaacattccacgagggccccagttggctgcccagaacttgggcatcagcctggccaacttgttgctgagcaaaggagccaaaaacatcctggatgttgcacggcagcttaacgatgcccattaactggtttgtggggcacagatgcctgggttgctgctgtccagtgcctacatcccgggcctcagtgccccattctcactgctatctggggagtgattaccccgggagactgaactgcagggttcaagccttccagggatttgcctcaccttggggccttgatgactgccttgcctcctcagtatgtgggggcttcatctctttagagaagtccaagcaacagcctttgaatgtaaccaatcctactaataaaccagttctgaaggt

SEQ ID NO: 141687 - DNA, 1411 bp, Homo sapiens
  Payload ID: 7861
  Gene Symbol: HMBS
  Gene Name: hydroxymethylbilane synthase
  Uniprot ID: P08397
  ENST ID: ENST00000392841
  CDS Start-End: 111-1145
agtgtcctggttactgcagcggcagcaacagcaggtcctactatcgcctccctctagtctctgcttctctggatccctgaggagggcagaaggaagaaaacagcccaaagatgagagtgattcgcgtgggtacccgcaagagccagcttgctcgcatacagacggacagtgtggtggcaacattgaaagcctcgtaccctggcctgcagtttgaaatcattgctatgtccaccacaggggacaagattcttgatactgcactctctaagattggagagaaaagcctgtttaccaaggagcttgaacatgccctggagaagaatgaagtggacctggttgttcactccttgaaggacctgcccactgtgcttcctcctggcttcaccatcggagccatctgcaagcgggaaaaccctcatgatgctgttgtctttcacccaaaatttgttgggaagaccctagaaaccctgccagagaagagtgtggtgggaaccagctccctgcgaagagcagcccagctgcagagaaagttcccgcatctggagttcaggagtattcggggaaacctcaacacccggcttcggaagctggacgagcagcaggagttcagtgccatcatcctggcaacagctggcctgcagcgcatgggctggcacaaccgggtggggcagatcctgcaccctgaggaatgcatgtatgctgtgggccagggggccttgggcgtggaagtgcgagccaaggaccaggacatcttggatctggtgggtgtgctgcacgatcccgagactctgcttcgctgcatcgctgaaagggccttcctgaggcacctggaaggaggctgcagtgtgccagtagccgtgcatacagctatgaaggatgggcaactgtacctgactggaggagtctggagtctagacggctcagatagcatacaagagaccatgcaggctaccatccatgtccctgcccagcatgaagatggccctgaggatgacccacagttggtaggcatcactgctcgtaacattccacgagggccccagttggctgcccagaacttgggcatcagcctggccaacttgttgctgagcaaaggagccaaaaacatcctggatgttgcacggcagcttaacgatgcccattaactggtttgtggggcacagatgcctgggttgctgctgtccagtgcctacatcccgggcctcagtgccccattctcactgctatctggggagtgattaccccgggagactgaactgcagggttcaagccttccagggatttgcctcaccttggggccttgatgactgccttgcctcctcagtatgtgggggcttcatctctttagagaagtccaagcaacagcctttgaatgtaaccaatcctactaataaaccagttctgaaggtgt

SEQ ID NO: 141688 - DNA, 1548 bp, Homo sapiens
  Payload ID: 7861
  Gene Symbol: HMBS
  Gene Name: hydroxymethylbilane synthase
  Uniprot ID: P08397
  ENST ID: ENST00000442944
  CDS Start-End: 264-1298
ccaggagtcagactgtaggacgacctcgggtcccacgtgtccccggtactcgccggccggagcccccggcttcccggggccgggggaccttagcggcacccacacacagcctactttccaagcggagccatgtctggtaacggcaatgcggctgcaacggcgtcattccagagccctggactaggagtaggaagatctgaattgtggccccaactctctttcggttattagctctgtgaccctaggaagaaaacagcccaaagatgagagtgattcgcgtgggtacccgcaagagccagcttgctcgcatacagacggacagtgtggtggcaacattgaaagcctcgtaccctggcctgcagtttgaaatcattgctatgtccaccacaggggacaagattcttgatactgcactctctaagattggagagaaaagcctgtttaccaaggagcttgaacatgccctggagaagaatgaagtggacctggttgttcactccttgaaggacctgcccactgtgcttcctcctggcttcaccatcggagccatctgcaagcgggaaaaccctcatgatgctgttgtctttcacccaaaatttgttgggaagaccctagaaaccctgccagagaagagtgtggtgggaaccagctccctgcgaagagcagcccagctgcagagaaagttcccgcatctggagttcaggagtattcggggaaacctcaacacccggcttcggaagctggacgagcagcaggagttcagtgccatcatcctggcaacagctggcctgcagcgcatgggctggcacaaccgggtggggcagatcctgcaccctgaggaatgcatgtatgctgtgggccagggggccttgggcgtggaagtgcgagccaaggaccaggacatcttggatctggtgggtgtgctgcacgatcccgagactctgcttcgctgcatcgctgaaagggccttcctgaggcacctggaaggaggctgcagtgtgccagtagccgtgcatacagctatgaaggatgggcaactgtacctgactggaggagtctggagtctagacggctcagatagcatacaagagaccatgcaggctaccatccatgtccctgcccagcatgaagatggccctgaggatgacccacagttggtaggcatcactgctcgtaacattccacgagggccccagttggctgcccagaacttgggcatcagcctggccaacttgttgctgagcaaaggagccaaaaacatcctggatgttgcacggcagcttaacgatgcccattaactggtttgtggggcacagatgcctgggttgctgctgtccagtgcctacatcccgggcctcagtgccccattctcactgctatctggggagtgattaccccgggagactgaactgcagggttcaagccttccagggatttgcctcaccttggggccttgatgactgccttgcctcctcagtatgtgggggcttcatctctttagagaagtccaagcaacagcctttgaatgtaaccaatcctactaataaa

SEQ ID NO: 141689 - DNA, 1351 bp, Homo sapiens
  Payload ID: 7861
  Gene Symbol: HMBS
  Gene Name: hydroxymethylbilane synthase
  Uniprot ID: P08397
  ENST ID: ENST00000544387
  CDS Start-End: 121-1086
agactgtaggacgacctcgggtcccacgtgtccccggtactcgccggccggagcccccggcttcccggggccgggggaccttagcggcacccacacacagcctactttccaagcggagccatgtctggtaacggcaatgcggctgcaacggcggaagaaaacagcccaaagatgagagtgattcgcgtgggtacccgcaagagccagcttgctcgcatacagacggacagtgtggtggcaacattgaaagcctcgtaccctggcctgcagtttgaaatcattgctatgtccaccacaggggacaagattcttgatactgcactctctaagattggagagaaaagcctgtttaccaaggagcttgaacatgccctggagaagaatgaagtggacctggttgttcactccttgaaggacctgcccactgtgcttcctcctggcttcaccatcggagccatctgcaagcgggaaaaccctcatgatgctgttgtctttcacccaaaatttgttgggaagaccctagaaaccctgccagagaagagtgtggtgggaaccagctccctgcgaagagcagcccagctgcagagaaagttcccgcatctggagttcaggagtattcggggaaacctcaacacccggcttcggaagctggacgagcagcaggagttcagtgccatcatcctggcaacagctggcctgcagcgcatgggctggcacaaccgggtggggcagatcctgcaccctgaggaatgcatgtatgctgtgggccaggaaggaggctgcagtgtgccagtagccgtgcatacagctatgaaggatgggcaactgtacctgactggaggagtctggagtctagacggctcagatagcatacaagagaccatgcaggctaccatccatgtccctgcccagcatgaagatggccctgaggatgacccacagttggtaggcatcactgctcgtaacattccacgagggccccagttggctgcccagaacttgggcatcagcctggccaacttgttgctgagcaaaggagccaaaaacatcctggatgttgcacggcagcttaacgatgcccattaactggtttgtggggcacagatgcctgggttgctgctgtccagtgcctacatcccgggcctcagtgccccattctcactgctatctggggagtgattaccccgggagactgaactgcagggttcaagccttccagggatttgcctcaccttggggccttgatgactgccttgcctcctcagtatgtgggggcttcatctctttagagaagtccaagcaacagcctttgaatgtaaccaatcctactaataaaccagttctgaaggtg

SEQ ID NO: 141690 - DNA, 507 bp, Homo sapiens
  Payload ID: 7861
  Gene Symbol: HMBS
  Gene Name: hydroxymethylbilane synthase
  ENST ID: ENST00000536813
  CDS Start-End: 150-507
gacgcgaggctctgcggagaccaggagtcagactgtaggacgacctcgggtcccacgtgtccccggtactcgccggccggagcccccggcttcccggggccgggggaccttagcggcacccacacacagcctactttccaagcggagccatgtctggtaacggcaatgcggctgcaacggcggaagaaaacagcccaaagatgagagtgattcgcgtgggtacccgcaagagccagcttgctcgcatacagacggacagtgtggtggcaacattgaaagcctcgtaccctggcctgcagtttgaaatcagggacaagattcttgatactgcactctctaagattggagagaaaagcctgtttaccaaggagcttgaacatgccctggagaagaatgaagtggacctggttgttcactccttgaaggacctgcccactgtgcttcctcctggcttcaccatcggagccatctgcaagcgggaaaaccctcatgatgctgttgtctttc

SEQ ID NO: 141691 - DNA, 832 bp, Homo sapiens
  Payload ID: 7861
  Gene Symbol: HMBS
  Gene Name: hydroxymethylbilane synthase
  ENST ID: ENST00000535793
  CDS Start-End: 120-311
gactgtaggacgacctcgggtcccacgtgtccccggtactcgccggccggagcccccggcttcccggggccgggggaccttagcggcacccacacacagcctactttccaagcggagccatgtctggtaacggcaatgcggctgcaacggcgcttgctcgcatacagacggacagtgtggtggcaacattgaaagcctcgtaccctggcctgcagtttgaaatcagtgagttttctggaaaggagtggaagctaatgggaagcccagtaccccgagaggagagaacacaacatttctggctttgcctatagctaaagcccgtcccgctgccccgagattccttctgggctgctcccagttctgaagttgctatgtccaccacaggggacaagattcttgatactgcactctctaagattggagagaaaagcctgtttaccaaggagcttgaacatgccctggagaagaatgaagtggacctggttgttcactccttgaaggacctgcccactgtgcttcctcctggcttcaccatcggagccatctgcaagcgggaaaaccctcatgatgctgttgtctttcacccaaaatttgttgggaagaccctagaaaccctgccagagaagagtgtggtgggaaccagctccctgcgaagagcagcccagctgcagagaaagttcccgcatctggagttcaggagtattcggggaaacctcaacacccggcttcggaagctggacgagcagcaggagttcagtgccatcatcctggcaacagctggcctgcagcgcatgggctggcacaaccgggtggggcaggtagggcctgcccc

SEQ ID NO: 141692 - DNA, 1155 bp, Homo sapiens
  Payload ID: 7861
  Gene Symbol: HMBS
  Gene Name: hydroxymethylbilane synthase
  ENST ID: ENST00000539986
  CDS Start-End: 595-1155
gaacaaacagatcctggtgggacagtgtacccaaggtcacccagccaagaggctgagcaggactgtacgtcagatccgtttacctcagtccttaatgcatgcagtccagccagattaagggacccttaatactgtcagctttccccactgtgggatcttcatcctcttgacttcttttgtagccagacatctgggcctcttgctggagaaggtggcagcttgctgctcttagactctagtctactccatgtggcatctggatggcactgaaattttctcaagtgccttgtctgttgtagataatgaatctatcctccagtgactcagcacaggttccccagtgtggtcctggctgccctgcccctgccagctgcaggccccacccttcctgtggccaggctgatgggccttatctctttacccacctggctgtgcacagcactcccactgacaactgccttggtcaaggtgggcttcagggctcagtgtcctggttactgcagcggcagcaacagcaggtcctactatcgcctccctctagtctctgcttctctggatccctgaggagggcagaaggaagaaaacagcccaaagatgagagtgattcgcgtgggtacccgcaagagccagcttgctcgcatacagacggacagtgtggtggcaacattgaaagcctcgtaccctggcctgcagtttgaaatcattgctatgtccaccacaggggacaagattcttgatactgcactctctaagattggagagaaaagcctgtttaccaaggagcttgaacatgccctggagaagaatgaagtggacctggttgttcactccttgaaggacctgcccactgtgcttcctcctggcttcaccatcggagccatctgcaagcgggaaaaccctcatgatgctgttgtctttcacccaaaatttgttgggaagaccctagaaaccctgccagagaagagtgtggtgggaaccagctccctgcgaagagcagcccagctgcagagaaagttcccgcatctggagttcaggagtattcggggaaacctcaacacccggcttcggaagctggacgagcagcaggagttcagtgccatcatcctggcaacagctggcctgcagcgcatgggctggcacaaccgggtggggcag

SEQ ID NO: 141693 - DNA, 755 bp, Homo sapiens
  Payload ID: 7861
  Gene Symbol: HMBS
  Gene Name: hydroxymethylbilane synthase
  ENST ID: ENST00000535253
  CDS Start-End: 195-755
gctcagtgtcctggttactgcagcggcagcaacagcaggtcctactatcgcctccctctagtctctgcttctctggatccctgaggagggcagaagccagtgattctggttcttggacaaggtgttgaggaacactagaaacagaggggactgtgacctggggactttttctgcaggaagaaaacagcccaaagatgagagtgattcgcgtgggtacccgcaagagccagcttgctcgcatacagacggacagtgtggtggcaacattgaaagcctcgtaccctggcctgcagtttgaaatcattgctatgtccaccacaggggacaagattcttgatactgcactctctaagattggagagaaaagcctgtttaccaaggagcttgaacatgccctggagaagaatgaagtggacctggttgttcactccttgaaggacctgcccactgtgcttcctcctggcttcaccatcggagccatctgcaagcgggaaaaccctcatgatgctgttgtctttcacccaaaatttgttgggaagaccctagaaaccctgccagagaagagtgtggtgggaaccagctccctgcgaagagcagcccagctgcagagaaagttcccgcatctggagttcaggagtattcggggaaacctcaacacccggcttcggaagctggacgagcagcaggagttcagtgccatcatcctggcaacagctggcctgcagcgcatgggctggcacaaccgggtggggcag

SEQ ID NO: 141694 - DNA, 1469 bp, Homo sapiens
  Payload ID: 7861
  Gene Symbol: HMBS
  Gene Name: hydroxymethylbilane synthase
  Uniprot ID: P08397
  ENST ID: ENST00000542729
  CDS Start-End: 292-1206
gacgcgaggctctgcggagaccaggagtcagactgtaggacgacctcgggtcccacgtgtccccggtactcgccggccggagcccccggcttcccggggccgggggaccttagcggcacccacacacagcctactttccaagcggagccatgtctggtaacggcaatgcggctgcaacggcggtgagtgctgagccggtgaccagcacactttgggcttctggacgagccgtgcagcgattggccccaggttgccatcctcagtcgtctattggaagaaaacagcccaaagatgagagtgattcgcgtgggtacccgcaagagccagcttgctcgcatacagacggacagtgtggtggcaacattgaaagcctcgtaccctggcctgcagtttgaaatcattgctatgtccaccacaggggacaagattcttgatactgcactctctaagattggagagaaaagcctgtttaccaaggagcttgaacatgccctggagaagaatgaagtggacctggttgttcactccttgaaggacctgcccactgtgcttcctcctggcttcaccatcggagccatctgcaagcgggaaaaccctcatgatgctgttgtctttcacccaaaatttgttgggaagaccctagaaaccctgccagagaagagtgtggtgggaaccagctccctgcgaagagcagcccagctgcagagaaagttcccgcatctggagttcaggagtattcggggaaacctcaacacccggcttcggaagctggacgagcagcaggagttcagtgccatcatcctggcaacagctggcctgcagcgcatgggctggcacaaccgggtggggcagatcctgcaccctgaggaatgcatgtatgctgtgggccaggaaggaggctgcagtgtgccagtagccgtgcatacagctatgaaggatgggcaactgtacctgactggaggagtctggagtctagacggctcagatagcatacaagagaccatgcaggctaccatccatgtccctgcccagcatgaagatggccctgaggatgacccacagttggtaggcatcactgctcgtaacattccacgagggccccagttggctgcccagaacttgggcatcagcctggccaacttgttgctgagcaaaggagccaaaaacatcctggatgttgcacggcagcttaacgatgcccattaactggtttgtggggcacagatgcctgggttgctgctgtccagtgcctacatcccgggcctcagtgccccattctcactgctatctggggagtgattaccccgggagactgaactgcagggttcaagccttccagggatttgcctcaccttggggccttgatgactgccttgcctcctcagtatgtgggggcttcatctctttagagaagtccaagcaacagcctttgaatgtaaccaatcctactaataaaccagttctgaagg

SEQ ID NO: 141695 - DNA, 1559 bp, Homo sapiens
  Payload ID: 7861
  Gene Symbol: HMBS
  Gene Name: hydroxymethylbilane synthase
  Uniprot ID: P08397
  ENST ID: ENST00000537841
  CDS Start-End: 292-1326
gacgcgaggctctgcggagaccaggagtcagactgtaggacgacctcgggtcccacgtgtccccggtactcgccggccggagcccccggcttcccggggccgggggaccttagcggcacccacacacagcctactttccaagcggagccatgtctggtaacggcaatgcggctgcaacggcggtgagtgctgagccggtgaccagcacactttgggcttctggacgagccgtgcagcgattggccccaggttgccatcctcagtcgtctattggaagaaaacagcccaaagatgagagtgattcgcgtgggtacccgcaagagccagcttgctcgcatacagacggacagtgtggtggcaacattgaaagcctcgtaccctggcctgcagtttgaaatcattgctatgtccaccacaggggacaagattcttgatactgcactctctaagattggagagaaaagcctgtttaccaaggagcttgaacatgccctggagaagaatgaagtggacctggttgttcactccttgaaggacctgcccactgtgcttcctcctggcttcaccatcggagccatctgcaagcgggaaaaccctcatgatgctgttgtctttcacccaaaatttgttgggaagaccctagaaaccctgccagagaagagtgtggtgggaaccagctccctgcgaagagcagcccagctgcagagaaagttcccgcatctggagttcaggagtattcggggaaacctcaacacccggcttcggaagctggacgagcagcaggagttcagtgccatcatcctggcaacagctggcctgcagcgcatgggctggcacaaccgggtggggcagatcctgcaccctgaggaatgcatgtatgctgtgggccagggggccttgggcgtggaagtgcgagccaaggaccaggacatcttggatctggtgggtgtgctgcacgatcccgagactctgcttcgctgcatcgctgaaagggccttcctgaggcacctggaaggaggctgcagtgtgccagtagccgtgcatacagctatgaaggatgggcaactgtacctgactggaggagtctggagtctagacggctcagatagcatacaagagaccatgcaggctaccatccatgtccctgcccagcatgaagatggccctgaggatgacccacagttggtaggcatcactgctcgtaacattccacgagggccccagttggctgcccagaacttgggcatcagcctggccaacttgttgctgagcaaaggagccaaaaacatcctggatgttgcacggcagcttaacgatgcccattaactggtttgtggggcacagatgcctgggttgctgctgtccagtgcctacatcccgggcctcagtgccccattctcactgctatctggggagtgattaccccgggagactgaactgcagggttcaagccttccagggatttgcctcaccttggggccttgatgactgccttgcctcctcagtatgtgggggcttcatctctttagagaagtccaagcaacagcctttgaatgtaa

SEQ ID NO: 141696 - DNA, 936 bp, Homo sapiens
  Payload ID: 7861
  Gene Symbol: HMBS
  Gene Name: hydroxymethylbilane synthase
  ENST ID: ENST00000542822
  CDS Start-End: 128-373
aggagtcagactgtaggacgacctcgggtcccacgtgtccccggtactcgccggccggagcccccggcttcccggggccgggggaccttagcggcacccacacacagcctactttccaagcggagccatgtctggtaacggcaatgcggctgcaacggcggtgagtgctgagccggtgaccagcacactttgggcttctggacgagccgtgcagcgattggccccaggttgccatcctcagtcgtctattggaagaaaacagcccaaagatgagagtgattcgcgtgggtacccgcaagagccagcttgctcgcatacagacggacagtgtggtggcaacattgaaagcctcgtaccctggcctgcagtttgaaatcagtgagttttctggaaaggagtggaagctaatgggaagcccagtaccccgagaggagagaacacaacatttctggctttgcctatagctaaagcccgtcccgctgccccgagattccttctgggctgctcccagttctgaagattggagagaaaagcctgtttaccaaggagcttgaacatgccctggagaagaatgaagtggacctggttgttcactccttgaaggacctgcccactgtgcttcctcctggcttcaccatcggagccatctgcaagcgggaaaaccctcatgatgctgttgtctttcacccaaaatttgttgggaagaccctagaaaccctgccagagaagagtgtggtgggaaccagctccctgcgaagagcagcccagctgcagagaaagttcccgcatctggagttcaggagtattcggggaaacctcaacacccggcttcggaagctggacgagcagcaggagttcagtgccatcatcctggcaacagctggcctgcagcgcatgggctggcacaaccgggtggggcaggtagggcctgcccct

SEQ ID NO: 141697 - DNA, 1282 bp, Homo sapiens
  Payload ID: 7861
  Gene Symbol: HMBS
  Gene Name: hydroxymethylbilane synthase
  ENST ID: ENST00000545621
  CDS Start-End: 154-399
aagtgacgcgaggctctgcggagaccaggagtcagactgtaggacgacctcgggtcccacgtgtccccggtactcgccggccggagcccccggcttcccggggccgggggaccttagcggcacccacacacagcctactttccaagcggagccatgtctggtaacggcaatgcggctgcaacggcggaagaaaacagcccaaagatgagagtgattcgcgtgggtacccgcaagagccagcttgctcgcatacagacggacagtgtggtggcaacattgaaagcctcgtaccctggcctgcagtttgaaatcagtgagttttctggaaaggagtggaagctaatgggaagcccagtaccccgagaggagagaacacaacatttctggctttgcctatagctaaagcccgtcccgctgccccgagattccttctgggctgctcccagttctgaagttgctatgtccaccacaggggacaagattcttgatactgcactctctaagattggagagaaaagcctgtttaccaaggagcttgaacatgccctggagaagaatgaagtggacctggttgttcactccttgaaggacctgcccactgtgcttcctcctggcttcaccatcggagccatctgcaagcgggaaaaccctcatgatgctgttgtctttcacccaaaatttgttgggaagaccctagaaaccctgccagagaagagtgtggtgggaaccagctccctgcgaagagcagcccagctgcagagaaagttcccgcatctggagttcaggagtattcggggaaacctcaacacccggcttcggaagctggacgagcagcaggagttcagtgccatcatcctggcaacagctggcctgcagcgcatgggctggcacaaccgggtggggcagatcctgcaccctgaggaatgcatgtatgctgtgggccaggtacacttgaccagggaagccacatggtgacatatgccttccctttgttctcaaccaagaagcttgtctcacaaccttctgcatctgcttccccagaatagcattctcagggaggggcagaccttgggatgctaccggtccaaaaggcgctggggagcaagtagatagaggtggtcccatgctttgcgccattggttggggaaagatcaggcctgatgtcctaggatgtttttccatcagggggccttgggcgtggaagtgcgagccaaggaccaggacatcttggatctggtgggtgtgctgcacgatcccgagactctgcttcgctgcatcgctg

SEQ ID NO: 141698 - DNA, 1347 bp, Homo sapiens
  Payload ID: 7861
  Gene Symbol: HMBS
  Gene Name: hydroxymethylbilane synthase
  ENST ID: ENST00000543090
  CDS Start-End: 105-1097
tcgggtcccacgtgtccccggtactcgccggccggagcccccggcttcccggggccgggggaccttagcggcacccacacacagcctactttccaagcggagccatgtctggtaacggcaatgcggctgcaacggcgcttgctcgcatacagacggacagtgtggtggcaacattgaaagcctcgtaccctggcctgcagtttgaaatcattgctatgtccaccacaggggacaagattcttgatactgcactctctaagattggagagaaaagcctgtttaccaaggagcttgaacatgccctggagaagaatgaagtggacctggttgttcactccttgaaggacctgcccactgtgcttcctcctggcttcaccatcggagccatctgcaagcgggaaaaccctcatgatgctgttgtctttcacccaaaatttgttgggaagaccctagaaaccctgccagagaagagtgtggtgggaaccagctccctgcgaagagcagcccagctgcagagaaagttcccgcatctggagttcaggagtattcggggaaacctcaacacccggcttcggaagctggacgagcagcaggagttcagtgccatcatcctggcaacagctggcctgcagcgcatgggctggcacaaccgggtggggcagggggccttgggcgtggaagtgcgagccaaggaccaggacatcttggatctggtgggtgtgctgcacgatcccgagactctgcttcgctgcatcgctgaaagggccttcctgaggcacctggaaggaggctgcagtgtgccagtagccgtgcatacagctatgaaggatgggcaactgtacctgactggaggagtctggagtctagacggctcagatagcatacaagagaccatgcaggctaccatccatgtccctgcccagcatgaagatggccctgaggatgacccacagttggtaggcatcactgctcgtaacattccacgagggccccagttggctgcccagaacttgggcatcagcctggccaacttgttgctgagcaaaggagccaaaaacatcctggatgttgcacggcagcttaacgatgcccattaactggtttgtggggcacagatgcctgggttgctgctgtccagtgcctacatcccgggcctcagtgccccattctcactgctatctggggagtgattaccccgggagactgaactgcagggttcaagccttccagggatttgcctcaccttggggccttgatgactgccttgcctcctcagtatgtgggggcttcatctctttagagaagtccaagcaacagcctttgaatgtaaccaatcctactaataaa

SEQ ID NO: 141699 - DNA, 708 bp, Homo sapiens
  Payload ID: 7861
  Gene Symbol: HMBS
  Gene Name: hydroxymethylbilane synthase
  ENST ID: ENST00000546302
  CDS Start-End: 135-708
ggagaccaggagtcagactgtaggacgacctcgggtcccacgtgtccccggtactcgccggccggagcccccggcttcccggggccgggggaccttagcggcacccacacacagcctactttccaagcggagccatgtctggtaacggcaatgcggctgcaacggcggaagaaaacagcccaaagatgagagtgattcgcgtgggtacccgcaagagccagcttgctcgcatacagacggacagtgtggtggcaacattgaaagcctcgtaccctggcctgcagtttgaaatcattgctatgtccaccacaggggacaagattcttgatactgcactctctaagattggagagaaaagcctgtttaccaaggagcttgaacatgccctggagaagaatgagcgggaaaaccctcatgatgctgttgtctttcacccaaaatttgttgggaagaccctagaaaccctgccagagaagagtgtggtgggaaccagctccctgcgaagagcagcccagctgcagagaaagttcccgcatctggagttcaggagtattcggggaaacctcaacacccggcttcggaagctggacgagcagcaggagttcagtgccatcatcctggcaacagctggcctgcagcgcatgggctggcacaaccgggtggggcagatcctgcaccctgaggaatgcatgtatgctgtgggccagg

SEQ ID NO: 141700 - DNA, 1171 bp, Homo sapiens
  Payload ID: 7862
  Gene Symbol: HPGD
  Gene Name: hydroxyprostaglandin dehydrogenase 15-(NAD)
  Uniprot ID: P15428
  ENST ID: ENST00000296521
  CDS Start-End: 37-573
agctcgcccaccgcccgccccagcagtggctgcaccatgcacgtgaacggcaaagtggcgctggtgaccggcgcggctcagggcataggcagagcctttgcagaggcgctgctgcttaagggcgccaaggtagcgctggtggattggaatcttgaagcaggtgtacagtgtaaagctgccctggatgagcagtttgaacctcagaagactctgttcatccagtgcgatgtggctgaccagcaacaactgagagacacttttagaaaagttgtagaccactttggaagactggacattttggtcaataatgctggagtgaataatgagaaaaactgggaaaaaactctgcaaattaatttggtttctgttatcagtggaacctatcttggtttggattacatgagtaagcaaaatggaggtgaaggcggcatcattatcaatatgtcatctttagcaggactcatgcccgttgcacagcagccggtttattgtgcttcaaagcatggcatagttggattcacacgctcagcagcgcccaccattgattgccaatggattgataacactcattgaagatgatgctttaaatggtgctattatgaagatcacaacttctaagggaattcattttcaagactatgatacaactccatttcaagcaaaaacccaatgaacagcttatgtgttagccatagctgaaaataagcacaaatagcttatattcagatcctatcttcatttgaatatagcttttaaatgaaatgttacagtttgaagttttccttcatgcacttggtgataaacgttttctaaatttttagttaagtatatggataaaaagttatgaactattaaaaatgtgatgtggaccaaaggctaggttgtaatcttgatagtctaaaaaatgatcaaaacaaatgattttcaaggaatattcaatattctgcctttcagaaagtgtatttatatctgtgcttcataaatattaatgttcttcagaacatcattttaaaggagatacttgaattgttatttaaatcaaaccagatgtaaaacactcacatacaagttcatactttaaaagaggaaagctacttaacaatgacaaatatttcacaataataatttttacttatataccatctttcaactgaacatttcagttcttcca

SEQ ID NO: 141701 - DNA, 3027 bp, Homo sapiens
  Payload ID: 7862
  Gene Symbol: HPGD
  Gene Name: hydroxyprostaglandin dehydrogenase 15-(NAD)
  Uniprot ID: P15428
  ENST ID: ENST00000296522
  CDS Start-End: 448-1248
gctttattgtttgcttgttttgttccggagtcggggccgggagggagtgcaggaggagggatccaagcttccaagcctctgctccgctctccttctatccagttggtctttagggcactgaaggaaactcttcttcagaaataaccttttaacttttcttctgtcagctgcctgccaatcacggagccagaggctgaggggaggctttgagccggtctgcgagtccggaaggcaaagatcgcgaagcttggcgctccagaacgctcagggggcaggtgacacagtcgtgggttccccggcgggcgctggcttgacagtttcctccccgcccactggcaggggagcgccccgccgggctgcacgcgcgcgcgcgcaggggggcataaaagccgcggccgcgcggagacgcggagctcgcccaccgcccgccccagcagtggctgcaccatgcacgtgaacggcaaagtggcgctggtgaccggcgcggctcagggcataggcagagcctttgcagaggcgctgctgcttaagggcgccaaggtagcgctggtggattggaatcttgaagcaggtgtacagtgtaaagctgccctggatgagcagtttgaacctcagaagactctgttcatccagtgcgatgtggctgaccagcaacaactgagagacacttttagaaaagttgtagaccactttggaagactggacattttggtcaataatgctggagtgaataatgagaaaaactgggaaaaaactctgcaaattaatttggtttctgttatcagtggaacctatcttggtttggattacatgagtaagcaaaatggaggtgaaggcggcatcattatcaatatgtcatctttagcaggactcatgcccgttgcacagcagccggtttattgtgcttcaaagcatggcatagttggattcacacgctcagcagcgttggctgctaatcttatgaacagtggtgtgagactgaatgccatttgtccaggctttgttaacacagccatccttgaatcaattgaaaaagaagaaaacatgggacaatatatagaatataaggatcatatcaaggatatgattaaatactatggaattttggacccaccattgattgccaatggattgataacactcattgaagatgatgctttaaatggtgctattatgaagatcacaacttctaagggaattcattttcaagactatgatacaactccatttcaagcaaaaacccaatgaacagcttatgtgttagccatagctgaaaataagcacaaatagcttatattcagatcctatcttcatttgaatatagcttttaaatgaaatgttacagtttgaagttttccttcatgcacttggtgataaacgttttctaaatttttagttaagtatatggataaaaagttatgaactattaaaaatgtgatgtggaccaaaggctaggttgtaatcttgatagtctaaaaaatgatcaaaacaaatgattttcaaggaatattcaatattctgcctttcagaaagtgtatttatatctgtgcttcataaatattaatgttcttcagaacatcattttaaaggagatacttgaattgttatttaaatcaaaccagatgtaaaacactcacatacaagttcatactttaaaagaggaaagctacttaacaatgacaaatatttcacaataataatttttacttatataccatctttcaactgaacatttcagttcttccaagagcttcttagagtagtatattttgggggcagtcaaggaataaactacagtgtaaacatatcccagatgaaaactgctgtatggaaaaatgacagaaagtaactgattgacactgttgattcacagttcagcctcctatctgggaaagacatttctttcctctgctcactttaagaacttttaccgactccaaaaatctcaggaattaaacttttaacagttacagcaataaagaatagttagtactccaaaaatattatatttaagatgctcaacaagaaaaaaatgcaaatgtaatatttttttcaaattacttctttattgacttgtccaaatttcaaaagtgcctacccttcaataaaacttttttattctgatctccataaattacttagtcttctatgtatagctatcaaggaaataaaaccaattttgccacagccacaactgtaaatgtttttgtacccatgctgaaactcataacaacacagacataaaaatagctgtgaggttttgctttttttgttgtcagctatcttaagaatcattaaatacacctgctttgggtaaaactctttgcaagcagtaattaacactagtaacagtgaaagcacaagatttccaaatcagtcgttttctcaaaaaaatatcgtataagtgactcatcctgtctgctaactccagacctcccagcttgaagccaaatctttccatgtgagattgatatggatttcctagaagtactggaatgttgtcatatcttgccctattttaattctgctatagaaaacaattgccttcacttttaaggagtaatttgaatattaataactctggtctagattttcatataatgtattaaagacaaagtagtgaacatcaatgaacatctgatagagataaactgtaatcaggcataagcttgtttgtatgttctggcagtgactaatcagtaaatgatgtcggtttgcccagtatcacttatcttctgtatttttcctctgtcgtgtaaatagtataaccttttcatttatggacaattttttggactagtagccttcaatatacattctgctttgaattaattttttcaaatcaataaattatgtagacatttaaaatcaaatatcaagtagaattgaaaaatgtgagttacataagttaaaaacttactttaaatcttaccttctataggtagctctaaataaattcatatggttatatggcatctctggtgtatactgattgagaaaataattaaactgaagttaggggagggg

SEQ ID NO: 141702 - DNA, 805 bp, Homo sapiens
  Payload ID: 7862
  Gene Symbol: HPGD
  Gene Name: hydroxyprostaglandin dehydrogenase 15-(NAD)
  Uniprot ID: P15428
  ENST ID: ENST00000422112
  CDS Start-End: 38-634
gagctcgcccaccgcccgccccagcagtggctgcaccatgcacgtgaacggcaaagtggcgctggtgaccggcgcggctcagggcataggcagagcctttgcagaggcgctgctgcttaagggcgccaaggtagcgctggtggattggaatcttgaagcaggtgtacagtgtaaagctgccctggatgagcagtttgaacctcagaagactctgttcatccagtgcgatgtggctgaccagcaacaactgagaggactcatgcccgttgcacagcagccggtttattgtgcttcaaagcatggcatagttggattcacacgctcagcagcgttggctgctaatcttatgaacagtggtgtgagactgaatgccatttgtccaggctttgttaacacagccatccttgaatcaattgaaaaagaagaaaacatgggacaatatatagaatataaggatcatatcaaggatatgattaaatactatggaattttggacccaccattgattgccaatggattgataacactcattgaagatgatgctttaaatggtgctattatgaagatcacaacttctaagggaattcattttcaagactatgatacaactccatttcaagcaaaaacccaatgaacagcttatgtgttagccatagctgaaaataagcacaaatagcttatattcagatcctatcttcatttgaatatagcttttaaatgaaatgttacagtttgaagttttccttcatgcacttggtgataaacgttttctaaatttttagttaagtatatggataaaaagtta

SEQ ID NO: 141703 - DNA, 1910 bp, Homo sapiens
  Payload ID: 7862
  Gene Symbol: HPGD
  Gene Name: hydroxyprostaglandin dehydrogenase 15-(NAD)
  ENST ID: ENST00000504433
  CDS Start-End: 49-579
gcggagacgcggagctcgcccaccgcccgccccagcagtggctgcaccatgcacgtgaacggcaaagtggcgctggtgaccggcgcggctcagggcataggcagagcctttgcagaggcgctgctgcttaagggcgccaaggtagcgctggtggattggaatcttgaagcaggtgtacagtgtaaagctgccctggatgagcagtttgaacctcagaagactctgttcatccagtgcgatgtggctgaccagcaacaactgagagacacttttagaaaagttgtagaccactttggaagactggacattttggtcaataatgctggagtgaataatgagaaaaactgggaaaaaactctgcaaattaatttggtttctgttatcagtggaacctatcttggtttggattacatgagtaagcaaaatggaggtgaaggcggcatcattatcaatatgtcatctttagcaggtatctcttctgtatgcagacatttgaaaacctggctggcagaagttctgccgtcttcagcagggagctcccagggttactttagaactgctggattcctttttctctagcagaaagagaagaagaacatggaggaggcatggctactcttttaagaaccccagcccagtaatggcagaccttctgctcacatttcagtatagaacttgagctcatgtttcacctaactgtaagcgagtctgtctgggaaatgcagtctagctgtgtgcctaagagaagaatggatttcagagggcagctaatcatcttttccacagcatgcaatcctaaactatagtattttcagagtagtatgatttagtatcagctgatatcttatccttcaatactagccttaaacctctgactggactttttggagcaactgagtcaagtgactttactttttaaaactctaggaaaaaatcatcaatgattcttgaatagttcaagtgaaattgtgaagtttaagaagtctgatcaacatggacagcaaatctaagctatcttgtccaaaaaagtgagactttaaaaaattatctgtttggttttagttaatgtggtgatttcagaatagaaatttcagccccacaccccaccccaaccttggcatctcagctccagtgatttgggaagttgggtttggaggtacctgtgattgaacctctgtctgattctcagcatttgtctcatccctctaggaatgattatcaaatggttcttttatatcactgtaaagctgccaccagaggagatttagaaatctcctttagaagttctcaaaaatagactagcatctcattttctgggtcgcttaaagtcaaaatcatgtccctaaagctattacaaacctatttctataaatttttcagggtaatcagattctttttcctagtggtacaactacttataaattataacattttaatcctaatgatactttaaaaggtgagcgcacgggcaatatttgaaaggggtatgtgttccagagagggccaaatgttaagctgtgggagactgaaaccctaaaagcaaattggcaaagctaaatctatactattttgaaataaaatcataagaaaaaaacaagtgactggagaattaaaaagagatatttagtattttcttaaaagtttaaatatttaaaaacctggggctgtgatcaagattgataattctctgtattctttcataaagctaagagggtcagcaaagcttggagtaccatgaatattctacaaggagcccctggcctttatgtcactggaggcactgatttcattctttggaaggctgaaagcctcagagttggatcaatttaggacgatctgggagaaattctttaccataagagggtgcttccttgccccaaagagcatgaataaagaaatgcaatgtagaa

SEQ ID NO: 141704 - DNA, 1535 bp, Homo sapiens
  Payload ID: 7862
  Gene Symbol: HPGD
  Gene Name: hydroxyprostaglandin dehydrogenase 15-(NAD)
  Uniprot ID: P15428
  ENST ID: ENST00000510901
  CDS Start-End: 713-1150
gacagagcagagtccacttctcatctccagtatccgtaaaaatttgtccaaaatgtaactaagaaaacacaatgatattagttacttctgctccccgtcaccctcaaccccactgattacgagatgggaactcacacaaaactttgagacaaaagagcaacaagtttgctttattgtttgcttgttttgttccggagtcggggccgggagggagtgcaggaggagggatccaagcttccaagcctctgctccgctctccttctatccagttggtctttagggcactgaaggaaactcttcttcagaaataaccttttaacttttcttctgtcagctgcctgccaatcacggagccagaggctgaggggaggctttgagccggtctgcgagtccggaaggcaaagatcgcgaagcttggcgctccagaacgctcagggggcaggtagcgctggtggattggaatcttgaagcaggtgtacagtgtaaagctgccctggatgagcagtttgaacctcagaagactctgttcatccagtgcgatgtggctgaccagcaacaactgagagacacttttagaaaagttgtagaccactttggaagactggacattttggtcaataatgctggagtgaataatgagaaaaactgggaaaaaactctgcaaattaatttggtttctgttatcagtggaacctatcttggtttggattacatgagtaagcaaaatggaggtgaaggcggcatcattatcaatatgtcatctttagcaggactcatgcccgttgcacagcagccggtttattgtgcttcaaagcatggcatagttggattcacacgctcagcagcgttggctgctaatcttatgaacagtggtgtgagactgaatgccatttgtccaggctttgttaacacagccatccttgaatcaattgaaaaagaagaaaacatgggacaatatatagaatataaggatcatatcaaggatatgattaaatactatggaattttggacccaccattgattgccaatggattgataacactcattgaagatgatgctttaaatggtgctattatgaagatcacaacttctaagggaattcattttcaagactatgatacaactccatttcaagcaaaaacccaatgaacagcttatgtgttagccatagctgaaaataagcacaaatagcttatattcagatcctatcttcatttgaatatagcttttaaatgaaatgttacagtttgaagttttccttcatgcacttggtgataaacgttttctaaatttttagttaagtatatggataaaaagttatgaactattaaaaatgtgatgtggaccaaaggctaggttgtaatcttgatagtctaaaaaatgatcaaaacaaatgattttcaaggaatattcaatattctgcctttcagaaagtgtatttatatctgtgcttcataaatattaatgttcttcagaacatcattttaaaggagatacttgaattgttatttaaatcaaaccagatgtaaaacac

SEQ ID NO: 141705 - DNA, 819 bp, Homo sapiens
  Payload ID: 7862
  Gene Symbol: HPGD
  Gene Name: hydroxyprostaglandin dehydrogenase 15-(NAD)
  ENST ID: ENST00000506910
  CDS Start-End: 522-819
aatatgacacacaattgacactgaccagaaacacagcgccaaggacactctagtcctagccatgaaatgttatgattccaggttttcaggacagagcagagtccacttctcatctccagtatccgtaaaaatttgtccaaaatctgcctgccaatcacggagccagaggctgaggggaggctttgagccggtctgcgagtccggaaggcaaagatcgcgaagcttggcgctccagaacgctcagggggcaggtagcgctggtggattggaatcttgaagcaggtgtacagtgtaaagctgccctggatgagcagtttgaacctcagaagactctgttcatccagtgcgatgtggctgaccagcaacaactgagagacacttttagaaaagttgtagaccactttggaagactggacattttggtcaataatgctggagtgaataatgagaaaaactgggaaaaaactctgcaaattaatttggtttctgttatcagtggaacctatcttggtttggattacatgagtaagcaaaatggaggtgaaggcggcatcattatcaatatgtcatctttagcaggactcatgcccgttgcacagcagccggtttattgtgcttcaaagcatggcatagttggattcacacgctcagcagcgttggctgctaatcttatgaacagtggtgtgagactgaatgccatttgtccaggctttgttaacacagccatccttgaatcaattgaaaaagaagaaaacatgggacaatatatagaatataaggatcatatcaaggatatgattaaatactatggaattttgg

SEQ ID NO: 141706 - DNA, 827 bp, Homo sapiens
  Payload ID: 7862
  Gene Symbol: HPGD
  Gene Name: hydroxyprostaglandin dehydrogenase 15-(NAD)
  ENST ID: ENST00000514584
  CDS Start-End: 537-827
atttctctgcccacacactccgagactcgccccgccgcccgaggtgcactggcggagacagggaggccgcgcccggcgtgcccactttgccacttccaaaatttgctgaagctgaggctgtgagcacacctcagaagtggctgggagggaacccaaacctaattgccaaatttcaggtccaggaggggagcctcttgtgtgtttattgtttgtccgtctatttcgtgagctgcgcaggcccgcgattcctctcctcttgtctataggtagcgctggtggattggaatcttgaagcaggtgtacagtgtaaagctgccctggatgagcagtttgaacctcagaagactctgttcatccagtgcgatgtggctgaccagcaacaactgagagacacttttagaaaagttgtagaccactttggaagactggacattttggtcaataatgctggagtgaataatgagaaaaactgggaaaaaactctgcaaattaatttggtttctgttatcagtggaacctatcttggtttggattacatgagtaagcaaaatggaggtgaaggcggcatcattatcaatatgtcatctttagcaggactcatgcccgttgcacagcagccggtttattgtgcttcaaagcatggcatagttggattcacacgctcagcagcgttggctgctaatcttatgaacagtggtgtgagactgaatgccatttgtccaggctttgttaacacagccatccttgaatcaattgaaaaagaagaaaacatgggacaatatatagaatataaggatcatatcaaggatatgattaaatactatgga

SEQ ID NO: 141707 - DNA, 1046 bp, Homo sapiens
  Payload ID: 7862
  Gene Symbol: HPGD
  Gene Name: hydroxyprostaglandin dehydrogenase 15-(NAD)
  ENST ID: ENST00000508330
  CDS Start-End: 191-454
agaacgctcagggggcaggtgacacagtcgtgggttccccggcgggcgctggcttgacagtttcctccccgcccactggcaggggagcgccccgccgggctgcacgcgcgcgcgcgcaggggggcataaaagccgcggccgcgcggagacgcggagctcgcccaccgcccgccccagcagtggctgcaccatgcacgtgaacggcaaagtggcgctggtgaccggcgcggctcagggcataggcagagcctttgcagaggcgctgctgcttaagggcgccaaggtagcgctggtggattggaatcttgaagcaggtgtacagtgtaaagctgccctggatgagcagtttgaacctcagaagactctgttcatccagtgcgatgtggctgaccagcaacaactgagaggtttctgttatcagtggaacctatcttggtttggattacatgagtaagcaaaatggaggtgaaggcggcatcattatcaatatgtcatctttagcaggactcatgcccgttgcacagcagccggtttattgtgcttcaaagcatggcatagttggattcacacgctcagcagcgttggctgctaatcttatgaacagtggtgtgagactgaatgccatttgtccaggctttgttaacacagccatccttgaatcaattgaaaaagaagaaaacatgggacaatatatagaatataaggatcatatcaaggatatgattaaatactatggaattttggacccaccattgattgccaatggattgataacactcattgaagatgatgctttaaatggtgctattatgaagatcacaacttctaagggaattcattttcaagactatgatacaactccatttcaagcaaaaacccaatgaacagcttatgtgttagccatagctgaaaataagcacaaatagcttatattcagatcctatcttcatttgaatatagcttttaaatgaaatgttacagtttgaagttttccttcatgcacttggtgataaacgttttctaaatttttagttaagtatatggat

SEQ ID NO: 141708 - DNA, 1553 bp, Homo sapiens
  Payload ID: 7862
  Gene Symbol: HPGD
  Gene Name: hydroxyprostaglandin dehydrogenase 15-(NAD)
  ENST ID: ENST00000510835
  CDS Start-End: 25-138
gcccgccccagcagtggctgcaccatgcacgtgaacggcaaagtggcgctggtgaccggcgcggctcagggcataggcagagcctttgcagaggcgctgctgcttaagggcgccaagacacttttagaaaagttgtagaccactttggaagactggacattttggtcaataatgctggagtgaataatgagaaaaactgggaaaaaactctgcaaattaatttggtttctgttatcagtggaacctatcttggtttggattacatgagtaagcaaaatggaggtgaaggcggcatcattatcaatatgtcatctttagcaggactcatgcccgttgcacagcagccggtttattgtgcttcaaagcatggcatagttggattcacacgctcagcagcgttggctgctaatcttatgaacagtggtgtgagactgaatgccatttgtccaggctttgttaacacagccatccttgaatcaattgaaaaagaagaaaacatgggacaatatatagaatataaggatcatatcaaggatatgattaaatactatggaattttggacccaccattgattgccaatggattgataacactcattgaagatgatgctttaaatggtgctattatgaagatcacaacttctaagggaattcattttcaagactatgatacaactccatttcaagcaaaaacccaatgaacagcttatgtgttagccatagctgaaaataagcacaaatagcttatattcagatcctatcttcatttgaatatagcttttaaatgaaatgttacagtttgaagttttccttcatgcacttggtgataaacgttttctaaatttttagttaagtatatggataaaaagttatgaactattaaaaatgtgatgtggaccaaaggctaggttgtaatcttgatagtctaaaaaatgatcaaaacaaatgattttcaaggaatattcaatattctgcctttcagaaagtgtatttatatctgtgcttcataaatattaatgttcttcagaacatcattttaaaggagatacttgaattgttatttaaatcaaaccagatgtaaaacactcacatacaagttcatactttaaaagaggaaagctacttaacaatgacaaatatttcacaataataatttttacttatataccatctttcaactgaacatttcagttcttccaagagcttcttagagtagtatattttgggggcagtcaaggaataaactacagtgtaaacatatcccagatgaaaactgctgtatggaaaaatgacagaaagtaactgattgacactgttgattcacagttcagcctcctatctgggaaagacatttctttcctctgctcactttaagaacttttaccgactccaaaaatctcaggaattaaacttttaacagttacagcaataaagaatagttagtactccaaaaatattatatttaagatgctcaacaagaaaaaaatgcaaatgtaatatttttttcaaattacttctttattgacttgtccaaatttcaaaagtgcctaccc

SEQ ID NO: 141709 - DNA, 2920 bp, Homo sapiens
  Payload ID: 7862
  Gene Symbol: HPGD
  Gene Name: hydroxyprostaglandin dehydrogenase 15-(NAD)
  Uniprot ID: P15428
  ENST ID: ENST00000541923
  CDS Start-End: 704-1141
gctttattgtttgcttgttttgttccggagtcggggccgggagggagtgcaggaggagggatccaagcttccaagcctctgctccgctctccttctatccagttggtctttagggcactgaaggaaactcttcttcagaaataaccttttaacttttcttctgtcagctgcctgccaatcacggagccagaggctgaggggaggctttgagccggtctgcgagtccggaaggcaaagatcgcgaagcttggcgctccagaacgctcagggggcaggtgacacagtcgtgggttccccggcgggcgctggcttgacagtttcctccccgcccactggcaggggagcgccccgccgggctgcacgcgcgcgcgcgcaggggggcataaaagccgcggccgcgcggagacgcggagctcgcccaccgcccgccccagcagtggctgcaccatgcacgtgaacggcaaagtggcgctggtgaccggcgcggctcagggcataggcagagcctttgcagaggcgctgctgcttaagggcgccaaggtagcgctggtggattggaatcttgaagcaggtgtacagtgtaaagctgccctggatgagcagtttgaacctcagaagactctgttcatccagtgcgatgtggctgaccagcaacaactgagaggtttctgttatcagtggaacctatcttggtttggattacatgagtaagcaaaatggaggtgaaggcggcatcattatcaatatgtcatctttagcaggactcatgcccgttgcacagcagccggtttattgtgcttcaaagcatggcatagttggattcacacgctcagcagcgttggctgctaatcttatgaacagtggtgtgagactgaatgccatttgtccaggctttgttaacacagccatccttgaatcaattgaaaaagaagaaaacatgggacaatatatagaatataaggatcatatcaaggatatgattaaatactatggaattttggacccaccattgattgccaatggattgataacactcattgaagatgatgctttaaatggtgctattatgaagatcacaacttctaagggaattcattttcaagactatgatacaactccatttcaagcaaaaacccaatgaacagcttatgtgttagccatagctgaaaataagcacaaatagcttatattcagatcctatcttcatttgaatatagcttttaaatgaaatgttacagtttgaagttttccttcatgcacttggtgataaacgttttctaaatttttagttaagtatatggataaaaagttatgaactattaaaaatgtgatgtggaccaaaggctaggttgtaatcttgatagtctaaaaaatgatcaaaacaaatgattttcaaggaatattcaatattctgcctttcagaaagtgtatttatatctgtgcttcataaatattaatgttcttcagaacatcattttaaaggagatacttgaattgttatttaaatcaaaccagatgtaaaacactcacatacaagttcatactttaaaagaggaaagctacttaacaatgacaaatatttcacaataataatttttacttatataccatctttcaactgaacatttcagttcttccaagagcttcttagagtagtatattttgggggcagtcaaggaataaactacagtgtaaacatatcccagatgaaaactgctgtatggaaaaatgacagaaagtaactgattgacactgttgattcacagttcagcctcctatctgggaaagacatttctttcctctgctcactttaagaacttttaccgactccaaaaatctcaggaattaaacttttaacagttacagcaataaagaatagttagtactccaaaaatattatatttaagatgctcaacaagaaaaaaatgcaaatgtaatatttttttcaaattacttctttattgacttgtccaaatttcaaaagtgcctacccttcaataaaacttttttattctgatctccataaattacttagtcttctatgtatagctatcaaggaaataaaaccaattttgccacagccacaactgtaaatgtttttgtacccatgctgaaactcataacaacacagacataaaaatagctgtgaggttttgctttttttgttgtcagctatcttaagaatcattaaatacacctgctttgggtaaaactctttgcaagcagtaattaacactagtaacagtgaaagcacaagatttccaaatcagtcgttttctcaaaaaaatatcgtataagtgactcatcctgtctgctaactccagacctcccagcttgaagccaaatctttccatgtgagattgatatggatttcctagaagtactggaatgttgtcatatcttgccctattttaattctgctatagaaaacaattgccttcacttttaaggagtaatttgaatattaataactctggtctagattttcatataatgtattaaagacaaagtagtgaacatcaatgaacatctgatagagataaactgtaatcaggcataagcttgtttgtatgttctggcagtgactaatcagtaaatgatgtcggtttgcccagtatcacttatcttctgtatttttcctctgtcgtgtaaatagtataaccttttcatttatggacaattttttggactagtagccttcaatatacattctgctttgaattaattttttcaaatcaataaattatgtagacatttaaaatcaaatatcaagtagaattgaaaaatgtgagttacataagttaaaaacttactttaaatcttaccttctataggtagctctaaataaattcatatggttatatggcatctctggtgtatactgattgagaaaataattaaactgaagttaggggagggg

SEQ ID NO: 141710 - DNA, 2786 bp, Homo sapiens
  Payload ID: 7862
  Gene Symbol: HPGD
  Gene Name: hydroxyprostaglandin dehydrogenase 15-(NAD)
  Uniprot ID: P15428
  ENST ID: ENST00000542498
  CDS Start-End: 448-879
gctttattgtttgcttgttttgttccggagtcggggccgggagggagtgcaggaggagggatccaagcttccaagcctctgctccgctctccttctatccagttggtctttagggcactgaaggaaactcttcttcagaaataaccttttaacttttcttctgtcagctgcctgccaatcacggagccagaggctgaggggaggctttgagccggtctgcgagtccggaaggcaaagatcgcgaagcttggcgctccagaacgctcagggggcaggtgacacagtcgtgggttccccggcgggcgctggcttgacagtttcctccccgcccactggcaggggagcgccccgccgggctgcacgcgcgcgcgcgcaggggggcataaaagccgcggccgcgcggagacgcggagctcgcccaccgcccgccccagcagtggctgcaccatgcacgtgaacggcaaagtggcgctggtgaccggcgcggctcagggcataggcagagcctttgcagaggcgctgctgcttaagggcgccaaggtagcgctggtggattggaatcttgaagcaggtgtacagtgtaaagctgccctggatgagcagtttgaacctcagaagactctgttcatccagtgcgatgtggctgaccagcaacaactgagagacacttttagaaaagttgtagaccactttggaagactggacattttggtcaataatgctggagtgaataatgagaaaaactgggaaaaaactctgcaaattaatttggtttctgttatcagtggaacctatcttggtttggattacatgagtaagcaaaatggaggtgaaggcggcatcattatcaatatgtcatctttagcagcccaccattgattgccaatggattgataacactcattgaagatgatgctttaaatggtgctattatgaagatcacaacttctaagggaattcattttcaagactatgatacaactccatttcaagcaaaaacccaatgaacagcttatgtgttagccatagctgaaaataagcacaaatagcttatattcagatcctatcttcatttgaatatagcttttaaatgaaatgttacagtttgaagttttccttcatgcacttggtgataaacgttttctaaatttttagttaagtatatggataaaaagttatgaactattaaaaatgtgatgtggaccaaaggctaggttgtaatcttgatagtctaaaaaatgatcaaaacaaatgattttcaaggaatattcaatattctgcctttcagaaagtgtatttatatctgtgcttcataaatattaatgttcttcagaacatcattttaaaggagatacttgaattgttatttaaatcaaaccagatgtaaaacactcacatacaagttcatactttaaaagaggaaagctacttaacaatgacaaatatttcacaataataatttttacttatataccatctttcaactgaacatttcagttcttccaagagcttcttagagtagtatattttgggggcagtcaaggaataaactacagtgtaaacatatcccagatgaaaactgctgtatggaaaaatgacagaaagtaactgattgacactgttgattcacagttcagcctcctatctgggaaagacatttctttcctctgctcactttaagaacttttaccgactccaaaaatctcaggaattaaacttttaacagttacagcaataaagaatagttagtactccaaaaatattatatttaagatgctcaacaagaaaaaaatgcaaatgtaatatttttttcaaattacttctttattgacttgtccaaatttcaaaagtgcctacccttcaataaaacttttttattctgatctccataaattacttagtcttctatgtatagctatcaaggaaataaaaccaattttgccacagccacaactgtaaatgtttttgtacccatgctgaaactcataacaacacagacataaaaatagctgtgaggttttgctttttttgttgtcagctatcttaagaatcattaaatacacctgctttgggtaaaactctttgcaagcagtaattaacactagtaacagtgaaagcacaagatttccaaatcagtcgttttctcaaaaaaatatcgtataagtgactcatcctgtctgctaactccagacctcccagcttgaagccaaatctttccatgtgagattgatatggatttcctagaagtactggaatgttgtcatatcttgccctattttaattctgctatagaaaacaattgccttcacttttaaggagtaatttgaatattaataactctggtctagattttcatataatgtattaaagacaaagtagtgaacatcaatgaacatctgatagagataaactgtaatcaggcataagcttgtttgtatgttctggcagtgactaatcagtaaatgatgtcggtttgcccagtatcacttatcttctgtatttttcctctgtcgtgtaaatagtataaccttttcatttatggacaattttttggactagtagccttcaatatacattctgctttgaattaattttttcaaatcaataaattatgtagacatttaaaatcaaatatcaagtagaattgaaaaatgtgagttacataagttaaaaacttactttaaatcttaccttctataggtagctctaaataaattcatatggttatatggcatctctggtgtatactgattgagaaaataattaaactgaagttaggggagggg

SEQ ID NO: 141711 - DNA, 1265 bp, Homo sapiens
  Payload ID: 7863
  Gene Symbol: HYI
  Gene Name: hydroxypyruvate isomerase (putative)
  Uniprot ID: Q5T013
  ENST ID: ENST00000372425
  CDS Start-End: 197-1030
gtgatccctctctcgctaaccgtaggcgcttttcgtgaaggcccgggtttttacagcacttcgcttttctaaccacgaacagtgctcgttcgttcgcagggccagcaaggagagccccgcccccgcccgccgcccgccgcccgccgcccgccgcctttggatcccgcggactccgcccggcccggcctccccaggcatggcgccgctgcgcttctccgccaatctgtcctggctattccccgagctctccggcctccccgcgcgggtgcgggccgcgggcagctcgggcttcgaggccgtcgaggtggcctggccgtacgcggagacgcctgaggcgctggcgcgcgccgcgcgagaagcggggctgcggcttgtactgatcaacacgcccccgggagaccaagagaagggggaaatggggctgggggccgtccccgggagacaggcggccttccgagagggactggagcaggccgtgcggtatgccaaagccctgggctgtcccaggatccacctgatggctggccgagtaccccagggagctgatcgaatagcagtcaaggctgagatggaggccgtttttctggagaacctgaggcatgcagctggggttttggctcaggaggacctcgtgggactgctggagcccatcaacacccgcatcactgacccccagtacttcctggacacgccccagcaggcggcagccatcttacagaaggtaggaagacccaacctccaattacaaatggacatattccactggcagatcatggatgggaacctgacaggaaacatccgggagttcctgcccattgttgggcatgtgcaggtggcacaggtcccaggccgaggggagcccagcagccccggagagctgaatttcccctatctgtttcaactgctggaagatgaaggctacaaaggcttcgtgggctgtgagtatcagcctcgaggagacacagtagagggcttgagttggctacgttcatactgggataggcggggccacccagaggctggccagtgagggcccgcacaccacccacgtgcctccagacagcgagtgacatcccatctcctcctctgcattaaagatgacctgctgaacattgtcatatgtctctgtaatggggtggtgggacacatagtgtctaacacttcagtttctctgctgcttccctcccattgagaagccagtgccagggttgctgtgaagatgggagagcttctgaacccacctcattaaaggatgagaaacccag

SEQ ID NO: 141712 - DNA, 796 bp, Homo sapiens
  Payload ID: 7863
  Gene Symbol: HYI
  Gene Name: hydroxypyruvate isomerase (putative)
  ENST ID: ENST00000372430
  CDS Start-End: 1-716
cgtacgcggagacgcctgaggcgctggcgcgcgccgcgcgagaagcggggctgcggcttgtactgatcaacacgcccccgggagaccaagagaagggggaaatggggctgggggccgtccccgggagacaggcggccttccgagagggactggagcaggccgtgcggtatgccaaagccctgggctgtcccaggatccacctgatggctggccgagtaccccagggagctgatcgaatagcagtcaaggctgagatggaggccgtttttctggagaacctgaggcatgcagctggggttttggctcaggaggacctcgtgggactgctggagcccatcaacacccgcatcactgacccccagtacttcctggacacgccccagcaggcggcagccatcttacagaaggtaggaagacccaacctccaattacaaatggacatattccactggcagatcatggatgggaacctgacaggaaacatccgggagttcctgcccattgttgggcatgtgcaggtggcacaggtcccaggccgaggggagcccagcagccccggagagctgaatttcccctatctgtttcaactgctggaagatgaaggctacaaaggcttcgtgggctgtgagtatcagcctcgaggagacacagtagagggcttgagttggctacgttcatactgggataggcggggccacccagaggctggccagtgagggcccgcacaccacccacgtgcctccagacagcgagtgacatcccatctcctcctctgcattaaagatgacctgctgaa

SEQ ID NO: 141713 - DNA, 1066 bp, Homo sapiens
  Payload ID: 7863
  Gene Symbol: HYI
  Gene Name: hydroxypyruvate isomerase (putative)
  Uniprot ID: Q5T013
  ENST ID: ENST00000372432
  CDS Start-End: 171-914
cgcttttcgtgaaggcccgggtttttacagcacttcgcttttctaaccacgaacagtgctcgttcgttcgcagggccagcaaggagagccccgcccccgcccgccgcccgccgcccgccgcccgccgcctttggatcccgcggactccgcccggcccggcctccccaggcatggcgccgctgcgcttctccgccaatctgtcctggctattccccgagctctccggcctccccgcgcgggtgcgggccgcgggcagctcgggcttcgaggccgtcgaggtggcctggccgtacgcggagacgcctgaggcgctggcgcgcgccgcgcgagaagcggggctgcggcttgtactgatcaacacgcccccgggagaccaagagaagggggaaatggggctgggggccgtccccgggagacaggcggccttccgagagggactggagcaggccgtgcggtatgccaaagccctgggctgtcccaggatccacctgatggctggccgagtaccccagggagctgatcgaatagcagtcaaggctgagatggaggccgtttttctggagaacctgaggcatgcagctggggttttggctcaggaggacctcgtgggactgctggagcccatcaacacccgcatcactgacccccagtacttcctggacacgccccagcaggcggcagccatcttacagaaggtaggaagacccaacctccaattacaaatggacatattccactggcagatcatggatgggaacctgacaggaaacatccgggagttcctgcccattgttgggcatgtgcaggtggcacaggtcccaggccgaggggagcccagcagccccggagagctgaatttcccctatctgtttcaactgctggaagatgaaggctacaaaggcttcgtgggctgagacacagtagagggcttgagttggctacgttcatactgggataggcggggccacccagaggctggccagtgagggcccgcacaccacccacgtgcctccagacagcgagtgacatcccatctcctcctctgcattaaagatgacctgctgaa

SEQ ID NO: 141714 - DNA, 796 bp, Homo sapiens
  Payload ID: 7863
  Gene Symbol: HYI
  Gene Name: hydroxypyruvate isomerase (putative)
  ENST ID: ENST00000372433
  CDS Start-End: 1-640
cgcgggcagctcgggcttcgaggccgtcgaggtggcctggccgtacgcggagacgcctgaggcgctggcgcgcgccgcgcgagaagcggggctgcggcttgtactgatcaacacgcccccgggagaccaagagaagggggaaatggggctgggggccgtccccgggagacaggcggccttccgagagggactggagcaggccgtgcggatccacctgatggctggccgagtaccccagggagctgatcgaatagcagtcaaggctgagatggaggccgtttttctggagaacctgaggcatgcagctggggttttggctcaggaggacctcgtgggactgctggagcccatcaacacccgcatcactgacccccagtacttcctggacacgccccagcaggcggcagccatcttacagaaggtaggaagacccaacctccaattacaaatggacatattccactggcagatcatggatgggaacctgacaggaaacatccgggagttcctgcccattgttgggcatgtgcaggtggcacaggtcccaggccgaggggagcccagcagccccggagagctgaatttcccctatctgtttcaactgctggaagatgaaggctacaaaggcttcgtgggctgagacacagtagagggcttgagttggctacgttcatactgggataggcggggccacccagaggctggccagtgagggcccgcacaccacccacgtgcctccagacagcgagtgacatcccatctcctcctctgcattaaagatgacctgctgaacatt

SEQ ID NO: 141715 - DNA, 1025 bp, Homo sapiens
  Payload ID: 7863
  Gene Symbol: HYI
  Gene Name: hydroxypyruvate isomerase (putative)
  ENST ID: ENST00000372434
  CDS Start-End: 33-941
cgcggactccgcccggcccggcctccccaggcatggcgccgctgcgcttctccgccaatctgtcctggctattccccgagctctccggcctccccgcgcgggtgcgggccgcgggcagctcgggcttcgaggccgtcgaggtggcctggccgtacgcggagacgcctgaggcgctggcgcgcgccgcgcgagaagcggggctgcggcttgtactgatcaacacgcccccgggagaccaagagaagggggaaatggggctgggggccgtccccgggagacaggcggccttccgagagggactggagcaggccgtgcggagtgggcattgcttgatgggcaggaagttgagtgttccttgcaagggtgctgtggcaagaggaggcctggtgtatttggcagcgttcctgaggctggacatgatccacctgatggctggccgagtaccccagggagctgatcgaatagcagtcaaggctgagatggaggccgtttttctggagaacctgaggcatgcagctggggttttggctcaggaggacctcgtgggactgctggagcccatcaacacccgcatcactgacccccagtacttcctggacacgccccagcaggcggcagccatcttacagaaggtaggaagacccaacctccaattacaaatggacatattccactggcagatcatggatgggaacctgacaggaaacatccgggagttcctgcccattgttgggcatgtgcaggtggcacaggtcccaggccgaggggagcccagcagccccggagagctgaatttcccctatctgtttcaactgctggaagatgaaggctacaaaggcttcgtgggctgtgagtatcagcctcgaggagacacagtagagggcttgagttggctacgttcatactgggataggcggggccacccagaggctggccagtgagggcccgcacaccacccacgtgcctccagacagcgagtgacatcccatctcctcctctgcattaaagatgacctgctgaacatt

SEQ ID NO: 141716 - DNA, 905 bp, Homo sapiens
  Payload ID: 7863
  Gene Symbol: HYI
  Gene Name: hydroxypyruvate isomerase (putative)
  ENST ID: ENST00000486909
  CDS Start-End: 56-886
cgccgcccgccgcctttggatcccgcggactccgcccggcccggcctccccaggcatggcgccgctgcgcttctccgccaatctgtcctggctattccccgagctctccggcctccccgcgcgggtgcgggccgcgggcagctcgggcttcgaggccgtcgaggtggcctggccgtacgcggagacgcctgaggcgctggcgcgcgccgcgcgagaagcggggctgcggcttgtactgatcaacacgcccccgggagaccaagagaagggggaaatggggctgggggccgtccccgggagacaggcggccttccgagagggactggagcaggccgtgcggtatgccaaagccctgggctgtcccaggatccacctgatggctggccgagtaccccagggagctgatcgaatagcagtcaaggctgagatggaggccgtttttctggagaacctgaggcatgcagctggggttttggctcaggaggacctcgtgggactgctggagcccatcaacacccgcatcactgacccccagtacttcctggacacgccccagcaggcggcagccatcttacagaaggtaggaagacccaacctccaattacaaatggacatattccactggcagatcatggatgggaacctgacaggaaacatccgggagttcctgcccattgttgggcatgtgcaggtggcacaggtcccaggccgaggggagcccagcagccccggagagctgaatttcccctatctgtttcaactgctggaagatgaaggctacaaaggcttcgtgggctgtgagtatcagcctcgaggtgaggcgtggccctggggaagggagctctggagggacccggacaggggctgttttctccttgtgggctgaggtgccgaggcctccctct

SEQ ID NO: 141717 - DNA, 637 bp, Homo sapiens
  Payload ID: 7863
  Gene Symbol: HYI
  Gene Name: hydroxypyruvate isomerase (putative)
  ENST ID: ENST00000487366
  CDS Start-End: 1-485
gggccgtccccgggagacaggcggccttccgagagggactggagcaggccgtgcggtatgccaaagccctgggctgtcccaggatccacctgatggctggccgagtaccccagggagctgatcgaatagcagtcaaggctgagatggaggccgtttttctggagaacctgaggcatgcagctggggttttggctcaggaggacctcgtgggactgctggagcccatcaacacccgcatcactgacccccagtacttcctggacacgccccagcaggcggcagccatcttacagaaggacatattccactggcagatcatggatgggaacctgacaggaaacatccgggagttcctgcccattgttgggcatgtgcaggtggcacaggtcccaggccgaggggagcccagcagccccggagagctgaatttcccctatctgtttcaactgctggaagatgaaggctacaaaggcttcgtgggctgagacacagtagagggcttgagttggctacgttcatactgggataggcggggccacccagaggctggccagtgagggcccgcacaccacccacgtgcctccagacagcgagtgacatcccatctcctcctctgcattaaagatgacctgctgaa

SEQ ID NO: 141718 - DNA, 640 bp, Homo sapiens
  Payload ID: 7863
  Gene Symbol: HYI
  Gene Name: hydroxypyruvate isomerase (putative)
  ENST ID: ENST00000470662
  CDS Start-End: 1-560
gacaggcggccttccgagagggactggagcaggccgtgcggtatgccaaagccctgggctgtcccaggatccacctgatggctggccgagtaccccagggagctgatcgaatagcagtcaaggctgagatggaggccgtttttctggagaacctgaggcatgcagctggggttttggctcaggaggacctcgtgggactgctggagcccatcaacacccgcatcactgacccccagtacttcctggacacgccccagcaggcggcagccatcttacagaaggacatattccactggcagatcatggatgggaacctgacaggaaacatccgggagttcctgcccattgttgggcatgtgcaggtggcacaggtcccaggccgaggggagcccagcagccccggagagctgaatttcccctatctgtttcaactgctggaagatgaaggctacaaaggcttcgtgggctgtgagtatcagcctcgaggagacacagtagagggcttgagttggctacgttcatactgggataggcggggccacccagaggctggccagtgagggcccgcacaccacccacgtgcctccagacagcgagtgacatcccatctcctcctctgcattaaagatgacctgctgaa

SEQ ID NO: 141719 - DNA, 1322 bp, Homo sapiens
  Payload ID: 7863
  Gene Symbol: HYI
  Gene Name: hydroxypyruvate isomerase (putative)
  ENST ID: ENST00000583037
  CDS Start-End: 197-1015
gtgatccctctctcgctaaccgtaggcgcttttcgtgaaggcccgggtttttacagcacttcgcttttctaaccacgaacagtgctcgttcgttcgcagggccagcaaggagagccccgcccccgcccgccgcccgccgcccgccgcccgccgcctttggatcccgcggactccgcccggcccggcctccccaggcatggcgccgctgcgcttctccgccaatctgtcctggctattccccgagctctccggcctccccgcgcgggtgcgggccgcgggcagctcgggcttcgaggccgtcgaggtggcctggccgtacgcggagacgcctgaggcgctggcgcgcgccgcgcgagaagcggggctgcggcttgtactgatcaacacgcccccgggagaccaagagaagggggaaatggggctgggggccgtccccgggagacaggcggccttccgagagggactggagcaggccgtgcggagtgggcattgcttgatgggcaggaagttgagtgttccttgcaagggtgctgtggcaagaggaggcctggtgtatttggcagcgttcctgaggctggacatgatccacctgatggctggccgagtaccccagggagctgatcgaatagcagtcaaggctgagatggaggccgtttttctggagaacctgaggcatgcagctggggttttggctcaggaggacctcgtgggactgctggagcccatcaacacccgcatcactgacccccagtacttcctggacacgccccagcaggcggcagccatcttacagaaggtaggaagacccaacctccaattacaaatggacatattccactggcagatcatggatgggaacctgacaggaaacatccgggagttcctgcccattgttgggcatgtgcaggtggcacaggtcccaggccgaggggagcccagcagccccggagagctgaatttcccctatctgtttcaactgctggaagatgaaggctacaaaggcttcgtgggctgagacacagtagagggcttgagttggctacgttcatactgggataggcggggccacccagaggctggccagtgagggcccgcacaccacccacgtgcctccagacagcgagtgacatcccatctcctcctctgcattaaagatgacctgctgaacattgtcatatgtctctgtaatggggtggtgggacacatagtgtctaacacttcagtttctctgctgcttccctcccattgagaagccagtgccagggttgctgtgaagatgggagagcttctgaacccacctcattaaaggatgagaaacccag

SEQ ID NO: 141720 - DNA, 901 bp, Homo sapiens
  Payload ID: 7864
  Gene Symbol: HSD11B1
  Gene Name: hydroxysteroid (11-beta) dehydrogenase 1
  ENST ID: ENST00000261465
  CDS Start-End: 66-901
ttgttcgaaatcttgaggttctctctgtgtgtcctacaggagtcttcaggccagctccctgtcggatggcttttatgaaaaaatatctcctccccattctggggctcttcatggcctactactactattctgcaaacgaggaattcagaccagagatgctccaaggaaagaaagtgattgtcacaggggccagcaaagggatcggaagagagatggcttatcatctggcgaagatgggagcccatgtggtggtgacagcgaggtcaaaagaaactctacagaaggtggtatcccactgcctggagcttggagcagcctcagcacactacattgctggcaccatggaagacatgaccttcgcagagcaatttgttgcccaagcaggaaagctcatgggaggactagacatgctcattctcaaccacatcaccaacacttctttgaatctttttcatgatgatattcaccatgtgcgcaaaagcatggaagtcaacttcctcagttacgtggtcctgactgtagctgccttgcccatgctgaagcagagcaatggaagcattgttgtcgtctcctctctggctgggaaagtggcttatccaatggttgctgcctattctgcaagcaagtttgctttggatgggttcttctcctccatcagaaaggaatattcagtgtccagggtcaatgtatcaatcactctctgtgttcttggcctcatagacacagaaacagccatgaaggcagtttctgggatagtccatatgcaagcagctccaaaggaggaatgtgccctggagatcatcaaagggggagctctgcgccaagaagaagtgtattatgacagctcactctggaccactcttctgatcagaaatccatgcaggaagatcctggaatttct

SEQ ID NO: 141721 - DNA, 1405 bp, Homo sapiens
  Payload ID: 7864
  Gene Symbol: HSD11B1
  Gene Name: hydroxysteroid (11-beta) dehydrogenase 1
  Uniprot ID: P28845
  ENST ID: ENST00000367027
  CDS Start-End: 98-976
acaattcagaggctgctgcctgcttaggaggttgtagaaagctctgtaggttctctctgtgtgtcctacaggagtcttcaggccagctccctgtcggatggcttttatgaaaaaatatctcctccccattctggggctcttcatggcctactactactattctgcaaacgaggaattcagaccagagatgctccaaggaaagaaagtgattgtcacaggggccagcaaagggatcggaagagagatggcttatcatctggcgaagatgggagcccatgtggtggtgacagcgaggtcaaaagaaactctacagaaggtggtatcccactgcctggagcttggagcagcctcagcacactacattgctggcaccatggaagacatgaccttcgcagagcaatttgttgcccaagcaggaaagctcatgggaggactagacatgctcattctcaaccacatcaccaacacttctttgaatctttttcatgatgatattcaccatgtgcgcaaaagcatggaagtcaacttcctcagttacgtggtcctgactgtagctgccttgcccatgctgaagcagagcaatggaagcattgttgtcgtctcctctctggctgggaaagtggcttatccaatggttgctgcctattctgcaagcaagtttgctttggatgggttcttctcctccatcagaaaggaatattcagtgtccagggtcaatgtatcaatcactctctgtgttcttggcctcatagacacagaaacagccatgaaggcagtttctgggatagtccatatgcaagcagctccaaaggaggaatgtgccctggagatcatcaaagggggagctctgcgccaagaagaagtgtattatgacagctcactctggaccactcttctgatcagaaatccatgcaggaagatcctggaatttctctactcaacgagctataatatggacagattcataaacaagtaggaactccctgagggctgggcatgctgagggattttgggactgttctgtctcatgtttatctgagctcttatctatgaagacatcttcccagagtgtccccagagacatgcaagtcatgggtcacacctgacaaatggaaggagttcctctaacatttgcaaaatggaaatgtaataataatgaatgtcatgcaccgctgcagccagcagttgtaaaattgttagtaaacataggtataattaccagatagttatattaaatttatatcttatatataataatatgtgatgattaatacaatattaattataataaaggtcacataaactttataaattcataactggtagctataacttgagcttattcaggatggtttctttaaaaccataaactgtacaaatgaaatttttcaatatttgtttctta

SEQ ID NO: 141722 - DNA, 1461 bp, Homo sapiens
  Payload ID: 7864
  Gene Symbol: HSD11B1
  Gene Name: hydroxysteroid (11-beta) dehydrogenase 1
  Uniprot ID: P28845
  ENST ID: ENST00000367028
  CDS Start-End: 155-1033
gagatgaaacagaaggaaaggcagaggaggagggagagagagagaagagaagaaaaagaaaaaagaacatcaataaaaagaagtcagatttgttcgaaatcttgaggttctctctgtgtgtcctacaggagtcttcaggccagctccctgtcggatggcttttatgaaaaaatatctcctccccattctggggctcttcatggcctactactactattctgcaaacgaggaattcagaccagagatgctccaaggaaagaaagtgattgtcacaggggccagcaaagggatcggaagagagatggcttatcatctggcgaagatgggagcccatgtggtggtgacagcgaggtcaaaagaaactctacagaaggtggtatcccactgcctggagcttggagcagcctcagcacactacattgctggcaccatggaagacatgaccttcgcagagcaatttgttgcccaagcaggaaagctcatgggaggactagacatgctcattctcaaccacatcaccaacacttctttgaatctttttcatgatgatattcaccatgtgcgcaaaagcatggaagtcaacttcctcagttacgtggtcctgactgtagctgccttgcccatgctgaagcagagcaatggaagcattgttgtcgtctcctctctggctgggaaagtggcttatccaatggttgctgcctattctgcaagcaagtttgctttggatgggttcttctcctccatcagaaaggaatattcagtgtccagggtcaatgtatcaatcactctctgtgttcttggcctcatagacacagaaacagccatgaaggcagtttctgggatagtccatatgcaagcagctccaaaggaggaatgtgccctggagatcatcaaagggggagctctgcgccaagaagaagtgtattatgacagctcactctggaccactcttctgatcagaaatccatgcaggaagatcctggaatttctctactcaacgagctataatatggacagattcataaacaagtaggaactccctgagggctgggcatgctgagggattttgggactgttctgtctcatgtttatctgagctcttatctatgaagacatcttcccagagtgtccccagagacatgcaagtcatgggtcacacctgacaaatggaaggagttcctctaacatttgcaaaatggaaatgtaataataatgaatgtcatgcaccgctgcagccagcagttgtaaaattgttagtaaacataggtataattaccagatagttatattaaatttatatcttatatataataatatgtgatgattaatacaatattaattataataaaggtcacataaactttataaattcataactggtagctataacttgagcttattcaggatggtttctttaaaaccataaactgtacaaatgaaatttttcaatatttgtttctt

SEQ ID NO: 141723 - DNA, 681 bp, Homo sapiens
  Payload ID: 7864
  Gene Symbol: HSD11B1
  Gene Name: hydroxysteroid (11-beta) dehydrogenase 1
  ENST ID: ENST00000615289
  CDS Start-End: 135-681
gagagatgaaacagaaggaaaggcagaggaggagggagagagagagaagagaagaaaaagaaaaaagaacatcaataaaaagaagtcagatttgttcgaaatcttgaggagtcttcaggccagctccctgtcggatggcttttatgaaaaaatatctcctccccattctggggctcttcatggcctactactactattctgcaaacgaggaattcagaccagagatgctccaaggaaagaaagtgattgtcacaggggccagcaaagggatcggaagagagatggcttatcatctggcgaagatgggagcccatgtggtggtgacagcgaggtcaaaagaaactctacagaaggtggtatcccactgcctggagcttggagcagcctcagcacactacattgctggcaccatggaagacatgaccttcgcagagcaatttgttgcccaagcaggaaagctcatgggaggactagacatgctcattctcaaccacatcaccaacacttctttgaatctttttcatgatgatattcaccatgtgcgcaaaagcatggaagtcaacttcctcagttacgtggtcctgactgtagctgccttgcccatgctgaagcagagcaatggaagcattgttgtcgtctcctctctggctgggaaagtggcttatccaatggttgctgcct

SEQ ID NO: 141724 - DNA, 1457 bp, Homo sapiens
  Payload ID: 7865
  Gene Symbol: HSD11B1L
  Gene Name: hydroxysteroid (11-beta) dehydrogenase 1-like
  Uniprot ID: Q7Z5J1
  ENST ID: ENST00000301382
  CDS Start-End: 263-880
cctgctgggaggcgaagaccaggcgggcactgttgcccggcgacgctccggcgctgggtccccgaggcccggcccctccccgggaggaggtgggcttcgagtcacgtgacccgtgccctacgggagggggtgcggtcggggacccggcaggaggcggccgagaagagaggaccgtgggggcgttcgcgtggctcccagcccgggaccccacccccgctggacagtgggggaaactgaggcctgagcgggcccacacaggaccatgaaggtgcttctcctcacagggctgggggccctgttcttcgcctattattgggatgacaacttcgacccaggcgggctggactacctcgtgctgaaccacatcggcggcgccccggccggcacgcgagcccgcagcccccaggcaactcgctggctcatgcaggtaaactttgtgagctacgtgcaactgacgtcgcgggcgctgcccagcctgacggacagcaagggctccctggtggtggtgtcctcgctgctcggccgcgtgcccacgtcgttctccactccctactcggcggccaagtttgcgctggacggcttcttcggctccctgcggcgggagctggacgtgcaggacgtgaacgtggccatcaccatgtgcgtcctgggcctccgagatcgcgcctccgccgccgaggcagtcaggggagtcacgagggtcaaggcggccccggggcccaaggcagccctggccgtgatccgcggcggcgccacgcgcgcggccggcgtcttctacccgtggcgtttccgcctgctgtgcttgctccggcgctggctaccgcgcccgcgggcctggtttatccgccaggagctcaacgtcacggccgcggcagcctgagcaccggggggtgcccctccagtcccagacggcaatgttcctccctccaactgtccctggagccagaacactcacagagacacccctgagagggtggccacagcccaagatgaagtcatcaagacagaaaagcaaaaccgagaaaaacgacgggcacctggaaccagtcacggcttgggaggtgcaggtgccccgtgttaggcgcctttgtcggggacttgcaaggcctcacctgtttggccatgattgatgacgtgactgcttccattttgcagatgaggaaactaaggctcagagaggccacgccacccttgagccacccatggacccctctccatctcctgcctgcgcctttaagtccctgatttattctttccattcattccatctgggaggaacccccccaactcctgccagcttcccctagctggggtctctggtactcttcacacctgcaggggcgtctacactgttcgtctacctggtggcagggtctgagcgggaggaggagggaaagagtgtgttctgagctggacccagcctcttgttcgagaataaaaactcttcttctcttgca

SEQ ID NO: 141725 - DNA, 1660 bp, Homo sapiens
  Payload ID: 7865
  Gene Symbol: HSD11B1L
  Gene Name: hydroxysteroid (11-beta) dehydrogenase 1-like
  Uniprot ID: Q7Z5J1
  ENST ID: ENST00000339423
  CDS Start-End: 223-1083
cgacgctccggcgctgggtccccgaggcccggcccctccccgggaggaggtgggcttcgagtcacgtgacccgtgccctacgggagggggtgcggtcggggacccggcaggaggcggccgagaagagaggaccgtgggggcgttcgcgtggctcccagcccgggaccccacccccgctggacagtgggggaaactgaggcctgagcgggcccacacaggaccatgaaggtgcttctcctcacagggctgggggccctgttcttcgcctattattgggatgacaacttcgacccagccagcctccagggagcgcgagtgctgctgacaggggccaacgctggtgttggtgaggagctggcctatcactacgcgcgtctgggctcccacctggtgctcactgcccacactgaggctctcctgcagaaggtggtagggaactgccggaagctgggcgcccccaaggtcttctacatcgcggcggacatggcctcccctgaggcgcccgagagcgtggtgcagtttgcgctggacaagctgggcgggctggactacctcgtgctgaaccacatcggcggcgccccggccggcacgcgagcccgcagcccccaggcaactcgctggctcatgcaggtaaactttgtgagctacgtgcaactgacgtcgcgggcgctgcccagcctgacggacagcaagggctccctggtggtggtgtcctcgctgctcggccgcgtgcccacgtcgttctccactccctactcggcggccaagtttgcgctggacggcttcttcggctccctgcggcgggagctggacgtgcaggacgtgaacgtggccatcaccatgtgcgtcctgggcctccgagatcgcgcctccgccgccgaggcagtcaggggagtcacgagggtcaaggcggccccggggcccaaggcagccctggccgtgatccgcggcggcgccacgcgcgcggccggcgtcttctacccgtggcgtttccgcctgctgtgcttgctccggcgctggctaccgcgcccgcgggcctggtttatccgccaggagctcaacgtcacggccgcggcagcctgagcaccggggggtgcccctccagtcccagacggcaatgttcctccctccaactgtccctggagccagaacactcacagagacacccctgagagggtggccacagcccaagatgaagtcatcaagacagaaaagcaaaaccgagaaaaacgacgggcacctggaaccagtcacggcttgggaggtgcaggtgccccgtgttaggcgcctttgtcggggacttgcaaggcctcacctgtttggccatgattgatgacgtgactgcttccattttgcagatgaggaaactaaggctcagagaggccacgccacccttgagccacccatggacccctctccatctcctgcctgcgcctttaagtccctgatttattctttccattcattccatctgggaggaacccccccaactcctgccagcttcccctagctggggtctctggtactcttcacacctgcaggggcgtctacactgttcgtctacctggtggcagggtctgagcgggaggaggagggaaagagtgtgttctgagctggacccagcctcttgttcgagaataaaaactcttcttctcttgca

SEQ ID NO: 141726 - DNA, 1620 bp, Homo sapiens
  Payload ID: 7865
  Gene Symbol: HSD11B1L
  Gene Name: hydroxysteroid (11-beta) dehydrogenase 1-like
  Uniprot ID: Q7Z5J1
  ENST ID: ENST00000342970
  CDS Start-End: 444-1043
accaggcgggcactgttgcccggcgacgctccggcgctgggtccccgaggcccggcccctccccgggaggaggtgggcttcgagtcacgtgacccgtgccctacgggagggggtgcggtcggggacccggcaggaggcggccgagaagagaggaccgtgggggcgttcgcgtggctcccagcccgggaccccacccccgctggacagtgggggaaactgaggcctgagcggagtgaccaccccggctatggccagccagcctccagggagcgcgagtgctgctgacaggggccaacgctggtgttggtgaggagctggcctatcactacgcgcgtctgggctcccacctggtgctcactgcccacactgaggctctcctgcagaaggtggtagggaactgccggaagctgggcgcccccaaggtcttctacatcgcggcggacatggcctcccctgaggcgcccgagagcgtggtgcagtttgcgctggacaagctgggcgggctggactacctcgtgctgaaccacatcggcggcgccccggccggcacgcgagcccgcagcccccaggcaactcgctggctcatgcaggtaaactttgtgagctacgtgcaactgacgtcgcgggcgctgcccagcctgacggacagcaagggctccctggtggtggtgtcctcgctgctcggccgcgtgcccacgtcgttctccactccctactcggcggccaagtttgcgctggacggcttcttcggctccctgcggcgggagctggacgtgcaggacgtgaacgtggccatcaccatgtgcgtcctgggcctccgagatcgcgcctccgccgccgaggcagtcaggggagtcacgagggtcaaggcggccccggggcccaaggcagccctggccgtgatccgcggcggcgccacgcgcgcggccggcgtcttctacccgtggcgtttccgcctgctgtgcttgctccggcgctggctaccgcgcccgcgggcctggtttatccgccaggagctcaacgtcacggccgcggcagcctgagcaccggggggtgcccctccagtcccagacggcaatgttcctccctccaactgtccctggagccagaacactcacagagacacccctgagagggtggccacagcccaagatgaagtcatcaagacagaaaagcaaaaccgagaaaaacgacgggcacctggaaccagtcacggcttgggaggtgcaggtgccccgtgttaggcgcctttgtcggggacttgcaaggcctcacctgtttggccatgattgatgacgtgactgcttccattttgcagatgaggaaactaaggctcagagaggccacgccacccttgagccacccatggacccctctccatctcctgcctgcgcctttaagtccctgatttattctttccattcattccatctgggaggaacccccccaactcctgccagcttcccctagctggggtctctggtactcttcacacctgcaggggcgtctacactgttcgtctacctggtggcagggtctgagcgggaggaggagggaaagagtgtgttctgagctggacccagcctcttgttcgagaataaaaactcttcttctcttgca

SEQ ID NO: 141727 - DNA, 1362 bp, Homo sapiens
  Payload ID: 7865
  Gene Symbol: HSD11B1L
  Gene Name: hydroxysteroid (11-beta) dehydrogenase 1-like
  Uniprot ID: Q7Z5J1
  ENST ID: ENST00000411793
  CDS Start-End: 490-1035
cctgctgggaggcgaagaccaggcgggcactgttgcccggcgacgctccggcgctgggtccccgaggcccggcccctccccgggaggaggtgggcttcgagtcacgtgacccgtgccctacgggagggggtgcggtcggggacccggcaggaggcggccgagaagagaggaccgtgggggcgttcgcgtggctcccagcccgggaccccacccccgctggacagtgggggaaactgaggcctgagcggagtgaccaccccggctatggccagccagcctccagggagcgcgagtgctgctgacaggggccaacgctggtgttggtgaggagctggcctatcactacgcgcgtctgggctcccacctggtgctcactgcccacactgaggctctcctgcagaaggcgggctggactacctcgtgctgaaccacatcggcggcgccccggccggcacgcgagcccgcagcccccaggcaactcgctggctcatgcaggtaaactttgtgagctacgtgcaactgacgtcgcgggcgctgcccagcctgacggacagcaagggctccctggtggtggtgtcctcgctgctcggccgcgtgcccacgtcgttctccactccctactcggcggccaagtttgcgctggacggcttcttcggctccctgcggcgggagctggacgtgcaggacgtgaacgtggccatcaccatgtgcgtcctgggcctccgagatcgcgcctccgccgccgaggcagtcaggagctcaacgtcacggccgcggcagcctgagcaccggggggtgcccctccagtcccagacggcaatgttcctccctccaactgtccctggagccagaacactcacagagacacccctgagagggtggccacagcccaagatgaagtcatcaagacagaaaagcaaaaccgagaaaaacgacgggcacctggaaccagtcacggcttgggaggtgcaggtgccccgtgttaggcgcctttgtcggggacttgcaaggcctcacctgtttggccatgattgatgacgtgactgcttccattttgcagatgaggaaactaaggctcagagaggccacgccacccttgagccacccatggacccctctccatctcctgcctgcgcctttaagtccctgatttattctttccattcattccatctgggaggaacccccccaactcctgccagcttcccctagctggggtctctggtactcttcacacctgcaggggcgtctacactgttcgtctacctggtggcagggtctgagcgggaggaggagggaaagagtgtgttctgagctggacccagcctcttgttcgagaataaaaactcttcttctcttgca

SEQ ID NO: 141728 - DNA, 1525 bp, Homo sapiens
  Payload ID: 7865
  Gene Symbol: HSD11B1L
  Gene Name: hydroxysteroid (11-beta) dehydrogenase 1-like
  Uniprot ID: Q7Z5J1
  ENST ID: ENST00000423665
  CDS Start-End: 251-1198
cgaagaccaggcgggcactgttgcccggcgacgctccggcgctgggtccccgaggcccggcccctccccgggaggaggtgggcttcgagtcacgtgacccgtgccctacgggagggggtgcggtcggggacccggcaggaggcggccgagaagagaggaccgtgggggcgttcgcgtggctcccagcccgggaccccacccccgctggacagtgggggaaactgaggcctgagcgggcccacacaggaccatgaaggtgcttctcctcacagggctgggggccctgttcttcgcctattattgggatgacaacttcgacccagccagcctccagggagcgcgagtgctgctgacaggggccaacgctggtgttggtgaggagctggcctatcactacgcgcgtctgggctcccacctggtgctcactgcccacactgaggctctcctgcagaaggtggtagggaactgccggaagctgggcgcccccaaggtcttctacatcgcggcggacatggcctcccctgaggcgcccgagagcgtggtgcagtttgcgctggacaagctgggcgggctggactacctcgtgctgaaccacatcggcggcgccccggccggcacgcgagcccgcagcccccaggcaactcgctggctcatgcaggtaaactttgtgagctacgtgcaactgacgtcgcgggcgctgcccagcctgacggacagcaagggctccctggtggtggtgtcctcgctgctcggccgcgtgcccacgtcgttctccactccctactcggcggccaagtttgcgctggacggcttcttcggctccctgcggcgggagctggacgtgcaggacgtgaacgtggccatcaccatgtgcgtcctgggcctccgagatcgcgcctccgccgccgaggcagtcaggagctcaacgtcacggccgcggcagcctgagcaccggggggtgcccctccagtcccagacggcaatgttcctccctccaactgtccctggagccagaacactcacagagacacccctgagagggtggccacagcccaagatgaagtcatcaagacagaaaagcaaaaccgagaaaaacgacgggcacctggaaccagtcacggcttgggaggtgcaggtgccccgtgttaggcgcctttgtcggggacttgcaaggcctcacctgtttggccatgattgatgacgtgactgcttccattttgcagatgaggaaactaaggctcagagaggccacgccacccttgagccacccatggacccctctccatctcctgcctgcgcctttaagtccctgatttattctttccattcattccatctgggaggaacccccccaactcctgccagcttcccctagctggggtctctggtactcttcacacctgcaggggcgtctacactgttcgtctacctggtggcagggtctgagcgggaggaggagggaaagagtgtgttctgagctggacccagcctcttgttcgagaataaaaactcttcttctcttgca

SEQ ID NO: 141729 - DNA, 730 bp, Homo sapiens
  Payload ID: 7865
  Gene Symbol: HSD11B1L
  Gene Name: hydroxysteroid (11-beta) dehydrogenase 1-like
  Uniprot ID: Q7Z5J1
  ENST ID: ENST00000422535
  CDS Start-End: 239-502
gggcactgttgcccggcgacgctccggcgctgggtccccgaggcccggcccctccccgggaggaggtgggcttcgagtcacgtgacccgtgccctacgggagggggtgcggtcggggacccggcaggaggcggccgagaagagaggaccgtgggggcgttcgcgtggctcccagcccgggaccccacccccgctggacagtgggggaaactgaggcctgagcgggcccacacaggaccatgaaggtgcttctcctcacagggctgggggccctgttcttcgcctattattgggatgacaacttcgacccagccagcctccagggagcgcgagtgctgctgacaggggccaacgctggtgttggtgaggagctggcctatcactacgcgcgtctgggctcccacctggtgctcactgcccacactgaggctctcctgcagaaggcacggtggctcacgcttgtagtcagcactttgggaggccgaggaaagtggatcacctgaggtcaggagttcaagaccagcctggccaacatggcgaaacctggtctctactaagaagacaaaaattaggccaggcatggtggctcatgcctgtaatcctagcactttgggaggccaaggcggatggatcacttgaggtcaggagttcaaaaccagcctggccaacatggtgaaaccctgtctctactaaaaatacaaaaaataaaaataaaataaataaataaaaaa

SEQ ID NO: 141730 - DNA, 709 bp, Homo sapiens
  Payload ID: 7865
  Gene Symbol: HSD11B1L
  Gene Name: hydroxysteroid (11-beta) dehydrogenase 1-like
  ENST ID: ENST00000584904
  CDS Start-End: 250-348
gaagaccaggcgggcactgttgcccggcgacgctccggcgctgggtccccgaggcccggcccctccccgggaggaggtgggcttcgagtcacgtgacccgtgccctacgggagggggtgcggtcggggacccggcaggaggcggccgagaagagaggaccgtgggggcgttcgcgtggctcccagcccgggaccccacccccgctggacagtgggggaaactgaggcctgagcgggcccacacaggaccatgaaggtgcttctcctcacagggctgggggccctgttcttcgcctattattgggatgacaacttcgacccagcctccagggagcgcgagtgctgctgacaggggccaacgctggtgttggtgaggagctggcctatcactacgcgcgtctgggctcccacctggtgctcactgcccacactgaggctctcctgcagaaggcgggctggactacctcgtgctgaaccacatcggcggcgccccggccggcacgcgagcccgcagcccccaggcaactcgctggctcatgcaggtaaactttgtgagctacgtgcaactgacgtcgcgggcgctgcccagcctgacggacagcaagggctccctggtggtggtgtcctcgctgctcggccgcgtgcccacgtcgttctccactccctactcggcggccaagtttgcgctggacggcttcttcggctccctg

SEQ ID NO: 141731 - DNA, 1575 bp, Homo sapiens
  Payload ID: 7865
  Gene Symbol: HSD11B1L
  Gene Name: hydroxysteroid (11-beta) dehydrogenase 1-like
  ENST ID: ENST00000579562
  CDS Start-End: 250-477
gaagaccaggcgggcactgttgcccggcgacgctccggcgctgggtccccgaggcccggcccctccccgggaggaggtgggcttcgagtcacgtgacccgtgccctacgggagggggtgcggtcggggacccggcaggaggcggccgagaagagaggaccgtgggggcgttcgcgtggctcccagcccgggaccccacccccgctggacagtgggggaaactgaggcctgagcgggcccacacaggaccatgaaggtgcttctcctcacagggctgggggccctgttcttcgcctattattgggatgacaacttcgacccagccagcctccagggagcgcgagtgctgctgacaggggccaacgctggtgttggtgaggagctggcctatcactacgcgcgtctgggctcccacctggtgctcactgcccacactgaggctctcctgcagaaggcgggctggactacctcgtgctgaaccacatcggcggcgccccggccggcacgcgagcccgcagcccccaggcaactcgctggctcatgcaggtaaactttgtgagctacgtgcaactgacgtcgcgggcgctgcccagcctgacggacagcaagggctccctggtggtggtgtcctcgctgctcggccgcgtgcccacgtcgttctccactccctactcggcggccaagtttgcgctggacggcttcttcggctccctgcggcgggagctggacgtgcaggacgtgaacgtggccatcaccatgtgcgtcctgggcctccgagatcgcgcctccgccgccgaggcagtcaggggagtcacgagggtcaaggcggccccggggcccaaggcagccctggccgtgatccgcggcggcgccacgcgcgcggccggcgtcttctacccgtggcgtttccgcctgctgtgcttgctccggcgctggctaccgcgcccgcgggcctggtttatccgccaggagctcaacgtcacggccgcggcagcctgagcaccggggggtgcccctccagtcccagacggcaatgttcctccctccaactgtccctggagccagaacactcacagagacacccctgagagggtggccacagcccaagatgaagtcatcaagacagaaaagcaaaaccgagaaaaacgacgggcacctggaaccagtcacggcttgggaggtgcaggtgccccgtgttaggcgcctttgtcggggacttgcaaggcctcacctgtttggccatgattgatgacgtgactgcttccattttgcagatgaggaaactaaggctcagagaggccacgccacccttgagccacccatggacccctctccatctcctgcctgcgcctttaagtccctgatttattctttccattcattccatctgggaggaacccccccaactcctgccagcttcccctagctggggtctctggtactcttcacacctgcaggggcgtctacactgttcgtctacctggtggcagggtctgagcgggaggaggagggaaagagtgtgttctgagctggacccagcctcttgttcgagaataaaaactcttcttctcttgca

SEQ ID NO: 141732 - DNA, 1319 bp, Homo sapiens
  Payload ID: 7865
  Gene Symbol: HSD11B1L
  Gene Name: hydroxysteroid (11-beta) dehydrogenase 1-like
  Uniprot ID: Q7Z5J1
  ENST ID: ENST00000583928
  CDS Start-End: 322-780
gaagaccaggcgggcactgttgcccggcgacgctccggcgctgggtccccgaggcccggcccctccccgggaggaggtgggcttcgagtcacgtgacccgtgccctacgggagggggtgcggtcggggacccggcaggaggcggccgagaagagaggaccgtgggggcgttcgcgtggctcccagcccgggaccccacccccgctggacagtgggggaaactgaggcctgagcgggcgggctggactacctcgtgctgaaccacatcggcggcgccccggccggcacgcgagcccgcagcccccaggcaactcgctggctcatgcaggtaaactttgtgagctacgtgcaactgacgtcgcgggcgctgcccagcctgacggacagcaagggctccctggtggtggtgtcctcgctgctcggccgcgtgcccacgtcgttctccactccctactcggcggccaagtttgcgctggacggcttcttcggctccctgcggcgggagctggacgtgcaggacgtgaacgtggccatcaccatgtgcgtcctgggcctccgagatcgcgcctccgccgccgaggcagtcaggggagtcacgagggtcaaggcggccccggggcccaaggcagccctggccgtgatccgcggcggcgccacgcgcgcggccggcgtcttctacccgtggcgtttccgcctgctgtgcttgctccggcgctggctaccgcgcccgcgggcctggtttatccgccaggagctcaacgtcacggccgcggcagcctgagcaccggggggtgcccctccagtcccagacggcaatgttcctccctccaactgtccctggagccagaacactcacagagacacccctgagagggtggccacagcccaagatgaagtcatcaagacagaaaagcaaaaccgagaaaaacgacgggcacctggaaccagtcacggcttgggaggtgcaggtgccccgtgttaggcgcctttgtcggggacttgcaaggcctcacctgtttggccatgattgatgacgtgactgcttccattttgcagatgaggaaactaaggctcagagaggccacgccacccttgagccacccatggacccctctccatctcctgcctgcgcctttaagtccctgatttattctttccattcattccatctgggaggaacccccccaactcctgccagcttcccctagctggggtctctggtactcttcacacctgcaggggcgtctacactgttcgtctacctggtggcagggtctgagcgggaggaggagggaaagagtgtgttctgagctggaccca

SEQ ID NO: 141733 - DNA, 861 bp, Homo sapiens
  Payload ID: 7865
  Gene Symbol: HSD11B1L
  Gene Name: hydroxysteroid (11-beta) dehydrogenase 1-like
  ENST ID: ENST00000578046
  CDS Start-End: 1-407
ggctgggggccctgttcttcgcctattattgggatgacaacttcgacccaggcgggctggactacctcgtgctgaaccacatcggcggcgccccggccggcacgcgagcccgcagcccccaggcaactcgctggctcatgcaggtaaactttgtgagctacgtgcaactgacgtcgcgggcgctgcccagcctgacggacagcaagggctccctggtggtggtgtcctcgctgctcggccgcgtgcccacgtcgttctccactccctactcggcggccaagtttgcgctggacggcttcttcggctccctgcggcgggagctggacgtgcaggacgtgaacgtggccatcaccatgtgcgtcctgggcctccgagatcgcgcctccgccgccgaggcagtcaggtgaggcccggacaagctgggggctgggctgggggccatggcccagccccagccgcagtccccaccgtgccctcctgtccccaggggagtcacgagggtcaaggcggccccggggcccaaggcagccctggccgtgatccgcggcggcgccacgcgcgcggccggcgtcttctacccgtggcgtttccgcctgctgtgcttgctccggcgctggctaccgcgcccgcgggcctggtttatccgccaggagctcaacgtcacggccgcggcagcctgagcaccggggggtgcccctccagtcccagacggcaatgttcctccctccaactgtccctggagccagaacactcacagagacacccctgagagggtggccacagcccaagatgaagtcatcaagacagaaaagcaaaaccgagaaaaacgacgggcacctggaaccagtcacggcttgggag

SEQ ID NO: 141734 - DNA, 1687 bp, Homo sapiens
  Payload ID: 7865
  Gene Symbol: HSD11B1L
  Gene Name: hydroxysteroid (11-beta) dehydrogenase 1-like
  Uniprot ID: Q7Z5J1
  ENST ID: ENST00000581773
  CDS Start-End: 400-1260
ctgctgggaggcgaagaccaggcgggcactgttgcccggcgacgctccggcgctgggtccccgaggcccggcccctccccgggaggaggtgggcttcgagtcacgtgacccgtgccctacgggagggggtgcggtcggggacccggcaggaggcggccgagaagagaggaccgtgggggcgttcgcgtggctcccagcccgggaccccacccccgctggacagtgggggaaactgaggcctgagcgggctggagtgcaatggcaaatctcggcacactacaacttctgcctcccaggttcaagcgattctcctgcctcagcctcccaaatatctggattacaggcatgcctgtgccggccacctctgtcccctgtccctctgcaggcccacacaggaccatgaaggtgcttctcctcacagggctgggggccctgttcttcgcctattattgggatgacaacttcgacccagccagcctccagggagcgcgagtgctgctgacaggggccaacgctggtgttggtgaggagctggcctatcactacgcgcgtctgggctcccacctggtgctcactgcccacactgaggctctcctgcagaaggtggtagggaactgccggaagctgggcgcccccaaggtcttctacatcgcggcggacatggcctcccctgaggcgcccgagagcgtggtgcagtttgcgctggacaagctgggcgggctggactacctcgtgctgaaccacatcggcggcgccccggccggcacgcgagcccgcagcccccaggcaactcgctggctcatgcaggtaaactttgtgagctacgtgcaactgacgtcgcgggcgctgcccagcctgacggacagcaagggctccctggtggtggtgtcctcgctgctcggccgcgtgcccacgtcgttctccactccctactcggcggccaagtttgcgctggacggcttcttcggctccctgcggcgggagctggacgtgcaggacgtgaacgtggccatcaccatgtgcgtcctgggcctccgagatcgcgcctccgccgccgaggcagtcaggggagtcacgagggtcaaggcggccccggggcccaaggcagccctggccgtgatccgcggcggcgccacgcgcgcggccggcgtcttctacccgtggcgtttccgcctgctgtgcttgctccggcgctggctaccgcgcccgcgggcctggtttatccgccaggagctcaacgtcacggccgcggcagcctgagcaccggggggtgcccctccagtcccagacggcaatgttcctccctccaactgtccctggagccagaacactcacagagacacccctgagagggtggccacagcccaagatgaagtcatcaagacagaaaagcaaaaccgagaaaaacgacgggcacctggaaccagtcacggcttgggaggtgcaggtgccccgtgttaggcgcctttgtcggggacttgcaaggcctcacctgtttggccatgattgatgacgtgactgcttccattttgcagatgaggaaactaaggctcagagaggccacgccacccttgagccacccatggacccctctccatctcctgcctgcgcctttaagtccctgatttattctttccattcattccatctgggaggaacccccccaactcctgccagcttcccctag

SEQ ID NO: 141735 - DNA, 1553 bp, Homo sapiens
  Payload ID: 7865
  Gene Symbol: HSD11B1L
  Gene Name: hydroxysteroid (11-beta) dehydrogenase 1-like
  Uniprot ID: Q7Z5J1
  ENST ID: ENST00000577917
  CDS Start-End: 522-1226
gtagttcggcccggccctggcaccgtgaggggaaagaggcgtcaggtgcctggctgaagcctgaaggtgacccgaaaacaagtcagagcccgagagatccacccgcgcccgcgcgggggaccaagggcccggatttaagaagagtgtgcctacaaggcggttgtcacggcaacgagagggcgggattgttcgagcgctgcggccccctcacgtgatcgattcggaggcggggcgtccgcccagtgggcggggccgggcccctgctgggaggcgaagaccaggcgggcactgttgcccggcgacgctccggcgctgggtccccgaggcccggcccctccccgggaggaggtgggcttcgagtcacgtgacccgtgccctacgggagggggtgcggtcggggacccggcaggaggcggccgagaagagaggaccgtgggggcgttcgcgtggctcccagcccgggaccccacccccgctggacagtgggggaaactgaggcctgagcgggcccacacaggaccatgaaggtgcttctcctcacagggctgggggccctgttcttcgcctattattgggatgacaacttcgacccaggcgggctggactacctcgtgctgaaccacatcggcggcgccccggccggcacgcgagcccgcagcccccaggcaactcgctggctcatgcaggtaaactttgtgagctacgtgcaactgacgtcgcgggcgctgcccagcctgacggacagcaagggctccctggtggtggtgtcctcgctgctcggccgcgtgcccacgtcgttctccactccctactcggcggccaagtttgcgctggacggcttcttcggctccctgcggcgggagctggacgtgcaggacgtgaacgtggccatcaccatgtgcgtcctgggcctccgagatcgcgcctccgccgccgaggcagtcaggagctcaacgtcacggccgcggcagcctgagcaccggggggtgcccctccagtcccagacggcaatgttcctccctccaactgtccctggagccagaacactcacagagacacccctgagagggtggccacagcccaagatgaagtcatcaagacagaaaagcaaaaccgagaaaaacgacgggcacctggaaccagtcacggcttgggaggtgcaggtgccccgtgttaggcgcctttgtcggggacttgcaaggcctcacctgtttggccatgattgatgacgtgactgcttccattttgcagatgaggaaactaaggctcagagaggccacgccacccttgagccacccatggacccctctccatctcctgcctgcgcctttaagtccctgatttattctttccattcattccatctgggaggaacccccccaactcctgccagcttcccctagctggggtctctggtactcttcacacctgcaggggcgtctacactgttcgtctacctggtggcagggtctgagcgggaggaggagggaaagagtgtgttctgagctggacccagcctcttgttcgagaataaaaactcttcttctcttgca

SEQ ID NO: 141736 - DNA, 695 bp, Homo sapiens
  Payload ID: 7865
  Gene Symbol: HSD11B1L
  Gene Name: hydroxysteroid (11-beta) dehydrogenase 1-like
  ENST ID: ENST00000579559
  CDS Start-End: 128-695
tcggggacccggcaggaggcggccgagaagagaggaccgtgggggcgttcgcgtggctcccagcccgggaccccacccccgctggacagtgggggaaactgaggcctgagcgggcccacacaggaccatgaaggtgcttctcctcacagggctgggggccctgttcttcgcctattattgggatgacaacttcgacccaggtaaactttgtgagctacgtgcaactgacgtcgcgggcgctgcccagcctgacggacagcaagggctccctggtggtggtgtcctcgctgctcggccgcgtgcccacgtcgttctccactccctactcggcggccaagtttgcgctggacggcttcttcggctccctgcggcgggagctggacgtgcaggacgtgaacgtggccatcaccatgtgcgtcctgggcctccgagatcgcgcctccgccgccgaggcagtcaggggagtcacgagggtcaaggcggccccggggcccaaggcagccctggccgtgatccgcggcggcgccacgcgcgcggccggcgtcttctacccgtggcgtttccgcctgctgtgcttgctccggcgctggctaccgcgcccgcgggcctggtttatccgccaggagctcaacgtcacggccgcggcagcctgagcaccggggggtgcccctccagtcccagacggcaatgttcct

SEQ ID NO: 141737 - DNA, 735 bp, Homo sapiens
  Payload ID: 7865
  Gene Symbol: HSD11B1L
  Gene Name: hydroxysteroid (11-beta) dehydrogenase 1-like
  ENST ID: ENST00000582346
  CDS Start-End: 270-413
ccgggcccctgctgggaggcgaagaccaggcgggcactgttgcccggcgacgctccggcgctgggtccccgaggcccggcccctccccgggaggaggtgggcttcgagtcacgtgacccgtgccctacgggagggggtgcggtcggggacccggcaggaggcggccgagaagagaggaccgtgggggcgttcgcgtggctcccagcccgggaccccacccccgctggacagtgggggaaactgaggcctgagcgggcccacacaggaccatgaaggtgcttctcctcacagggctgggggccctgttcttcgcctattattgggatgacaacttcgacccaggtggtagggaactgccggaagctgggcgcccccaaggtcttctacatcgcggcggacatggcctcccctgaggcgcccgagagcgtggtgcagtttgcgctggacaagctgggcgggctggactacctcgtgctgaaccacatcggcggcgccccggccggcacgcgagcccgcagcccccaggcaactcgctggctcatgcaggtaaactttgtgagctacgtgcaactgacgtcgcgggcgctgcccagcctgacggacagcaagggctccctggtggtggtgtcctcgctgctcggccgcgtgcccacgtcgttctccactccctactcggcggccaagtttgcgctggacggcttcttcggctccctgcggcgggagctggacgtgcag

SEQ ID NO: 141738 - DNA, 1884 bp, Homo sapiens
  Payload ID: 7865
  Gene Symbol: HSD11B1L
  Gene Name: hydroxysteroid (11-beta) dehydrogenase 1-like
  Uniprot ID: Q7Z5J1
  ENST ID: ENST00000581521
  CDS Start-End: 476-1336
cggcgacgctccggcgctgggtccccgaggcccggcccctccccgggaggaggtgggcttcgagtcacgtgacccgtgccctacgggagggggtgcggtcggggacccggcaggaggcggccgagaagagaggaccgtgggggcgttcgcgtggctcccagcccgggaccccacccccgctggacagtgggggaaactgaggcctgagcgggctggagtgcaatggcaaatctcggcacactacaacttctgcctcccaggttcaagcgattctcctgcctcagcctcccaaatatctggattacaggcatagatggggtttcaccatgttggccaggctggtctcgaactcctgatctcaagtgatttgcccgcctcagcctcccaaagtgctgggattccaggcatgagccaccacatccagctgaaggaggtcacttttgcactgagacttgaaagaagcccacacaggaccatgaaggtgcttctcctcacagggctgggggccctgttcttcgcctattattgggatgacaacttcgacccagccagcctccagggagcgcgagtgctgctgacaggggccaacgctggtgttggtgaggagctggcctatcactacgcgcgtctgggctcccacctggtgctcactgcccacactgaggctctcctgcagaaggtggtagggaactgccggaagctgggcgcccccaaggtcttctacatcgcggcggacatggcctcccctgaggcgcccgagagcgtggtgcagtttgcgctggacaagctgggcgggctggactacctcgtgctgaaccacatcggcggcgccccggccggcacgcgagcccgcagcccccaggcaactcgctggctcatgcaggtaaactttgtgagctacgtgcaactgacgtcgcgggcgctgcccagcctgacggacagcaagggctccctggtggtggtgtcctcgctgctcggccgcgtgcccacgtcgttctccactccctactcggcggccaagtttgcgctggacggcttcttcggctccctgcggcgggagctggacgtgcaggacgtgaacgtggccatcaccatgtgcgtcctgggcctccgagatcgcgcctccgccgccgaggcagtcaggggagtcacgagggtcaaggcggccccggggcccaaggcagccctggccgtgatccgcggcggcgccacgcgcgcggccggcgtcttctacccgtggcgtttccgcctgctgtgcttgctccggcgctggctaccgcgcccgcgggcctggtttatccgccaggagctcaacgtcacggccgcggcagcctgagcaccggggggtgcccctccagtcccagacggcaatgttcctccctccaactgtccctggagccagaacactcacagagacacccctgagagggtggccacagcccaagatgaagtcatcaagacagaaaagcaaaaccgagaaaaacgacgggcacctggaaccagtcacggcttgggaggtgcaggtgccccgtgttaggcgcctttgtcggggacttgcaaggcctcacctgtttggccatgattgatgacgtgactgcttccattttgcagatgaggaaactaaggctcagagaggccacgccacccttgagccacccatggacccctctccatctcctgcctgcgcctttaagtccctgatttattctttccattcattccatctgggaggaacccccccaactcctgccagcttcccctagctggggtctctggtactcttcacacctgcaggggcgtctacactgttcgtctacctggtggcagggtctgagcgggaggaggagggaaagagtgtgttctgagctggacccagcctcttgt

SEQ ID NO: 141739 - DNA, 1540 bp, Homo sapiens
  Payload ID: 7865
  Gene Symbol: HSD11B1L
  Gene Name: hydroxysteroid (11-beta) dehydrogenase 1-like
  Uniprot ID: Q7Z5J1
  ENST ID: ENST00000581893
  CDS Start-End: 505-963
gggcggggccgggcccctgctgggaggcgaagaccaggcgggcactgttgcccggcgacgctccggcgctgggtccccgaggcccggcccctccccgggaggaggtgggcttcgagtcacgtgacccgtgccctacgggagggggtgcggtcggggacccggcaggaggcggccgagaagagaggaccgtgggggcgttcgcgtggctcccagcccgggaccccacccccgctggacagtgggggaaactgaggcctgagcggagtgaccaccccggctatggccagccagcctccagggagcgcgagtgctgctgacaggggccaacgctggtgttggtgaggagctggcctatcactacgcgcgtctgggctcccacctggtgctcactgcccacactgaggctctcctgcagaaggcgggctggactacctcgtgctgaaccacatcggcggcgccccggccggcacgcgagcccgcagcccccaggcaactcgctggctcatgcaggtaaactttgtgagctacgtgcaactgacgtcgcgggcgctgcccagcctgacggacagcaagggctccctggtggtggtgtcctcgctgctcggccgcgtgcccacgtcgttctccactccctactcggcggccaagtttgcgctggacggcttcttcggctccctgcggcgggagctggacgtgcaggacgtgaacgtggccatcaccatgtgcgtcctgggcctccgagatcgcgcctccgccgccgaggcagtcaggggagtcacgagggtcaaggcggccccggggcccaaggcagccctggccgtgatccgcggcggcgccacgcgcgcggccggcgtcttctacccgtggcgtttccgcctgctgtgcttgctccggcgctggctaccgcgcccgcgggcctggtttatccgccaggagctcaacgtcacggccgcggcagcctgagcaccggggggtgcccctccagtcccagacggcaatgttcctccctccaactgtccctggagccagaacactcacagagacacccctgagagggtggccacagcccaagatgaagtcatcaagacagaaaagcaaaaccgagaaaaacgacgggcacctggaaccagtcacggcttgggaggtgcaggtgccccgtgttaggcgcctttgtcggggacttgcaaggcctcacctgtttggccatgattgatgacgtgactgcttccattttgcagatgaggaaactaaggctcagagaggccacgccacccttgagccacccatggacccctctccatctcctgcctgcgcctttaagtccctgatttattctttccattcattccatctgggaggaacccccccaactcctgccagcttcccctagctggggtctctggtactcttcacacctgcaggggcgtctacactgttcgtctacctggtggcagggtctgagcgggaggaggagggaaagagtgtgttctgagctggacccagcctcttgttcgagaataaaaactcttcttctcttgca

SEQ ID NO: 141740 - DNA, 502 bp, Homo sapiens
  Payload ID: 7865
  Gene Symbol: HSD11B1L
  Gene Name: hydroxysteroid (11-beta) dehydrogenase 1-like
  ENST ID: ENST00000578832
  CDS Start-End: 180-407
gggagggggtgcggtcggggacccggcaggaggcggccgagaagagaggaccgtgggggcgttcgcgtggctcccagcccgggaccccacccccgctggacagtgggggaaactgaggcctgagcgggcctgtgccggccacctctgtcccctgtccctctgcaggcccacacaggaccatgaaggtgcttctcctcacagggctgggggccctgttcttcgcctattattgggatgacaacttcgacccagccagcctccagggagcgcgagtgctgctgacaggggccaacgctggtgttggtgaggagctggcctatcactacgcgcgtctgggctcccacctggtgctcactgcccacactgaggctctcctgcagaaggcgggctggactacctcgtgctgaaccacatcggcggcgccccggccggcacgcgagcccgcagcccccaggcaactcgctggctcatgcaggtaaactttgtgagctacgtgcaactg

SEQ ID NO: 141741 - DNA, 1151 bp, Homo sapiens
  Payload ID: 7865
  Gene Symbol: HSD11B1L
  Gene Name: hydroxysteroid (11-beta) dehydrogenase 1-like
  ENST ID: ENST00000577257
  CDS Start-End: 721-1151
gtggtgtcttgcggctctgagactccagagaagggctgcggtctcgcagcggagggccgctgggaaatggacgctttaaggcccgggccgccgcaaggctgtctgggaaatgtagtcagcacggcgctgtttgcacctggccgcggagcctcctgggaaatgtagttcggcccggccctggcaccgtgaggggaaagaggcgtcaggtgcctggctgaagcctgaaggtgacccgaaaacaagtcagagcccgagagatccacccgcgcccgcgcgggggaccaagggcccggatttaagaagagtgtgcctacaaggcggttgtcacggcaacgagagggcgggattgttcgagcgctgcggccccctcacgtgatcgattcggaggcggggcgtccgcccagtgggcggggccgggcccctgctgggaggcgaagaccaggcgggcactgttgcccggcgacgctccggcgctgggtccccgaggcccggcccctccccgggaggaggtgggcttcgagtcacgtgacccgtgccctacgggagggggtgcggtcggggacccggcaggaggcggccgagaagagaggaccgtgggggcgttcgcgtggctcccagcccgggaccccacccccgctggacagtgggggaaactgaggcctgagcgggcctgtgccggccacctctgtcccctgtccctctgcaggcccacacaggaccatgaaggtgcttctcctcacagggctgggggccctgttcttcgcctattattgggatgacaacttcgacccagccagcctccagggagcgcgagtgctgctgacaggggccaacgctggtgttggtgaggagctggcctatcactacgcgcgtctgggctcccacctggtgctcactgcccacactgaggctctcctgcagaaggtggtagggaactgccggaagctgggcgcccccaaggtcttctacatcgcggcggacatggcctcccctgaggcgcccgagagcgtggtgcagtttgcgctggacaagctgggcgggctggactacctcgtgctgaaccacatcggcggcgccccggccggcacgcgagcccgcagcccccaggcaactcgctggctcatgcaggtaaactttgtgagctacgtgca

SEQ ID NO: 141742 - DNA, 1580 bp, Homo sapiens
  Payload ID: 7865
  Gene Symbol: HSD11B1L
  Gene Name: hydroxysteroid (11-beta) dehydrogenase 1-like
  ENST ID: ENST00000616276
  CDS Start-End: 1-1002
atggcaaatctcggcacactacaacttctgcctcccaggttcaagcgattctcctgcctcagcctcccaaatatctggattacaggcatgcctgtgccggccacctctgtcccctgtccctctgcaggcccacacaggaccatgaaggtgcttctcctcacagggctgggggccctgttcttcgcctattattgggatgacaacttcgacccagccagcctccagggagcgcgagtgctgctgacaggggccaacgctggtgttggtgaggagctggcctatcactacgcgcgtctgggctcccacctggtgctcactgcccacactgaggctctcctgcagaaggtggtagggaactgccggaagctgggcgcccccaaggtcttctacatcgcggcggacatggcctcccctgaggcgcccgagagcgtggtgcagtttgcgctggacaagctgggcgggctggactacctcgtgctgaaccacatcggcggcgccccggccggcacgcgagcccgcagcccccaggcaactcgctggctcatgcaggtaaactttgtgagctacgtgcaactgacgtcgcgggcgctgcccagcctgacggacagcaagggctccctggtggtggtgtcctcgctgctcggccgcgtgcccacgtcgttctccactccctactcggcggccaagtttgcgctggacggcttcttcggctccctgcggcgggagctggacgtgcaggacgtgaacgtggccatcaccatgtgcgtcctgggcctccgagatcgcgcctccgccgccgaggcagtcaggggagtcacgagggtcaaggcggccccggggcccaaggcagccctggccgtgatccgcggcggcgccacgcgcgcggccggcgtcttctacccgtggcgtttccgcctgctgtgcttgctccggcgctggctaccgcgcccgcgggcctggtttatccgccaggagctcaacgtcacggccgcggcagcctgagcaccggggggtgcccctccagtcccagacggcaatgttcctccctccaactgtccctggagccagaacactcacagagacacccctgagagggtggccacagcccaagatgaagtcatcaagacagaaaagcaaaaccgagaaaaacgacgggcacctggaaccagtcacggcttgggaggtgcaggtgccccgtgttaggcgcctttgtcggggacttgcaaggcctcacctgtttggccatgattgatgacgtgactgcttccattttgcagatgaggaaactaaggctcagagaggccacgccacccttgagccacccatggacccctctccatctcctgcctgcgcctttaagtccctgatttattctttccattcattccatctgggaggaacccccccaactcctgccagcttcccctagctggggtctctggtactcttcacacctgcaggggcgtctacactgttcgtctacctggtggcagggtctgagcgggaggaggagggaaagagtgtgttctgagctggacccagcctcttgttcgagaataaaaactcttcttctcttgcat

SEQ ID NO: 141743 - DNA, 1900 bp, Homo sapiens
  Payload ID: 7866
  Gene Symbol: HSD11B2
  Gene Name: hydroxysteroid (11-beta) dehydrogenase 2
  Uniprot ID: P80365
  ENST ID: ENST00000326152
  CDS Start-End: 133-1350
cagagaaagcgagtgtccctctcgcgccccaggccggtgtacccccgcactccgcgccccggcctagaagctctctctccccgctccccggcccggcccccgccccgccccgccccagcccgctgggccgccatggagcgctggccttggccgtcgggcggcgcctggctgctcgtggctgcccgcgcgctgctgcagctgctgcgctcagacctgcgtctgggccgcccgctgctggcggcgctggcgctgctggccgcgctcgactggctgtgccagcgcctgctgcccccgccggccgcactcgccgtgctggccgccgccggctggatcgcgttgtcccgcctggcgcgcccgcagcgcctgccggtggccactcgcgcggtgctcatcaccggctgtgactctggttttggcaaggagacggccaagaaactggactccatgggcttcacggtgctggccaccgtattggagttgaacagccccggtgccatcgagctgcgtacctgctgctcccctcgcctaaggctgctgcagatggacctgaccaaaccaggagacattagccgcgtgctagagttcaccaaggcccacaccaccagcaccggcctgtggggcctcgtcaacaacgcaggccacaatgaagtagttgctgatgcggagctgtctccagtggccactttccgtagctgcatggaggtgaatttctttggcgcgctcgagctgaccaagggcctcctgcccctgctgcgcagctcaaggggccgcatcgtgactgtggggagcccagcgggggacatgccatatccgtgcttgggggcctatggaacctccaaagcggccgtggcgctactcatggacacattcagctgtgaactccttccctggggggtcaaggtcagcatcatccagcctggctgcttcaagacagagtcagtgagaaacgtgggtcagtgggaaaagcgcaagcaattgctgctggccaacctgcctcaagagctgctgcaggcctacggcaaggactacatcgagcacttgcatgggcagttcctgcactcgctacgcctggccatgtccgacctcaccccagttgtagatgccatcacagatgcgctgctggcagctcggccccgccgccgctattaccccggccagggcctggggctcatgtacttcatccactactacctgcctgaaggcctgcggcgccgcttcctgcaggccttcttcatcagtcactgtctgcctcgagcactgcagcctggccagcctggcactaccccaccacaggacgcagcccaggacccaaacctgagccccggcccttccccagcagtggctcggtgagccatgtgcacctatggcccagccactgcagcacaggaggctccgtgagcccttggttcctccccgaaaacccccagcattacgatcccccaagtgtcctggaccctggcctaaagaatcccacccccacttcatgcccactgccgatgcccaatccaggcccggtgaggccaaggtttcccagtgagcctctgcgcctctccactgtttcatgagcccaaacaccctcctggcacaacgctctaccctgcagcttggagaactccgctggatggggagtctcatgcaagacttcactgcagcctttcacaggactctgcagatagtgcctctgcaaactaaggagtgactaggtgggttggggaccccctcaggattgtttctcggcaccagtgcctcagtgctgcaattgagggctaaatcccaagtgtctcttgactggctcaagaattagggccccaactacacacccccaagccacagggaagcatgtactgtacttcccaattgccacattttaaataaagacaaatttttatttcttctaaaa

SEQ ID NO: 141744 - DNA, 634 bp, Homo sapiens
  Payload ID: 7866
  Gene Symbol: HSD11B2
  Gene Name: hydroxysteroid (11-beta) dehydrogenase 2
  ENST ID: ENST00000566606
  CDS Start-End: 1-177
ctgctggccgcgctcgactggctgtgccagcgcctgctgcccccgccggccgcactcgccgtgctggccgccgccggctggatcgcgttgtcccgcctggcgcgcccgcagcgcctgccggtggccactcgcgcggtgctcatcaccggggcctggatcccatccagaccctggtgattctggggttgtctcaggctaggctgggccacagtggaagttcactgactgccctggcctggccaggctgtgactctggttttggcaaggagacggccaagaaactggactccatgggcttcacggtgctggccaccgtattggagttgaacagccccggtgccatcgagctgcgtacctgctgctcccctcgcctaaggctgctgcagatggacctgaccaaaccaggagacattagccgcgtgctagagttcaccaaggcccacaccaccagcaccggcctgtggggcctcgtcaacaacgcaggccacaatgaagtagttgctgatgcggagctgtctccagtggccactttccgtagctgcatggaggtgaatttctttggcgcgctcgagctgaccaagggcctcctgcccctgctgcgcagctcaaggggccgcatcgtgactgtggggag

SEQ ID NO: 141745 - DNA, 1265 bp, Homo sapiens
  Payload ID: 7867
  Gene Symbol: HSD17B1
  Gene Name: hydroxysteroid (17-beta) dehydrogenase 1
  ENST ID: ENST00000225929
  CDS Start-End: 1-990
atggcccgcaccgtggtgctcatcaccggctgttcctcgggcatcggcctgcacttggccgtacgtctggcttcagatccatcccagagcttcaaagtgtatgccacgttgagggacctgaaaacacagggccggctgtgggaggcggcccgggccctggcatgccctccgggatccctggagacgttgcagctggacgtaagggactcaaaatccgtggccgctgcccgggaacgcgtgactgagggccgcgtggacgtgctggtgtgtaacgcaggcctgggcctgctggggccgctggaggcgctgggggaggacgccgtggcctctgtgctggacgtgaatgtagtagggactgtgcggatgctgcaggccttcctgccagacatgaagaggcgcggttcgggacgcgtgttggtgaccgggagcgtgggaggattgatggggctgcctttcaatgacgtttattgcgccagcaagttcgcgctcgaaggcttatgcgagagtctggcggttctgctgctgccctttggggtccacagcttgagcctgatcgagtgcggcccagtgcacaccgccttcatggagaaggtgttgggcagcccagaggaggtgctggaccgcacggacatccacaccttccaccgcttctaccaatacctcgcccacagcaagcaagtctttcgcgaggcggcgcagaaccctgaggaggtggcggaggtcttcctcaccgctttgcgcgccccgaagccgaccctgcgctacttcaccaccgagcgcttcctgcccctgctgcggatgcgcctggacgaccccagcggctccaactacgtcaccgccatgcaccgggaagtgttcggcgacgttccggcaaaggccgaggctggggccgaggctgggggcggggccgggcctggggcagaggacgaggccgggcgcggtgcggtgggggaccctgagctcggcgatcctccggccgccccgcagtaaaggcttcctcagccgctgtctcccgcgcccttctttgtcccctgggtctgtgtggtccctggggatggggcggcggtagcagctgtgggtggctaattaagatagatcgcgttagccagttttaccagcgcagctaggcgcgatggctgtcgcctgtaatgccagcgctttgggaggcggaggcaggaggatcgctcaagccccggagttggagaccagccagagcaacacagtgagacccccatctctacaaaaataaagaaaatttaaaaatc

SEQ ID NO: 141746 - DNA, 1059 bp, Homo sapiens
  Payload ID: 7867
  Gene Symbol: HSD17B1
  Gene Name: hydroxysteroid (17-beta) dehydrogenase 1
  ENST ID: ENST00000590299
  CDS Start-End: 12-461
acagtctcaccatggcccgcaccgtggtgctcatcaccggctgttcctcgggcatcggcctgcacttggccgtacgtctggcttcagatccatcccagagcttcaaagtgtatgccacgttgagggacctgaaaacacagggccggctgtgggaggcggcccgggccctggcatgccctccgggatccctggagacgttgcagctggacgtaagggactcaaaatccgtggccgctgcccgggaacgcgtgactgagggccgcgtggacgtgctggtgtgtaacgcaggcctgggcctgctggggccgctggaggcgctgggggaggacgccgtggcctctgtgctggacgtgaatgtagtagggactgtgcggatgctgcaggccttcctgccagacatgaagaggcgcggttcgggacgcgtgttggtgaccgggagcgtgggaggattgatggcttgagcctgatcgagtgcggcccagtgcacaccgccttcatggagaaggtgttgggcagcccagaggaggtgctggaccgcacggacatccacaccttccaccgcttctaccaatacctcgcccacagcaagcaagtctttcgcgaggcggcgcagaaccctgaggaggtggcggaggtcttcctcaccgctttgcgcgccccgaagccgaccctgcgctacttcaccaccgagcgcttcctgcccctgctgcggatgcgcctggacgaccccagcggctccaactacgtcaccgccatgcaccgggaagtgttcggcgacgttccggcaaaggccgaggctggggccgaggctgggggcggggccgggcctggggcagaggacgaggccgggcgcggtgcggtgggggaccctgagctcggcgatcctccggccgccccgcagtaaaggcttcctcagccgctgtctcccgcgcccttctttgtcccctgggtctgtgtggtccctggggatggggcggcggtagcagctgtgggtggctaattaagatagatcgcgttagccagttttaccagcgcagctaggcgcgatggctgtcgcct

SEQ ID NO: 141747 - DNA, 4982 bp, Homo sapiens
  Payload ID: 7867
  Gene Symbol: HSD17B1
  Gene Name: hydroxysteroid (17-beta) dehydrogenase 1
  Uniprot ID: P14061
  ENST ID: ENST00000585807
  CDS Start-End: 3721-4707
agttaggtgggacttgggttggggtagagtcaggttgtgacctgcactccattagccatgagacctcaggcaagttccttgctttctctgagtgctttcctttcctttcccttttcttttcttttttgtttttcttttgttttgagacggagtttcactcttgttgcccagcctggagtgcaatagcgcggtctcagttcaccacaacctctgcctcccgggttcaagtgtagctaggattgcaggcatgtgccaccacgcccagctaattttgtatttttagtagagacgaggtttctccatgttggtcagactggtcttggactcccgacctcaggtgatccgcccgccctggcctctcagagtgctgggattacaggcatgacccaccccatccggccctctgagtctttcttatctgtaaaatgggtataataatacctatctaatcggttttagtaatggtggagataatgcctgaaagtgctagtatagaggtttaatacccagcaaggactgttattagaatgaatagtaatatgactactgtcacattttgcaaatgtgtaaagaagaaagagggctaagtgaatcaaagggagacagccccactcaccctgttctgccccagaggactgagcgatccccaccatctgggaagctgcctcaccaggaggtccagctggggctacaggactggctactttgctacaatggcccatctttcctgagcccagtggagggtcccaggggggcagaagtcattgataggggccagtagggttgtagagccactgtctgaacttctgtggaggtctggtgcaggggaggtgtgaacagataggaggctaggtgaggatgcagcagaggaagggggcaggagtgccccaggagggggcggtaccgaggcagggattcagctgggtctgagagggagggaaggctgagggggatggccctttggagtgggcagggacatgaccacagaaagcctgggaagtggaaacagacaggagcctgctggagctcttggagctttgtgtggggcactaggggaaggaggcaggcactccaccctgacctgcccctacctctggatgagggtcttctctgcctgttggatgatgtgctgcccctgctcttggaggaagaggcctcccagccaccccctcctgccagtcgccttgccctgctgacccagacagatctgctatccctacagcatccaggaaggccacagggagggggcccaggtggcatgggtttctgaggcctgggatctgctctcagtcccgctctcgccaaccccctttgcccctctgtgacagtgtgtgtacatatgcgtgcatgtgtgtacctgtgtggtgtggctcacaaggtcacccctgggggtgggataataagaggtaaagtgtgaccccctctcttccgtacattcattttttcaagcttgtgaatattcacattgttaatataatcttctgcagtcccatgacttcgaatagcacttagatgccgatgacccccccaccaaagaaaccccactgtctcccacagactccaggtctgtatctccaactgcctactcaatacaacacgtccacctgatacaatgaacttaatgtgtctaaaccccaattccacatttccagtcctcctaccggctcctcccccagtcttctctactttactatatgacaactccatttttcccaatactggttttaaaaaccctggagtagtccttgactccagtctctctcacctttcaaccaattcagcagcaaatactgacagctctacctttgctcatcaaagcatatccccaaatcaccctattccagactgcacactgtcatctctcccttcaattacagcagtagcctcctaactagttttcttgattccactcctgcccatcagcagtgaaattaccccagagcagttaaaatgatcttttaggatgggcacagtggctcacgcctgtaataccagcactttgggaggtggaggctggctgatccccttaggttgggagttcaagaccatcctcaccaacagggagaaaccccatctctactaaaaatacaaaaattagccggatgtggtgggacgtgtctgtaatcccaactacttgggaggctgagacaggagaactgcttgaacccgggaggtggaggttgcagtgagccagaatcgtgccacagcactccagcctgggcaagaagcgcgaaactccgtctcaaaataaaataatcttctaaaaatgacagggccaggtggggtggcacttttttataatccgagcactttgggaggctgaggtgggcagatcgcttgacatcaggggtttgagaccagcctggccaacatggtgaaactccgtctctactaaaaatactaaaaattagctgggcgtggtggcgggtgcctgtaatcccagctactcgggaggctgatgcaggagaatcgcctgaaccaggcagatgcaggatgcagtgagccaagattaagacactgcactccaacctaagcaatactttgtctcaaaaataaaaaaaagcctgggaaacaaagtgagaccccgtctctacaaaaaagtcaaaaaattagctgggtatggtggcagtgatggcacacacctgtagtcccggctacttgggaagctttttaatattttttgcagagaccgggtctcactctgttacctggcctggtcttgaactcctgggctccaacaatcccctttcctgggcctcccaaagtgctgggattacaggcatgagccaccgtgcccagcctcaaagcatattttaaaggatagaaataaacagccatatgaagagatacagacagggcggtctggaagggtccagagcaggagcttctatctccatagagttggggttacgtcaccctctgggcacattctgtcagcctccacacgttcagccctcagaagctcccgaaccctgtcctttgggccttttatggagaactccattggctgtccatgactgaagcatggacaactgtgataatgtgattgggcaaaaagggtctgatctaagcccagcaaggccagtccagattctttgggcctttgtgcagcattcctttctccagggtatggggcaaggacccactctggaatgaggatcctacaacccacaatcagattagagtcctgccttgggcagctgaaaagaggacaggagaaggtcagagagacgaaaggctgttttttgaggcctgaggcaccccaacatgacaacgtaagactgtaaccatggtcatgtgagttatgagctaggaaccctggacgaaaccagcacatatacaatcatctcccacctcccaacgcctttactttcacagcctctgcagcaaactgcggtcactataatcgctcctgtggcacagaggcatacccaggggaatctgcccagggggccactctgtgcccacgtgggaacccacacctgcttgtaaagcctcccctccctctgaccagcaaccaggacagtttgttgttccaagcagtgggctcatgtctgttttggctcagaacagggtggggagagcgggccagggacccgcaggaaggcttatccttgagattgcgtgggagacacaacaaggggtgggggcccgcaggcggggcggggcgaagcaggtgatatcaagcccagagccccagcctctccccacagtctcaccatggcccgcaccgtggtgctcatcaccggctgttcctcgggcatcggcctgcacttggccgtacgtctggcttcagatccatcccagagcttcaaagtgtatgccacgttgagggacctgaaaacacagggccggctgtgggaggcggcccgggccctggcatgccctccgggatccctggagacgttgcagctggacgtaagggactcaaaatccgtggccgctgcccgggaacgcgtgactgagggccgcgtggacgtgctggtgtgtaacgcaggcctgggcctgctggggccgctggaggcgctgggggaggacgccgtggcctctgtgctggacgtgaatgtagtagggactgtgcggatgctgcaggccttcctgccagacatgaagaggcgcggttcgggacgcgtgttggtgaccgggagcgtgggaggattgatggggctgcctttcaatgacgtttattgcgccagcaagttcgcgctcgaaggcttatgcgagagtctggcggttctgctgctgccctttggggtccacttgagcctgatcgagtgcggcccagtgcacaccgccttcatggagaaggtgttgggcagcccagaggaggtgctggaccgcacggacatccacaccttccaccgcttctaccaatacctcgcccacagcaagcaagtctttcgcgaggcggcgcagaaccctgaggaggtggcggaggtcttcctcaccgctttgcgcgccccgaagccgaccctgcgctacttcaccaccgagcgcttcctgcccctgctgcggatgcgcctggacgaccccagcggctccaactacgtcaccgccatgcaccgggaagtgttcggcgacgttccggcaaaggccgaggctggggccgaggctgggggcggggccgggcctggggcagaggacgaggccgggcgcggtgcggtgggggaccctgagctcggcgatcctccggccgccccgcagtaaaggcttcctcagccgctgtctcccgcgcccttctttgtcccctgggtctgtgtggtccctggggatggggcggcggtagcagctgtgggtggctaattaagatagatcgcgttagccagttttaccagcgcagctaggcgcgatggctgtcgcctgtaatgccagcgctttgggaggcggaggcaggaggatcgctcaagccccggagttggagaccagccagagcaacacagtgagacccccatctctacaaaaataaagaaaatttaaaaatc

SEQ ID NO: 141748 - DNA, 960 bp, Homo sapiens
  Payload ID: 7868
  Gene Symbol: HSD17B10
  Gene Name: hydroxysteroid (17-beta) dehydrogenase 10
  Uniprot ID: Q99714
  ENST ID: ENST00000168216
  CDS Start-End: 29-814
cccatcccgtggagtggccggcgacaagatggcagcagcgtgtcggagcgtgaagggcctggtggcggtaataaccggaggagcctcgggcctgggcctggccacggcggagcgacttgtggggcagggagcctctgctgtgcttctggacctgcccaactcgggtggggaggcccaagccaagaagttaggaaacaactgcgttttcgccccagccgacgtgacctctgagaaggatgtgcaaacagctctggctctagcaaaaggaaagtttggccgtgtggatgtagctgtcaactgtgcaggcatcgcggtggctagcaagacgtacaacttaaagaagggccagacccataccttggaagacttccagcgagttcttgatgtgaatctcatgggcaccttcaatgtgatccgcctggtggctggtgagatgggccagaatgaaccagaccagggaggccaacgtggggtcatcatcaacactgccagtgtggctgccttcgagggtcaggttggacaagctgcatactctgcttccaaggggggaatagtgggcatgacactgcccattgctcgggatctggctcccataggtatccgggtgatgaccattgccccaggtctgtttggcaccccactgctgaccagcctcccagagaaagtgtgcaacttcttggccagccaagtgcccttccctagccgactgggtgaccctgctgagtatgctcacctcgtacaggccatcatcgagaacccattcctcaatggagaggtcatccggctggatggggccattcgtatgcagccttgaagggagaaggcagagaaaacacacgctcctctgcccttcctttccctggggtactactctccagcttgggaggaagcccagtagccattttgtaactgcctaccagtcgccctctgtgcctaataaagtctctttttctcacagag

SEQ ID NO: 141749 - DNA, 823 bp, Homo sapiens
  Payload ID: 7868
  Gene Symbol: HSD17B10
  Gene Name: hydroxysteroid (17-beta) dehydrogenase 10
  ENST ID: ENST00000375298
  CDS Start-End: 6-515
acaagatggcagcagcgtgtcggagcgtgaagggcctggtggcggtaataaccggaggagcctcgggcctgggcctggccacggcggagcgacttgtggggcagggagcctctgctgtgcttctggacctgcccaactcgggtggggaggcccaagccaagaagttaggaaacaactgcgttttcgccccagccgacgtgacctctgagaaggatgtgcaaacagctctggctctagcaaaaggaaagtttggccgtgtggatgtagctgtcaactgtgcaggcatcgcggtggctagcaagacgtacaacttaaagaagggccagacccataccttggaagacttccagcgagttcttgatgtgaatctcatgggcaccttcaatgtgatccgcctggtggctggtgagatgggccagaatgaaccagaccagggaggccaacgtggggtcatcatcaacactgccagtgtggctgccttcgagggtcaggtctgtttggcaccccactgctgaccagcctcccagagaaagtgtgcaacttcttggccagccaagtgcccttccctagccgactgggtgaccctgctgagtatgctcacctcgtacaggccatcatcgagaacccattcctcaatggagaggtcatccggctggatggggccattcgtatgcagccttgaagggagaaggcagagaaaacacacgctcctctgcccttcctttccctggggtactactctccagcttgggaggaagcccagtagccattttgtaactgcctaccagtcgccctctgtgcctaataaagtctctttttctca

SEQ ID NO: 141750 - DNA, 916 bp, Homo sapiens
  Payload ID: 7868
  Gene Symbol: HSD17B10
  Gene Name: hydroxysteroid (17-beta) dehydrogenase 10
  Uniprot ID: Q99714
  ENST ID: ENST00000375304
  CDS Start-End: 12-770
ccggcgacaagatggcagcagcgtgtcggagcgtgaagggcctggtggcggtaataaccggaggagcctcgggcctgggcctggccacggcggagcgacttgtggggcagggagcctctgctgtgcttctggacctgcccaactcgggtggggaggcccaagccaagaagttaggaaacaactgcgttttcgccccagccgacgtgacctctgagaaggatgtgcaaacagctctggctctagcaaaaggaaagtttggccgtgtggatgtagctgtcaactgtgcaggcatcgcggtggctagcaagacgtacaacttaaagaagggccagacccataccttggaagacttccagcgagttcttgatgtgaatctcatgggcaccttcaatgtgatccgcctggtggctggtgagatgggccagaatgaaccagaccagggaggccaacgtggggtcatcatcaacactgccagtgtggctgccttcgagggtcaggttggacaagctgcatactctgcttccaaggggggaatagtgggcatgacactgcccattgctcgggatctggctcccataggtctgtttggcaccccactgctgaccagcctcccagagaaagtgtgcaacttcttggccagccaagtgcccttccctagccgactgggtgaccctgctgagtatgctcacctcgtacaggccatcatcgagaacccattcctcaatggagaggtcatccggctggatggggccattcgtatgcagccttgaagggagaaggcagagaaaacacacgctcctctgcccttcctttccctggggtactactctccagcttgggaggaagcccagtagccattttgtaactgcctaccagtcgccctctgtgcctaataaagtctctttttctcacagag

SEQ ID NO: 141751 - DNA, 1885 bp, Homo sapiens
  Payload ID: 7869
  Gene Symbol: HSD17B11
  Gene Name: hydroxysteroid (17-beta) dehydrogenase 11
  Uniprot ID: Q8NBQ5
  ENST ID: ENST00000358290
  CDS Start-End: 317-1219
tggtgtaaaagacaatcgcggccacacaccgcgtgggggctgcgcaaagcagaactaggaagctttgctccggtctggacttcgtccctcccagatctctgagctagcaagcactgcagcccgagccaattgcgaaagaccaacaaagcccagcccagcggaaggaacggtttcggagttgtttttctttgatacgggagttcctccttgctctcgcccctactctttctggtgttagatcgagctaccctctaaaagcagtttagagtggtaaaaaaaaaaaaaaacacaccaaacgctcgcagccacaaaagggatgaaatttcttctggacatcctcctgcttctcccgttactgatcgtctgctccctagagtccttcgtgaagctttttattcctaagaggagaaaatcagtcaccggcgaaatcgtgctgattacaggagctgggcatggaattgggagactgactgcctatgaatttgctaaacttaaaagcaagctggttctctgggatataaataagcatggactggaggaaacagctgccaaatgcaagggactgggtgccaaggttcatacctttgtggtagactgcagcaaccgagaagatatttacagctctgcaaagaaggtgaaggcagaaattggagatgttagtattttagtaaataatgctggtgtagtctatacatcagatttgtttgctacacaagatcctcagattgaaaagacttttgaagttaatgtacttgcacatttctggactacaaaggcatttcttcctgcaatgacgaagaataaccatggccatattgtcactgtggcttcggcagctggacatgtctcggtccccttcttactggcttactgttcaagcaagtttgctgctgttggatttcataaaactttgacagatgaactggctgccttacaaataactggagtcaaaacaacatgtctgtgtcctaatttcgtaaacactggcttcatcaaaaatccaagtacaagtttgggacccactctggaacctgaggaagtggtaaacaggctgatgcatgggattctgactgagcagaagatgatttttattccatcttctatagcttttttaacaacattggaaaggatccttcctgagcgtttcctggcagttttaaaacgaaaaatcagtgttaagtttgatgcagttattggatataaaatgaaagcgcaataagcacctagttttctgaaaactgatttaccaggtttaggttgatgtcatctaatagtgccagaattttaatgtttgaacttctgttttttctaattatccccatttcttcaatatcatttttgaggctttggcagtcttcatttactaccacttgttctttagccaaaagctgattacatatgatataaacagagaaatacctttagaggtgactttaaggaaaatgaagaaaaagaaccaaaatgactttattaaaataatttccaagattatttgtggctcacctgaaggctttgcaaaatttgtaccataaccgtttatttaacatatatttttatttttgattgcacttaaattttgtataatttgtgtttctttttctgttctacataaaatcagaaacttcaagctctctaaataaaatgaaggactatatctagtggtatttcacaatgaatatcatgaactctcaatgggtaggtttcatcctacccattgccactctgtttcctgagagatacctcacattccaatgccaaacatttctgcacagggaagctagaggtggatacacgtgttgcaagtataaaagcatcactgggatttaaggagaattgagagaatgtacccacaaatggcagcaataataaatggatcacacttaaa

SEQ ID NO: 141752 - DNA, 851 bp, Homo sapiens
  Payload ID: 7869
  Gene Symbol: HSD17B11
  Gene Name: hydroxysteroid (17-beta) dehydrogenase 11
  ENST ID: ENST00000507286
  CDS Start-End: 80-850
gatcgagctaccctctaaaagcagtttagagtggtaaaaaaaaaaaaaaacacaccaaacgctcgcagccacaaaagggatgaaatttcttctggacatcctcctgcttctcccgttactgatcgtctgctccctagagtccttcgtgaagctttttattcctaagaggagaaaatcagtcaccggcgaaatcgtgctgattacaggagctgggcatggaattgggagactgactgcctatgaatttgctaaacttaaaagcaagctggttctctgggatataaataagcatggactggaggaaacagctgccaaatgcaagggactgggtgccaaggttcatacctttgtggtagactgcagcaaccgagaagatatttacagctctgcaaagaagactacaaaggcatttcttcctgcaatgacgaagaataaccatggccatattgtcactgtggcttcggcagctggacatgtctcggtccccttcttactggcttactgttcaagcaagtttgctgctgttggatttcataaaactttgacagatgaactggctgccttacaaataactggagtcaaaacaacatgtctgtgtcctaatttcgtaaacactggcttcatcaaaaatccaagtacaagtttgggacccactctggaacctgaggaagtggtaaacaggctgatgcatgggattctgactgagcagaagatgatttttattccatcttctatagcttttttaacaacattggaaaggatccttcctgagcgtttcctggcagttttaaaacgaaaaatcagtgttaagtttgatgcagttattggatataaaatgaaagcgcaataag

SEQ ID NO: 141753 - DNA, 2420 bp, Homo sapiens
  Payload ID: 7870
  Gene Symbol: HSD17B12
  Gene Name: hydroxysteroid (17-beta) dehydrogenase 12
  Uniprot ID: Q53GQ0
  ENST ID: ENST00000278353
  CDS Start-End: 120-1058
aaagtggtgtcggagcagcgcctattagtgtcatcctcaccgtcacggccggcgcctcctcctggattcattcactcgctcttttcattcacgaaggtagtgaggcctagtggaaagccatggagagcgctctccccgccgccggcttcctgtactgggtcggcgcgggcaccgtggcctacctagccctgcgtatttcgtactcgctcttcacggccctccgggtctggggagtggggaatgaggcgggggtcggcccggggctcggagaatgggcagttgtcacaggtagtactgatggaattggaaaatcatatgcagaagagttagcaaagcatggaatgaaggttgtccttatcagcagatcaaaggataaacttgaccaggtttccagtgaaataaaagaaaaattcaaagtggagacaagaaccattgctgttgactttgcatcagaagatatttatgataaaattaaaacaggcttggctggtcttgaaatcggcatcttagtgaacaacgtgggaatgtcgtatgagtatcctgaatactttttggatgttcctgacttggacaatgtgatcaagaaaatgataaatattaatattctttctgtttgtaagatgacacaattggtactgcctggcatggtggaaagatccaaaggggctattctgaacatttcatctggcagtggcatgctccctgtcccactcttgaccatctattctgcaaccaagacttttgtagatttcttctctcagtgcctccatgaggagtataggagcaagggcgtctttgtgcagagtgtcctgccatacttcgtagctacaaaactggctaaaatccggaagccaactttggataagccctctccggagacgtttgtgaagtctgcaattaaaacagtcggcctgcaatcccgaaccaatggatacctgatccatgctcttatgggctcgataatctcaaacctgccttcttggatttatttgaaaatagtcatgaatatgaacaagtctacacgggctcactatctgaagaaaaccaagaagaactaagcattgataactgcattgtaacttggccagatgctccagcatatgcacgttcactgcaaagcaccctactggttttgaaaatctgaccttgtcatttcaatagttattaacatgactaaatattatcttaattaagaggaaaatagaagttgcttttaggggtttctgacatatattctggatactatccgaggtaattttgaagtttaatataaatgctcatatcaaatgaatatagaactaatattgtcgggaacacctaatagaaaggaatactattatagcaaatcacagaatgatagactcaagcataaaacttggcagttttatctgcttcaaaatgccattgatcattattcctgtattttctctgaaactgattataaaaaccaatgtccagctactcttttgtttttgacacttgaagaaatggagatcgatttgatttgtttataagcagacacactgcaatttacaaagatctctttacggttttataaaattatcttccagtttgtacatttatatggaattgttctttatcaagggtagctaatgacatgaaaataattgtgaaatatggaattatttctgacacatgaagcccactaaactatgctttcttataatgcatatttcttctcagtttaaatgtatgtaaatatcgaagctatatggtatgatttataaagataaatgggccaaagtgtacattgagactggcagccatctatggtaccactgaaaccctgacccagaaaagtggcttgcttggacacccagctgcctttgtttctgcattaaaccaatattgatcacacatatgacacaggctagtcctataaaagtaatgacttcatagaaatggcattataatttttaagttgatactctacaggtagctattgatataattagttttaataaaacatgctgcaaccatggtatacaacaaaaatacatttctttggtgattgaaattaaggccgtatttacaatgacttaatataagactgacttttatcctgcttcataacttgtatggagaactcaccaagaaagaattcaatactgtgaaatatgcagcaagaagattggtctttacctaggctgtgtttcctaagctctgagttttcagcaccagtagatttgtattaaaagaaaaaaaaatggggccttagcttctggcttttaattttgccagctaaggacataaaacaaaaataaacaaacaaaaacaaatagccatctgctatcagcatcattatgtaaaagaaaatatattttagcccctaaaattaggaagaatgtaatctcagaataaaggttgtcatttaagttgaataaatatatagctttatg

SEQ ID NO: 141754 - DNA, 994 bp, Homo sapiens
  Payload ID: 7870
  Gene Symbol: HSD17B12
  Gene Name: hydroxysteroid (17-beta) dehydrogenase 12
  Uniprot ID: Q53GQ0
  ENST ID: ENST00000395700
  CDS Start-End: 48-344
cactcgctcttttcattcacgaaggtagtgaggcctagtggaaagccatggagagcgctctccccgccgccggcttcctgtactgggtcggcgcgggcaccgtggcctacctagccctgcgtatttcgtactcgctcttcacggccctccgggtctggggagtggggaatgaggcgggggtcggcccggggctcggagaatgggcagttgtcacaggtagtactgatggaattggaaaatcatatgcagaagagttagcaaagcatggaatgaaggttgtccttatcagcagatcaaaggataaacttgaccaggtttccagtgaaataagcaattatacttgagacctgaattacaatatggcaaagactcttaactaacttctactcaatcaaccagatggataaaccaatgctgttcatttgtttggtaaaacatactaactgatgtccccagtttgctgaccatttgtggccaggaagcttctgtgtataatgcttatatacttttatcctcacaaatcaaattgtttacttattaagagtcaatttgtgtttgtttccaaacttatgttgggtatattttttattaaatattctgtaaaatgatgaactattagtgtaaaagctagagttagttctataaaaactaagttgaatgctctaaaaaaagtgagtaaaattacttctttgaaaaattggccgtcaaattagtgttgaacaaagacaaatgtaaaatattggaagaacttacaaaaaagaaatctgctctcctgattgtttcatatgtgttgaagtttgtgctgtactttactagaactgaaattgtaatcataaatgatagaatatgggtgtgatgcatgcaagaaagactggaattcaagtccgcagatccaatctcaaagacaaggtcttggccctacacagaggattggtgaatgaattacatttatacatggtttaagtgaaaataaaatgattaccatgtgtattta

SEQ ID NO: 141755 - DNA, 611 bp, Homo sapiens
  Payload ID: 7870
  Gene Symbol: HSD17B12
  Gene Name: hydroxysteroid (17-beta) dehydrogenase 12
  ENST ID: ENST00000531185
  CDS Start-End: 120-611
aaagtggtgtcggagcagcgcctattagtgtcatcctcaccgtcacggccggcgcctcctcctggattcattcactcgctcttttcattcacgaaggtagtgaggcctagtggaaagccatggagagcgctctccccgccgccggcttcctgtactgggtcggcgcgggcaccgtggcctacctagccctgcgtatttcgtactcgctcttcacggccctccgggtctggggagtggggaatgaggcgggggtcggcccggggctcggagaatgggcagaagaaaaattcaaagtggagacaagaaccattgctgttgactttgcatcagaagatatttatgataaaattaaaacaggcttggctggtcttgaaatcggcatcttagtgaacaacgtgggaatgtcgtatgagtatcctgaatactttttggatgttcctgacttggacaatgtgatcaagaaaatgataaatattaatattctttctgtttgtaagatgacacaattggtactgcctggcatggtggaaagatccaaaggggctattctgaacatttcatctggcagtggcatgctccctgtcccactcttgaccatctattctgcaacc

SEQ ID NO: 141756 - DNA, 2269 bp, Homo sapiens
  Payload ID: 7871
  Gene Symbol: HSD17B13
  Gene Name: hydroxysteroid (17-beta) dehydrogenase 13
  Uniprot ID: Q7Z5P4
  ENST ID: ENST00000302219
  CDS Start-End: 46-840
gactacacaaggactgaaccagaaggaagaggacagagcaaagccatgaacatcatcctagaaatccttctgcttctgatcaccatcatctactcctacttggagtcgttggtgaagtttttcattcctcagaggagaaaatctgtggctggggagattgttctcattactggagctgggcatggaataggcaggcagactacttatgaatttgcaaaacgacagagcatattggttctgtgggatattaataaggtgaagaaagaagtgggtgatgtaacaatcgtggtgaataatgctgggacagtatatccagccgatcttctcagcaccaaggatgaagagattaccaagacatttgaggtcaacatcctaggacatttttggatcacaaaagcacttcttccatcgatgatggagagaaatcatggccacatcgtcacagtggcttcagtgtgcggccacgaagggattccttacctcatcccatattgttccagcaaatttgccgctgttggctttcacagaggtctgacatcagaacttcaggccttgggaaaaactggtatcaaaacctcatgtctctgcccagtttttgtgaatactgggttcaccaaaaatccaagcacaagattatggcctgtattggagacagatgaagtcgtaagaagtctgatagatggaatacttaccaataagaaaatgatttttgttccatcgtatatcaatatctttctgagactacagaagtttcttcctgaacgcgcctcagcgattttaaatcgtatgcagaatattcaatttgaagcagtggttggccacaaaatcaaaatgaaatgaataaataagctccagccagagatgtatgcatgataatgatatgaatagtttcgaatcaatgctgcaaagctttatttcacattttttcagtcctgataatattaaaaacattggtttggcactagcagcagtcaaacgaacaagattaattacctgtcttcctgtttctcaagaatatttacgtagtttttcataggtctgtttttcctttcatgcctcttaaaaacttctgtgcttacataaacatacttaaaaggttttctttaagatattttatttttccatttaaaggtggacaaaagctacctccctaaaagtaaatacaaagagaacttatttacacagggaaggtttaagactgttcaagtagcattccaatctgtagccatgccacagaatatcaacaagaacacagaatgagtgcacagctaagagatcaagtttcagcaggcagctttatctcaacctggacatattttaagattcagcatttgaaagatttccctagcctcttcctttttcattagcccaaaacggtgcaactctattctggactttattacttgattctgtcttctgtataactctgaagtccaccaaaagtggaccctctatatttcctccctttttatagtcttataagatacattatgaaaggtgaccgactctattttaaatctcagaattttaagttctagccccatgataacctttttctttgtaatttatgctttcatatatccttggtcccagagatgtttagacaattttaggctcaaaaattaaagctaacacaggaaaaggaactgtactggctattacataagaaacaatggacccaagagaagaaaaggaagaaagaaaggttttttggtttttgttttgttttgttttgttttttgtttttttgagatggagtctcactctttcgcccaggctggagtgcagtggtatgatctcagctcactgcaagctccacctcccgggttcacgccattctcctgcctcagcctcctgagtagctgggactacaggcgcccgccaccacacccggctaattttttgtattttttgtagagacggggtttcaccatgttagccaagatggtctcgatctcctgacctcgtgatccacctgcctcggcctcccaaagtgctgggattacgggtgtgagccaccgtgcccagcctttttttttttaatagaaaaaataatccgactcccactacatcaagactaatcttgttttgtgtgtttttcacatgtattatagaatgcttttgcatggactatcctcttgtttttattaaaaacaaatgatttttttaaaagtcacaaaaacaattcactaaaaataaatatgtcattgtgctttaaaaaaataacctcttgtagttataaaataaaacgtttgacttctaaactctg

SEQ ID NO: 141757 - DNA, 2397 bp, Homo sapiens
  Payload ID: 7871
  Gene Symbol: HSD17B13
  Gene Name: hydroxysteroid (17-beta) dehydrogenase 13
  Uniprot ID: Q7Z5P4
  ENST ID: ENST00000328546
  CDS Start-End: 66-968
agacagtacctcctccctaggactacacaaggactgaaccagaaggaagaggacagagcaaagccatgaacatcatcctagaaatccttctgcttctgatcaccatcatctactcctacttggagtcgttggtgaagtttttcattcctcagaggagaaaatctgtggctggggagattgttctcattactggagctgggcatggaataggcaggcagactacttatgaatttgcaaaacgacagagcatattggttctgtgggatattaataagcgcggtgtggaggaaactgcagctgagtgccgaaaactaggcgtcactgcgcatgcgtatgtggtagactgcagcaacagagaagagatctatcgctctctaaatcaggtgaagaaagaagtgggtgatgtaacaatcgtggtgaataatgctgggacagtatatccagccgatcttctcagcaccaaggatgaagagattaccaagacatttgaggtcaacatcctaggacatttttggatcacaaaagcacttcttccatcgatgatggagagaaatcatggccacatcgtcacagtggcttcagtgtgcggccacgaagggattccttacctcatcccatattgttccagcaaatttgccgctgttggctttcacagaggtctgacatcagaacttcaggccttgggaaaaactggtatcaaaacctcatgtctctgcccagtttttgtgaatactgggttcaccaaaaatccaagcacaagattatggcctgtattggagacagatgaagtcgtaagaagtctgatagatggaatacttaccaataagaaaatgatttttgttccatcgtatatcaatatctttctgagactacagaagtttcttcctgaacgcgcctcagcgattttaaatcgtatgcagaatattcaatttgaagcagtggttggccacaaaatcaaaatgaaatgaataaataagctccagccagagatgtatgcatgataatgatatgaatagtttcgaatcaatgctgcaaagctttatttcacattttttcagtcctgataatattaaaaacattggtttggcactagcagcagtcaaacgaacaagattaattacctgtcttcctgtttctcaagaatatttacgtagtttttcataggtctgtttttcctttcatgcctcttaaaaacttctgtgcttacataaacatacttaaaaggttttctttaagatattttatttttccatttaaaggtggacaaaagctacctccctaaaagtaaatacaaagagaacttatttacacagggaaggtttaagactgttcaagtagcattccaatctgtagccatgccacagaatatcaacaagaacacagaatgagtgcacagctaagagatcaagtttcagcaggcagctttatctcaacctggacatattttaagattcagcatttgaaagatttccctagcctcttcctttttcattagcccaaaacggtgcaactctattctggactttattacttgattctgtcttctgtataactctgaagtccaccaaaagtggaccctctatatttcctccctttttatagtcttataagatacattatgaaaggtgaccgactctattttaaatctcagaattttaagttctagccccatgataacctttttctttgtaatttatgctttcatatatccttggtcccagagatgtttagacaattttaggctcaaaaattaaagctaacacaggaaaaggaactgtactggctattacataagaaacaatggacccaagagaagaaaaggaagaaagaaaggttttttggtttttgttttgttttgttttgttttttgtttttttgagatggagtctcactctttcgcccaggctggagtgcagtggtatgatctcagctcactgcaagctccacctcccgggttcacgccattctcctgcctcagcctcctgagtagctgggactacaggcgcccgccaccacacccggctaattttttgtattttttgtagagacggggtttcaccatgttagccaagatggtctcgatctcctgacctcgtgatccacctgcctcggcctcccaaagtgctgggattacgggtgtgagccaccgtgcccagcctttttttttttaatagaaaaaataatccgactcccactacatcaagactaatcttgttttgtgtgtttttcacatgtattatagaatgcttttgcatggactatcctcttgtttttattaaaaacaaatgatttttttaaaagtcacaaaaacaattcactaaaaataaatatgtcattgtgctttaaaaaaataacctcttgtagttataaaataaaacgtttgacttctaaactctg

SEQ ID NO: 141758 - DNA, 1238 bp, Homo sapiens
  Payload ID: 7872
  Gene Symbol: HSD17B14
  Gene Name: hydroxysteroid (17-beta) dehydrogenase 14
  Uniprot ID: Q9BPX1
  ENST ID: ENST00000263278
  CDS Start-End: 268-1080
gggaggagggactgaggcttctggattcctgggtctgtgggaggagggactggggctcctggattcctgggtctgtgggaagagaggagtgtctgagggaggaggggctggggacaaacttccaggtctctagccttcctggcaacgccccccgaggccggacttccaggatccagcctctattgaggatttgatgcgacggcctcacggggctttggaggtgaaagaggcccagagtagagagagagagagaccgacgtacacgggatggctacgggaacgcgctatgccgggaaggtggtggtcgtgaccgggggcgggcgcggcatcggagctgggatcgtgcgcgccttcgtgaacagcggggcccgagtggttatctgcgacaaggatgagtctgggggccgggccctggagcaggagctccctggagctgtctttatcctctgtgatgtgactcaggaagatgatgtgaagaccctggtttctgagaccatccgccgatttggccgcctggattgtgttgtcaacaacgctggccaccacccacccccacagaggcctgaggagacctctgcccagggattccgccagctgctggagctgaacctactggggacgtacaccttgaccaagctcgccctcccctacctgcggaagagtcaagggaatgtcatcaacatctccagcctggtgggggcaatcggccaggcccaggcagttccctatgtggccaccaagggggcagtaacagccatgaccaaagctttggccctggatgaaagtccatatggtgtccgagtcaactgtatctccccaggaaacatctggaccccgctgtgggaggagctggcagccttaatgccagaccctagggccacaatccgagagggcatgctggcccagccactgggccgcatgggccagcccgctgaggtcggggctgcggcagtgttcctggcctccgaagccaacttctgcacgggcattgaactgctcgtgacggggggtgcagagctggggtacgggtgcaaggccagtcggagcacccccgtggacgcccccgatatcccttcctgatttctctcatttctacttggggcccccttcctaggactctcccaccccaaactccaacctgtatcagatgcagcccccaagcccttagactctaagcccagttagcaaggtgccgggtcaccctgcaggttcccataaaaacgatttgcagccagaag

SEQ ID NO: 141759 - DNA, 674 bp, Homo sapiens
  Payload ID: 7872
  Gene Symbol: HSD17B14
  Gene Name: hydroxysteroid (17-beta) dehydrogenase 14
  ENST ID: ENST00000595764
  CDS Start-End: 1-531
gttatctgcgacaaggatgagtctgggggccgggccctggagcaggagctccctggagctgtctttatcctctgtgatgtgactcaggaagatgatgtgaagaccctggtttctgagaccatccgccgatttggccgcctggattgtgttgtcaacaacgctggccaccacccacccccacagaggcctgaggagacctctgcccagggattccgccagctgctggagctgaacctactggggacgtacaccttgaccaagctcgccctcccctacctgcggaagagtcaagggaatgtcatcaacatctccagcctggtgggggcaatcggccaggcccaggcagttccctatgtggccaccaagggggcagtaacagccatgaccaaagctttggccctggatgaaagtccatatggtgtccgagtcaactgccactgggccgcatgggccagcccgctgaggtcggggctgcggcagtgttcctggcctccgaagccaacttctgcacgggcattgaactgctcgtgacggggggtgcagagctggggtacgggtgcaaggccagtcggagcacccccgtggacgcccccgatatcccttcctgatttctctcatttctacttggggcccccttcctaggactctcccaccccaaactccaacctgtatca

SEQ ID NO: 141760 - DNA, 555 bp, Homo sapiens
  Payload ID: 7872
  Gene Symbol: HSD17B14
  Gene Name: hydroxysteroid (17-beta) dehydrogenase 14
  ENST ID: ENST00000596349
  CDS Start-End: 1-321
ggccaggcccaggcagttccctatgtggccaccaagggggcagtaacagccatgaccaaagctttggccctggatgaaagtccatatggtgtccgagtcaactgtatctccccaggaaacatctggaccccgctgtgggaggagctggcagccttaatgccagaccctagggccacaatccgagagggcatgctggcccaggtagaagtggggttcagatccagccactgggccgcatgggccagcccgctgaggtcggggctgcggcagtgttcctggcctccgaagccaacttctgcacgggcattgaactgctcgtgacggggggtgcagagctggggtacgggtgcaaggccagtcggagcacccccgtggacgcccccgatatcccttcctgatttctctcatttctacttggggcccccttcctaggactctcccaccccaaactccaacctgtatcagatgcagcccccaagcccttagactctaagcccagttagcaaggtgccgggtcaccctgcaggttcccataaaaacgatttgcagccagaa

SEQ ID NO: 141761 - DNA, 991 bp, Homo sapiens
  Payload ID: 7872
  Gene Symbol: HSD17B14
  Gene Name: hydroxysteroid (17-beta) dehydrogenase 14
  ENST ID: ENST00000599157
  CDS Start-End: 100-840
ggatccagcctctattgaggatttgatgcgacggcctcacggggctttggaggtgaaagaggcccagagtagagagagagagagaccgacgtacacgggatggctacgggaacgcgctatgccgggaaggtggtggtcgtgaccgggggcgggcgcggcatcggagctgggatcgtgcgcgccttcgtgaacagcggggcccgagtggttatctgcgacaaggatgagtctgggggccgggccctggagcaggagctccctggagctgtctttatcctctgtgatgtgactcaggaagatgatgtgaaggacatttcctttctcctcagaccctggtttctgagaccatccgccgatttggccgcctggattgtgttgtcaacaacgctggccaccctcgccctcccctacctgcggaagagtcaagggaatgtcatcaacatctccagcctggtgggggcaatcggccaggcccaggcagttccctatgtggccaccaagggggcagtaacagccatgaccaaagctttggccctggatgaaagtccatatggtgtccgagtcaactgtatctccccaggaaacatctggaccccgctgtgggaggagctggcagccttaatgccagaccctagggccacaatccgagagggcatgctggcccagccactgggccgcatgggccagcccgctgaggtcggggctgcggcagtgttcctggcctccgaagccaacttctgcacgggcattgaactgctcgtgacggggggtgcagagctggggtacgggtgcaaggccagtcggagcacccccgtggacgcccccgatatcccttcctgatttctctcatttctacttggggcccccttcctaggactctcccaccccaaactccaacctgtatcagatgcagcccccaagcccttagactctaagcccagttagcaaggtgccgggtcaccctgcaggttcccataaaaacgatttgcag

SEQ ID NO: 141762 - DNA, 1455 bp, Homo sapiens
  Payload ID: 7873
  Gene Symbol: HSD17B2
  Gene Name: hydroxysteroid (17-beta) dehydrogenase 2
  Uniprot ID: P37059
  ENST ID: ENST00000199936
  CDS Start-End: 194-1357
aagtgcacactggtttaaattacccactgggaatatgattatgcttaatctatgctcagttgaaaggggctggggctgctttctcccctcccttcttgactctctgttcacagaactcaggctgcctccagccagcctttgcccgctagactcactggccctgagcacttgaaggtgcagcaagtcactgagaatgagcactttcttctcggacacagcatggatctgcctggctgtccccacagtactatgtgggacagtattttgcaaatacaagaagagctcagggcagctgtggagctggatggtctgcctggcaggcctctgtgcagtctgcctgctcatcctgtcccctttttggggcttgatcctcttctcggtgtcatgcttcctcatgtatacttacttatctggccaagaattgttacctgtggatcagaaggcagtcctggtgacaggtggtgattgcgggcttggccatgctttgtgcaagtatctggatgagctgggcttcacggtatttgccggagttttgaatgaaaatggcccaggagctgaggaattgcgaagaacctgctctccgcgcctctcggtgctccaaatggacatcacgaagccagtgcagataaaagatgcttacagcaaggttgcagcaatgctgcaggacagaggactgtgggctgtgatcaacaatgctggggtgcttggctttccaactgatggggagcttcttcttatgactgactacaaacaatgcatggccgtgaacttctttggaactgtggaggtcacaaagacgtttttgcctcttcttagaaaatccaaagggaggctggtgaatgtcagcagcatgggaggaggggccccaatggaaaggctggcatcttatggctcatcaaaggcggctgtgaccatgttctcatcagttatgagactggagctttccaagtggggaattaaagttgcttccatccaacctggaggcttcctaacaaatatcgcaggcaccagtgacaagtgggaaaagctggagaaggacattctggaccacctccccgctgaggtacaggaagactacggccaggactacatcttagcacagcggaatttcctcctattgatcaactcgttagccagcaaggacttctctccggtgctgcgggacatccagcatgctatcttggcgaagagcccttttgcctattacacgccagggaaaggcgcttacttgtggatctgccttgctcactatttgcctattggcatatatgattactttgctaaaagacattttggccaagacaagcccatgcccagagctctaagaatgcctaactacaagaaaaaggccacctaggcaatggaagccctcaaagaagtcggaatgtcatagtcttgaaatgaaagggaaactgggaaactgggtttctcattaaagttgtttcccactctgta

SEQ ID NO: 141763 - DNA, 1302 bp, Homo sapiens
  Payload ID: 7873
  Gene Symbol: HSD17B2
  Gene Name: hydroxysteroid (17-beta) dehydrogenase 2
  ENST ID: ENST00000569351
  CDS Start-End: 1-603
tctggccaagaattgttacctgtggatcagaaggcagtcctggtgacaggtggtgattgcgggcttggccatgctttgtgcaagtatctggatgagctgggcttcacggtatttgccggagttttgaatgaaaatggcccaggagctgaggaattgcgaagaacctgctctccgcgcctctcggtgctccaaatggacatcacgaagccagtgcagataaaagatgcttacagcaaggttgcagcaatgctgcaggacagaggactgtgggctgtgatcaacaatgctggggtgcttggctttccaactgatggggagcttcttcttatgactgactacaaacaatgcatggccgtgaacttctttggaactgtggaggtcacaaagacgtttttgcctcttcttagaaaatccaaagggaggctggtgaatgtcagcagcatgggaggtgagtcagcattttcacacatggtcatggggtgcccatcacaagacatggctcatggcattctatgtgggcgaacaaaaatgcagggcatgcaaaggcagggttgggtcaggattagtcaaattgtatataccctgttggtcttatcacaataaaacctttctcttctttcaaattctttcatgtagaaactcttatctgccttctaactcatccatttgttactggggatttagggttcttatatgtctttataatgtgactgccaacacacatggttggtagatttgtacaggaaatctcacattacaaataatgtcagcatttcaggcaacctgttttcaacacttcgtcaatttaacacactgtgttcagttccctgtaagctgagtaggcaataccttccctctgtttgtgccatcaaacaaaagctgcctgctattgttaacccgaagattgtccccagtgttgagcagcctcaatccagctaggtcaggatgtgatgacactggatagtttgtctctctctgtttccaagaacaaatagtacacaacttgagtcaagggctgaacagtcttgccttttcataaaaaatgcccatgcgtgtcatagcatgccctcttttctgggacagacattttcaaactggggttccttgggctcttgttcagtttagggaagatccatcgacctgacttttgggtcactgggtcactgcagaggtgagagggaagccaaagggatgggctctggatcctaggatcctgccttcaaatagaggagtaccactcttcactgttggatcaattaattctaagtaaaatttcttaaaataaagggtatgactatgctg

SEQ ID NO: 141764 - DNA, 487 bp, Homo sapiens
  Payload ID: 7873
  Gene Symbol: HSD17B2
  Gene Name: hydroxysteroid (17-beta) dehydrogenase 2
  ENST ID: ENST00000563491
  CDS Start-End: 289-487
cttgaagaagacagtattttcctgtgagctagaggatcttcctgttattctccatgcagttcaaattctgtcaattattatccagttagtcatcgctccagaggtggactgtcattaaaaaaaaatagaaggtgtgtgtttgtgggtggtgattgcgggcttggccatgctttgtgcaagtatctggatgagctgggcttcacggtatttgccggagttttgaatgaaaatggcccaggagctgaggaattgcgaagaacctgctctccgcgcctctcggtgctccaaatggacatcacgaagccagtgcagataaaagatgcttacagcaaggttgcagcaatgctgcaggacagaggactgtgggctgtgatcaacaatgctggggtgcttggctttccaactgatggggagcttcttcttatgactgactacaaacaatgcatggccgtgaacttctttggaactgtggaggtcacaaagacgt

SEQ ID NO: 141765 - DNA, 7925 bp, Homo sapiens
  Payload ID: 7873
  Gene Symbol: HSD17B2
  Gene Name: hydroxysteroid (17-beta) dehydrogenase 2
  ENST ID: ENST00000566838
  CDS Start-End: 1-567
cgaagaacctgctctccgcgcctctcggtgctccaaatggacatcacgaagccagtgcagataaaagatgcttacagcaaggttgcagcaatgctgcaggacagaggactgtgggctgtgatcaacaatgctggggtgcttggctttccaactgatggggagcttcttcttatgactgactacaaacaatgcatggccgtgaacttctttggaactgtggaggtcacaaagacgtttttgcctcttcttagaaaatccaaagggaggctggtgaatgtcagcagcatgggaggaggggccccaatggaaaggctggcatcttatggctcatcaaaggcggctgtgaccatgttctcatcagttatgagactggagctttccaagtggggaattaaagttgcttccatccaacctggaggcttcctaacaagtaggtttctgagcccaagaacctgtgatgttcatcctggaaggaaccccgaaggtcctcttggtctgacagagcacacattgaacccctcattgttgtcaaagatgagcacagccagagatcagttaaaggggtgaaaacaggtttgattcagtaactgctgacagtaggggaaagagctaagctccattctgatttgtgcgaaggtgttttaaacattttaaaaggaaaaccagggagaggggaaagcatggctcagtaagtcagattagtgaaaaagtacaagggtccatcagtgtccatgcagaggggccagctgtgtctgccagctggcaattaaagaagtccagattctgtcttcccacagagacagagaaacagaggtctgatccttgatgattcagttccaaaggaatggctctcagatcctggagagaaatgcttctgcattgcaagagctatatatttacaatttaaagttcttttttagtaagtatttcaggaaagggaagtcagggacctctcagggatgtcttggatagaacaaatagtaaaattttctggcaaggttgagccttcttaggcaggcattttagggaggggctggtgttatccaagggacagggccttatgctgctagaaactgtgctggagtttcgttaagtctcttagtgcagggggttgggaaggggttgtcatgcatccagagctctccagctctcagtgtccacccagcagggcttgggttgcatgggcctcttctaagtgccatgctctccatgtatggcttcacccctgcttcctttcacaaaggaattgcgttggcttataagtcatcagcaagcagaggccacactgggttagaaccctggtcccctggtgcctgctctgagcgggacctttctgggacacacactccctccctcaatggtagagttgtatttggtctgtgggaacgcagctcaaaaatggtccctaactgactctcaccaattttgattattttcattgccccacccaaacctgtttaacaatgtataatccattagtttcatactaggtttctttatttggcttcagagcttattttcatctaaaagtttgagcagatagtcagagtaacatttattagtcttttgctgccattggccaagaaggtttccttccccagcttctttatatttcagaaacaatatttttctccttccctctgaagaatatgacccacctcccctccaccccaagaggagaaggcccttctctccactcccctccctgcatatctgaactctgggaagaggcagcctaccccaaggctcagtcttcagttctgggccatcaaacatttaaccgatgattcaagtgaagatgtaaaaagtatgtctaataaaagaccacagactgggaggtattgctaaatgcacgaaagaacaaaccctaaaggtttgaatgttatcccaaatgcaaaagataaaatctatacagaaatattgaaattttggcttgaaacacttgatagctgagaacctcctaaggttgcagagggggtgcaagactcagagaaagggacagagacccagagaaagggatatgggtcaacacgatgacaggcaggaccagggcgatagaaatgcagagaagatgaagtcttgagatgggtttccaacttggggactccctgggttgggaggagaattgaggagaggagatggagaagagacatgggtcagaggtgaagccaaatgtgctggttggactgagagactgggatacaaagagagggaagctgcttgagagctggtacaagagggaaatggtgaatttgattttgaatctggcaggaggattgagtgtttggtgacacagcccaaagagaattccaacacacagatgtaaaattccatttagacgagagagcaatcctgcagttaggttatgattttggagattcagtataattgctatgcataatagttctggagagctgttctcacccacttaccatacattctttactgatgttgatcttaatttttaaaatcgagaaatatataaacagaaaaaagcattatacgcacagggttcaacaaattattataaatcctcttgtacttaacacccagatcaaaaaataaaacattaccaacacccagaagcccctatatgatcctctaccatcacagccctctccaacctcccaataggtaatcacctcttactttttgtaatgatcatttatttgcttttctttgtagagtcacatccagcccacttaatagcatttgactttaactgcttttgcactttcaatggaatcaatatgtatgtatccttttgtgtctggcttctttcactcaatattctgattagacaatttatctgcactgtgtgtagctgtagtccactcatttcattgctgtgcagtattctgtgaatatgccatgattttctactgttgatgggatgtttgagtcccttctagtttgaacaagtatgaacaatgcagctatgaactttctggtacatgtactttggtttttgtgtgcttgaattttcccatgacacatgctgcagagtgaaattgttaccaaaaagggctcctgatccagattccaagagagggtttttggatcttgtgtgagaaagaatttggggtgaatctgtagagtaaagtgaaagcaagtttattaagaaagtaaaggaataaaagaatgcctacttcttaggcagagcagcagcatggactgcttgactgagtatacttatagttacttcttgattatattctagacaaggagtggattattcatgagttttctgggaaagtgggagggatggcctggaactgtgggttcctcccccttttagaccatacagagcaacttctggacattgccatggcatttataaactgtcctggtgctggtggaagtgtcttttagcatgctaatgcattataagtagcatataatgagcagtgaggatgaccagaggtcactgttgttgccatcttgattttggtgggttttggctggctgctttaccacatcctgttttatcagcagagttactatgacttgtatcttgtgataccaatcctgccaacctcttatctaatcctgtgattaagaatgcttaacctccagggaatgcagcccagcaggtctcattctcattttacccagcccctattcaagatggagttactcttgttcaaatgcctctgaaagaatgactagatcatagagttttcctgtcttcagctttactgaatcataccaacctgttttctaaaatattgctccaatttatacctctaccctttctatgtatactccaatcaccacaactctgaggagcaggtttcattgacattattctccaggtgatggtgctgagttggggtggataacatgcccttgggtggggatctggtatcccacgtacaccgtgatggtggaaaatttgagatcagatcctgagatgcagtgcctgggttcttccttttatatcaggctgccccccagtttaaagctatttgatgagctctctcaaggcaagaagcccaagagcagaaggctgagaactcatgtttggagaatgacacttcatacttatatttatttgaaggtaggggcaagaaaaggaatcttcagggacacagacaaggagcttctgaagacattctaagagacattccagatttttctggtgccctgaaataaagatagctaaatcatactgcatgctagattagcagattttaagtgctttatgtgcattatctcccttaatcctcacctgtgaagtaggcatcataatagccccatcttgcagtgagaaaatggaggctcagagaagttaaggaagttccaaagccatagagctgataggaggcagagatgggattttgatacaggtcatatcaataacttcattgtgtgcagcaccaaagtggcatgggagggatgggtagggagagtctgtcaaaagtgggagatgatgacggactgatggcaaaaggctgatggctttgtcactcacagagacagctttggggactctggataggttacccacaagagtggccagaaattccatgaggtgtttaaagaagaatgaggtgtcagcccacgaagacagggacaggggagaggtaggaggaggaatagtagctcacgaaaacatgtttttcaggacctagaaacctccagagtaattgtcatgataatcatttctttaagcacggtgtgtgccttcctgaaaagaaaggagcaattgaaactccgtttgcatttccataagtataattggatttcactggcctacatttccaagtgagcatccctccttctctgcagtcctgatatccaggagtcaccgaagctagcaagggctcatccccacagctatgtgaacaaccaagcactttgcaggagacagcgtgggagaccgcaagctttttggaaagtaatctggcagtagctattaaaattcaaaattaatgtgccttcgaccaggctgtactttgaggactcttgcctacagaaataaagccaaagtaaaaacgaataggtggtgaaagtcgatttactgcagcagtgcctgaaatgctgaaacctataggaacaactggaaggtcattggatagggaagtgattggctaaaagctgttcaatgggaaattctgttgctctggtttaatccatagacattgacaagaagggaggtctgtgatttattactaagccaaaacaaattcatggaaaatataaacaccatagtatgatcctttttgtttttgttatttcctggtaaaaaaaattaaaccaaattcttctatgtgtatgtatgtttgtatgaacaaggaaggaatgtagaagggcacacaaaactgttagttaccttagaggagattaattttaaaaatatgcacatctccttattattcactttatataatgaggaggcagagctgctacattttaaagtaaataaattatttaattttatatgataagcaggtattgtctttattttaaaaatatatttatacttaattgcatgtagtttgtgtattaaaatttatgtgtgaattatattaaaattacacttcatatatttttaaaaacataaatgaaaattatatccattaagtagattaaatatttaaaatcctgtatttatttatttatttattgagatggagtctcactctctcacccaggctggagcgcagtggtgcgatctcagctcactgtaacctctgcctcctgggttcaagcaattctccctgcttcagcctcccaggtagctgggattccaggcacccaccaccatgcccagctaatttttgtattttttagtagacacagggtttcaccatgttggctaggctggtcttgaactcctgacctcaggtgatccacctacctgggcctcccaaagtgctgggattgcaggcatgagccaccatgcccagcctaaaatcctatatttaattggtaggcattacttctatatcttaaaaaattatacgtgtgtatgcttatatgagtgtatatatactatattatatacagtatatattatattgtagacattacatgatatattatatatgtaatagtcaccaaaagatgagtgtctgtggcagcagcatttctaaaggcccagttgaaaataagcgcagtgcccatcacagtatagtggataaataattcatggcatttttatgcaacggaatactatgctgaaaggagaatcaacacacagtgcatggatgaatgtcacaaatatactgttgaataaagaagctgatgctaaacaatgagtgctattcatacgattccatttatataaatgttcaaaaccagccaagatgaatctgtcctattaatcaggaaaatggttactgagaagtgggctgaaaggagagattttaaggctggtcctgttctgttttgtttttttttttctttttttccctttttcttttcttaaaattggagtgtagctctgttgcccaggctagagtgcagtggtgcagtcatataatagctcactgcatcctccaactcgtgggctcgaggggtcctcccacttcagtctcccgaatagctgggactagagataagcaccattgtgcccagctaaatttctgtgtatatgtctatgtctatgtctatgtctatgtctatgtctatgtctatgtctatgtctatgtctatgtgtgtgtatgtgtgtgtgtgtgtatatatatatacacatatatatgtgtgtgtatatatatatacacattatatatgtgtacacacacacacacacacacacacacagacacatatatatatatattttagagatgggatctcgctatgttgcccaggctgatcttgaactcctaggctcaagcgattccccttcctgggcctcccaaagtgctgagattacaggtatgagccacggtgcccagacttgttttgttcttgatctgtttgctagtcacatgggctatcagtttggaaaaatccaattacgtgtgcacttttctgtatgtaggtttagaaatgataataaatgccattataaagcacacattttaaaaggcgtttgcaggccaggcgtggtggctcacgcctgaaatctcagcactttgggaggccgaggcaggtggaccaattgaggtcaggagttcaagaccagcctggccaacatggcaaaaccccgtgtctactaaaaatataaaaattagccgggcatgttggtgatgcctgtaatcccagctactcgggaggctgaggcaagagaatcacttcaactctggaggcagaggttgcagtgagctgagatcacaccactgcacttaagcctgagagacagagaaagactctgtatcccaaaaataaaaaaataaaaaaataaataaataaacgtcatttgcaaagggccatccttcccaacagagacaagcgcctgctccctgacttccttggccttcccaggatctgactcttccctttcctttcaccccagatatcgcaggcaccagtgacaagtgggaaaagctggagaaggacattctggaccacctccccgctgaggtacaggaagactacggccaggactacatcttagcacagcggaatttcctcctattgatcaactcgttagccagcaaggacttctctccggtgctgcgggacatccagcatgctatcttggcgaagagcccttttgcctattacacgccagggaaaggcgcttacttgtggatctgccttgctcactatttgcctattggcatatatgattactttgctaaaagacattttggccaagacaagcccatgcccagagctctaagaatgcctaactacaagaaaaaggccacctaggcaatggaagccctcaaagaagtcggaatgtcatagtcttgaaatgaaagggaaactgggaaactgggtttctcattaaagttgtttcccactctgta

SEQ ID NO: 141766 - DNA, 865 bp, Homo sapiens
  Payload ID: 7873
  Gene Symbol: HSD17B2
  Gene Name: hydroxysteroid (17-beta) dehydrogenase 2
  ENST ID: ENST00000568090
  CDS Start-End: 205-865
aaaagaagccagccacaaagaggaccgatacctatttccatctatttaaaacaaaaatcaggtggtgattgcgggcttggccatgctttgtgcaagtatctggatgagctgggcttcacggtatttgccggagttttgaatgaaaatggcccaggagctgaggaattgcgaagaacctgctctccgcgcctctcggtgctccaaatggacatcacgaagccagtgcagataaaagatgcttacagcaaggttgcagcaatgctgcaggacagaggactgtgggctgtgatcaacaatgctggggtgcttggctttccaactgatggggagcttcttcttatgactgactacaaacaatgcatggccgtgaacttctttggaactgtggaggtcacaaagacgtttttgcctcttcttagaaaatccaaagggaggctggtgaatgtcagcagcatgggaggaggggccccaatggaaaggctggcatcttatggctcatcaaaggcggctgtgaccatgttctcatcagttatgagactggagctttccaagtggggaattaaagttgcttccatccaacctggaggcttcctaacaaatatcgcaggcaccagtgacaagtgggaaaagctggagaaggacattctggaccacctccccgctgaggtacaggaagactacggccaggactacatcttagcacagcggaatttcctcctattgatcaactcgttagccagcaaggacttctctccggtgctgcgggacatccagcatgctatcttggcgaagagcccttttgcctattacacgccagggaaaggcgcttacttgtggatctgccttgctcactatttgcctattg

SEQ ID NO: 141767 - DNA, 551 bp, Homo sapiens
  Payload ID: 7873
  Gene Symbol: HSD17B2
  Gene Name: hydroxysteroid (17-beta) dehydrogenase 2
  ENST ID: ENST00000566213
  CDS Start-End: 152-551
gcttaatctatgctcagttgaaaggggctggggctgctttctcccctcccttcttgactctctgttcacagaactcaggctgcctccagccagcctttgcccgctagactcactggccctgagcacttgaaggtgcagcaagtcactgagaatgagcactttcttctcggacacagcatggatctgcctggctgtccccacagtactatgtgggacagtattttgcaaatacaagaagagctcagggcagctgtggagctggatggtctgcctggcaggcctctgtgcagtctgcctgctcatcctgtcccctttttggggcttgatcctcttctcggtgtcatgcttcctcatgtatacttacttatctggccaagaattgttacctgtggatcagaaggcagtcctggtgacaggactgtgggctgtgatcaacaatgctggggtgcttggctttccaactgatggggagcttcttcttatgactgactacaaacaatgcatggccgtgaacttctttggaactgtggaggtcacaaagacgtttttgc

SEQ ID NO: 141768 - DNA, 984 bp, Homo sapiens
  Payload ID: 7874
  Gene Symbol: HSD17B3
  Gene Name: hydroxysteroid (17-beta) dehydrogenase 3
  Uniprot ID: P37058
  ENST ID: ENST00000375262
  CDS Start-End: 49-831
tacacagagagccacggccagggctgaaacagtctgttgagtgcagccatgggggacgtcctggaacagttcttcatcctcacagggctgctggtgtgcctggcctgcctggcgaagtgcgtgagattctccagatgtgttttactgaactactggaaagttttgccaaagtctttcttgcggtcaatgggacagtgggcagtgatcactggagcaggcgatggaattgggaaagcgtactcgttcgagctagcaaaacgtggactcaatgttgtccttattagccggacgctggaaaaactagaggccattgccacagagatcgagcggactacagggaggagtgtgaagattatacaagcagattttacaaaagatgacatctacgagcatattaaagaaaaacttgcaggcttagaaattggaattttagtcaacaatgtcggaatgcttccaaaccttctcccaagccatttcctgaacgcaccggatgaaatccagagcctcatccattgtaacatcacctccgtagtcaagatgacacagctaattctgaaacatatggaatcaaggcagaaaggtctcatcctgaacatttcttctgggatagccctgtttccttggcctctctactccatgtactcagcttccaaggcgtttgtgtgcgcattttccaaggccctgcaagaggaatataaagcaaaagaagtcatcatccaggcgggctttctgagcctgatcccggcctgggccttctacagcggtgccttccaaaggctgctcctgacacactatgtggcatacctgaagctcaacaccaaggtcaggtagccaggcggtgaggagtccagcacaaccttttcctcaccagtcccatgctggctgaagaggaccagaggagcagaccagcacttcaacctagtccgctgaagatggagggggctggggtcacagaggcatagaatacacattttttgccacttt

SEQ ID NO: 141769 - DNA, 1135 bp, Homo sapiens
  Payload ID: 7874
  Gene Symbol: HSD17B3
  Gene Name: hydroxysteroid (17-beta) dehydrogenase 3
  Uniprot ID: P37058
  ENST ID: ENST00000375263
  CDS Start-End: 49-981
tacacagagagccacggccagggctgaaacagtctgttgagtgcagccatgggggacgtcctggaacagttcttcatcctcacagggctgctggtgtgcctggcctgcctggcgaagtgcgtgagattctccagatgtgttttactgaactactggaaagttttgccaaagtctttcttgcggtcaatgggacagtgggcagtgatcactggagcaggcgatggaattgggaaagcgtactcgttcgagctagcaaaacgtggactcaatgttgtccttattagccggacgctggaaaaactagaggccattgccacagagatcgagcggactacagggaggagtgtgaagattatacaagcagattttacaaaagatgacatctacgagcatattaaagaaaaacttgcaggcttagaaattggaattttagtcaacaatgtcggaatgcttccaaaccttctcccaagccatttcctgaacgcaccggatgaaatccagagcctcatccattgtaacatcacctccgtagtcaagatgacacagctaattctgaaacatatggaatcaaggcagaaaggtctcatcctgaacatttcttctgggatagccctgtttccttggcctctctactccatgtactcagcttccaaggcgtttgtgtgcgcattttccaaggccctgcaagaggaatataaagcaaaagaagtcatcatccaggtgctgaccccatatgctgtctcgactgcaatgacaaagtatctaaatacaaatgtgataaccaagactgctgatgagtttgtcaaagagtcattgaattatgtcacaattggaggtgaaacctgtggctgccttgcccatgaaatcttggcgggctttctgagcctgatcccggcctgggccttctacagcggtgccttccaaaggctgctcctgacacactatgtggcatacctgaagctcaacaccaaggtcaggtagccaggcggtgaggagtccagcacaaccttttcctcaccagtcccatgctggctgaagaggaccagaggagcagaccagcacttcaacctagtccgctgaagatggagggggctggggtcacagaggcatagaatacacattttttgccacttta

SEQ ID NO: 141770 - DNA, 2683 bp, Homo sapiens
  Payload ID: 7875
  Gene Symbol: HSD17B4
  Gene Name: hydroxysteroid (17-beta) dehydrogenase 4
  Uniprot ID: P51659
  ENST ID: ENST00000256216
  CDS Start-End: 134-2344
gctcatcttcctaccagaaatcggcaagtcactgaccctcgtcccgcccccgccattccccgcctcctcctgtcccgcagtcggcgtccagcggctctgcttgttcgtgtgtgtgtcgttgcaggccttattcatgggctcaccgctgaggttcgacgggcgggtggtactggtcaccggcgcgggggcaggattgggccgagcctatgccctggcttttgcagaaagaggagcgttagttgttgtgaatgatttgggaggggacttcaaaggagttggtaaaggctccttagctgctgataaggttgttgaagaaataagaaggagaggtggaaaagcagtggccaactatgattcagtggaagaaggagagaaggttgtgaagacagccctggatgcttttggaagaatagatgttgtggtcaacaatgctggaattctgagggatcgttcctttgctaggataagtgatgaagactgggatataatccacagagttcatttgcggggttcattccaagtgacacgggcagcatgggaacacatgaagaaacagaagtatggaaggattattatgacttcatcagcttcaggaatatatggcaactttggccaggccaattatagtgctgcaaagttgggtcttctgggccttgcaaattctcttgcaattgaaggcaggaaaagcaacattcattgtaacaccattgctcctaatgcgggatcacggatgactcagacagttatgcctgaagatcttgtggaagccctgaagccagagtatgtggcacctcttgtcctttggctttgtcacgagagttgtgaggagaatggtggcttgtttgaggttggagcaggatggattggaaaattacgctgggagcggactcttggagctattgtaagacaaaagaatcacccaatgactcctgaggcagtcaaggctaactggaagaagatctgtgactttgagaatgccagcaagcctcagagtatccaagaatcaactggcagtataattgaagttctgagtaaaatagattcagaaggaggagtttcagcaaatcatactagtcgtgcaacgtctacagcaacatcaggatttgctggagctattggccagaaactccctccattttcttatgcttatacggaactggaagctattatgtatgcccttggagtgggagcgtcaatcaaggatccaaaagatttgaaatttatttatgaaggaagttctgatttctcctgtttgcccaccttcggagttatcataggtcagaaatctatgatgggtggaggattagcagaaattcctggactttcaatcaactttgcaaaggttcttcatggagagcagtacttagagttatataaaccacttcccagagcaggaaaattaaaatgtgaagcagttgttgctgatgtcctagataaaggatccggtgtagtgattattatggatgtctattcttattctgagaaggaacttatatgccacaatcagttctctctctttcttgttggctctggaggctttggtggaaaacggacatcagacaaagtcaaggtagctgtagccatacctaatagacctcctgatgctgtacttacagataccacctctcttaatcaggctgctttgtaccgcctcagtggagactggaatcccttacacattgatcctaactttgctagtctagcaggttttgacaagcccatattacatggattatgtacatttggattttctgccaggcgtgtgttacagcagtttgcagataatgatgtgtcaagattcaaggcaattaaggctcgttttgcaaaaccagtatatccaggacaaactctacaaactgagatgtggaaggaaggaaacagaattcattttcaaaccaaggtccaagaaactggagacattgtcatttcaaatgcatatgtggatcttgcaccaacatctggtacttcagctaagacaccctctgagggcgggaagcttcagagtacctttgtatttgaggaaataggacgccgcctaaaggatattgggcctgaggtggtgaagaaagtaaatgctgtatttgagtggcatataaccaaaggcggaaatattggggctaagtggactattgacctgaaaagtggttctggaaaagtgtaccaaggccctgcaaaaggtgctgctgatacaacaatcatactttcagatgaagatttcatggaggtggtcctgggcaagcttgaccctcagaaggcattctttagtggcaggctgaaggccagagggaacatcatgctgagccagaaacttcagatgattcttaaagactacgccaagctctgaagggcacactacactattaataaaaatggaatcattaaatactctcttcacccaaatatgcttgattattctgcaaaagtgattagaactaagatgcaggggaaattgcttaacattttcagatatcagataactgcagattttcattttctactaatttttcatgtatcattatttttacaaggaactatatataagctagcacataattatccttctgttcttagatctgtatcttcataataaaaaattttgcccaagtcctgtttccttagaatttgtgatagcattgataagttgaaaggaaaattaaatcaataaaggcctttgatacctttg

SEQ ID NO: 141771 - DNA, 2686 bp, Homo sapiens
  Payload ID: 7875
  Gene Symbol: HSD17B4
  Gene Name: hydroxysteroid (17-beta) dehydrogenase 4
  ENST ID: ENST00000442060
  CDS Start-End: 80-1582
attccccgcctcctcctgtcccgcagtcggcgtccagcggctctgcttgttcgtgtgtgtgtcgttgcaggccttattcatgggctcaccgctgaggttcgacgggcgggtggtactggtcaccggcgcgggggcaggattgggccgagcctatgccctggcttttgcagaaagaggagcgttagttgttgtgaatgatttgggaggggacttcaaaggagttggtaaaggctccttagctgctgataaggttgttgaagaaataagaaggagaggtggaaaagcagtggccaactatgattcagtggaagaaggagagaaggttgtgaagacagccctggatgcttttggaagaatagatgttgtggtcaacaatgctggaattctgagggatcgttcctttgctaggataagtgatgaagactgggatataatccacagagttcatttgcggggttcattccaagtgacacgggcagcatgggaacacatgaagaaacagaagtatggaaggattattatgacttcatcagcttcaggaatatatggcaactttggccaggccaattatagtgctgcaaagttgggtcttctgggccttgcaaattctcttgcaattgaaggcaggaaaagcaacattcattgtaacaccattgctcctaatgcgggatcacggatgactcagacagttatgcctgaagatcttgtggaagccctgaagccagagtatgtggcacctcttgtcctttggctttgtcacgagagttgtgaggagaatggtggcttgtttgaggttggagcaggatggattggaaaattacgctgggagcggactcttggagctattgtaagacaaaagaatcacccaatgactcctgaggcagtcaaggctaactggaagaagatctgtgactttgagaatgccagcaagcctcagagtatccaagaatcaactggcagtataattgaagttctgagtaaaatagattcagaaggaggagtttcagcaaatcatactagtcgtgcaacgtctacagcaacatcaggatttgctggagctattggccagaaactccctccattttcttatgcttatacggaactggaagctattatgtatgcccttggagtgggagcgtcaatcaaggatccaaaagatttgaaatttatttatgaaggaagttctgatttctcctgtttgcccaccttcggagttatcataggtcagaaatctatgatgggtggaggattagcagaaattcctggactttcaatcaactttgcaaaggttcttcatggagagcagtacttagagttatataaaccacttcccagagcaggaaaattaaaatgtgaagcagttgttgctgatgtcctagataaaggatccggtgtagtgattattatggatgtctattcttattctgagaaggaacttatatgccacaatcagttctctctctttcttgttggctctggaggctttggtggaaaacggacatcagacaaagtcaagcctacccaatgtgaggatgatgaggatgaagacctttatgatgatctacttccacttactgaatagtagctgtagccatacctaatagacctcctgatgctgtacttacagataccacctctcttaatcaggctgctttgtaccgcctcagtggagactggaatcccttacacattgatcctaactttgctagtctagcaggttttgacaagcccatattacatggattatgtacatttggattttctgccaggcgtgtgttacagcagtttgcagataatgatgtgtcaagattcaaggcaattaaggctcgttttgcaaaaccagtatatccaggacaaactctacaaactgagatgtggaaggaaggaaacagaattcattttcaaaccaagaaactggagacattgtcatttcaaatgcatatgtggatcttgcaccaacatctggtacttcagctaagacaccctctgagggcgggaagcttcagagtacctttgtatttgaggaaataggacgccgcctaaaggatattgggcctgaggtggtgaagaaagtaaatgctgtatttgagtggcatataaccaaaggcggaaatattggggctaagtggactattgacctgaaaagtggttctggaaaagtgtaccaaggccctgcaaaaggtgctgctgatacaacaatcatactttcagatgaagatttcatggaggtggtcctgggcaagcttgaccctcagaaggcattctttagtggcaggctgaaggccagagggaacatcatgctgagccagaaacttcagatgattcttaaagactacgccaagctctgaagggcacactacactattaataaaaatggaatcattaaatactctcttcacccaaatatgcttgattattctgcaaaagtgattagaactaagatgcaggggaaattgcttaacattttcagatatcagataactgcagattttcattttctactaatttttcatgtatcattatttttacaaggaactatatataagctagcacataattatccttctgttcttagatctgtatcttcataataaaaaattttgcccaagtcctgtttccttagaatttgtgatagcattgataagttgaaaggaaaattaaatcaataaaggcctttgataccttt

SEQ ID NO: 141772 - DNA, 2551 bp, Homo sapiens
  Payload ID: 7875
  Gene Symbol: HSD17B4
  Gene Name: hydroxysteroid (17-beta) dehydrogenase 4
  ENST ID: ENST00000414835
  CDS Start-End: 423-2213
aatggttattcttgaggcaccgcatctcttgaggaggaaagagccggaaacacctggtctctcaagcaggattgggccgagcctatgccctggcttttgcagaaagaggagcgttagttgttgtgaatgatttgggaggggacttcaaaggagttggtaaaggctccttagctgctgataaggttgttgaagaaataagaaggagaggtggaaaagcagtggccaactatgattcagtggaagaaggagagaaggttgtgaagacagccctggatgcttttggaagaatagatgttgtggtcaacaatgctggaattctgagggatcgttcctttgctaggataagtgatgaagactgggatataatccacagagttcatttgcggggttcattccaagtgacacgggcagcatgggaacacatgaagaaacagaagattattatgacttcatcagcttcaggaatatatggcaactttggccaggccaattatagtgctgcaaagttgggtcttctgggccttgcaaattctcttgcaattgaaggcaggaaaagcaacattcattgtaacaccattgctcctaatgcgggatcacggatgactcagacagttatgcctgaagatcttgtggaagccctgaagccagagtatgtggcacctcttgtcctttggctttgtcacgagagttgtgaggagaatggtggcttgtttgaggttggagcaggatggattggaaaattacgctgggagcggactcttggagctattgtaagacaaaagaatcacccaatgactcctgaggcagtcaaggctaactggaagaagatctgtgactttgagaatgccagcaagcctcagagtatccaagaatcaactggcagtataattgaagttctgagtaaaatagattcagaaggaggagtttcagcaaatcatactagtcgtgcaacgtctacagcaacatcaggatttgctggagctattggccagaaactccctccattttcttatgcttatacggaactggaagctattatgtatgcccttggagtgggagcgtcaatcaaggatccaaaagatttgaaatttatttatgaaggaagttctgatttctcctgtttgcccaccttcggagttatcataggtcagaaatctatgatgggtggaggattagcagaaattcctggactttcaatcaactttgcaaaggttcttcatggagagcagtacttagagttatataaaccacttcccagagcaggaaaattaaaatgtgaagcagttgttgctgatgtcctagataaaggatccggtgtagtgattattatggatgtctattcttattctgagaaggaacttatatgccacaatcagttctctctctttcttgttggctctggaggctttggtggaaaacggacatcagacaaagtcaaggtagctgtagccatacctaatagacctcctgatgctgtacttacagataccacctctcttaatcaggctgctttgtaccgcctcagtggagactggaatcccttacacattgatcctaactttgctagtctagcaggttttgacaagcccatattacatggattatgtacatttggattttctgccaggcgtgtgttacagcagtttgcagataatgatgtgtcaagattcaaggcaattaaggctcgttttgcaaaaccagtatatccaggacaaactctacaaactgagatgtggaaggaaggaaacagaattcattttcaaaccaaggtccaagaaactggagacattgtcatttcaaatgcatatgtggatcttgcaccaacatctggtacttcagctaagacaccctctgagggcgggaagcttcagagtacctttgtatttgaggaaataggacgccgcctaaaggatattgggcctgaggtggtgaagaaagtaaatgctgtatttgagtggcatataaccaaaggcggaaatattggggctaagtggactattgacctgaaaagtggttctggaaaagtgtaccaaggccctgcaaaaggtgctgctgatacaacaatcatactttcagatgaagatttcatggaggtggtcctgggcaagcttgaccctcagaaggcattctttagtggcaggctgaaggccagagggaacatcatgctgagccagaaacttcagatgattcttaaagactacgccaagctctgaagggcacactacactattaataaaaatggaatcattaaatactctcttcacccaaatatgcttgattattctgcaaaagtgattagaactaagatgcaggggaaattgcttaacattttcagatatcagataactgcagattttcattttctactaatttttcatgtatcattatttttacaaggaactatatataagctagcacataattatccttctgttcttagatctgtatcttcataataaaaaattttgcccaagtcctgtttccttagaatttgtgatagcattgataagttgaaaggaaaattaaatcaataaaggcctttgataccttt

SEQ ID NO: 141773 - DNA, 2740 bp, Homo sapiens
  Payload ID: 7875
  Gene Symbol: HSD17B4
  Gene Name: hydroxysteroid (17-beta) dehydrogenase 4
  Uniprot ID: P51659
  ENST ID: ENST00000504811
  CDS Start-End: 185-2470
ttattcatgggctcaccgctgaggttcgacgggcgggtggtactggtcaccggcgcgggggcaggtgagcatgcgaaggttggaggccgcgccccttgctgaggcgcagctggctgctcttttcgggccggcatacgcgcgcagccgcagctgaggtcaccccgctgaggtggtggggaggggaatggttattcttgaggcaccgcatctcttgaggaggaaagagccggaaacacctggtctctcaagcaggattgggccgagcctatgccctggcttttgcagaaagaggagcgttagttgttgctttcaaaatctatgcaataaccctatggagaagatcatttcacaatgcagattctttgtttcaatgaatgatttgggaggggacttcaaaggagttggtaaaggctccttagctgctgataaggttgttgaagaaataagaaggagaggtggaaaagcagtggccaactatgattcagtggaagaaggagagaaggttgtgaagacagccctggatgcttttggaagaatagatgttgtggtcaacaatgctggaattctgagggatcgttcctttgctaggataagtgatgaagactgggatataatccacagagttcatttgcggggttcattccaagtgacacgggcagcatgggaacacatgaagaaacagaagtatggaaggattattatgacttcatcagcttcaggaatatatggcaactttggccaggccaattatagtgctgcaaagttgggtcttctgggccttgcaaattctcttgcaattgaaggcaggaaaagcaacattcattgtaacaccattgctcctaatgcgggatcacggatgactcagacagttatgcctgaagatcttgtggaagccctgaagccagagtatgtggcacctcttgtcctttggctttgtcacgagagttgtgaggagaatggtggcttgtttgaggttggagcaggatggattggaaaattacgctgggagcggactcttggagctattgtaagacaaaagaatcacccaatgactcctgaggcagtcaaggctaactggaagaagatctgtgactttgagaatgccagcaagcctcagagtatccaagaatcaactggcagtataattgaagttctgagtaaaatagattcagaaggaggagtttcagcaaatcatactagtcgtgcaacgtctacagcaacatcaggatttgctggagctattggccagaaactccctccattttcttatgcttatacggaactggaagctattatgtatgcccttggagtgggagcgtcaatcaaggatccaaaagatttgaaatttatttatgaaggaagttctgatttctcctgtttgcccaccttcggagttatcataggtcagaaatctatgatgggtggaggattagcagaaattcctggactttcaatcaactttgcaaaggttcttcatggagagcagtacttagagttatataaaccacttcccagagcaggaaaattaaaatgtgaagcagttgttgctgatgtcctagataaaggatccggtgtagtgattattatggatgtctattcttattctgagaaggaacttatatgccacaatcagttctctctctttcttgttggctctggaggctttggtggaaaacggacatcagacaaagtcaaggtagctgtagccatacctaatagacctcctgatgctgtacttacagataccacctctcttaatcaggctgctttgtaccgcctcagtggagactggaatcccttacacattgatcctaactttgctagtctagcaggttttgacaagcccatattacatggattatgtacatttggattttctgccaggcgtgtgttacagcagtttgcagataatgatgtgtcaagattcaaggcaattaaggctcgttttgcaaaaccagtatatccaggacaaactctacaaactgagatgtggaaggaaggaaacagaattcattttcaaaccaaggtccaagaaactggagacattgtcatttcaaatgcatatgtggatcttgcaccaacatctggtacttcagctaagacaccctctgagggcgggaagcttcagagtacctttgtatttgaggaaataggacgccgcctaaaggatattgggcctgaggtggtgaagaaagtaaatgctgtatttgagtggcatataaccaaaggcggaaatattggggctaagtggactattgacctgaaaagtggttctggaaaagtgtaccaaggccctgcaaaaggtgctgctgatacaacaatcatactttcagatgaagatttcatggaggtggtcctgggcaagcttgaccctcagaaggcattctttagtggcaggctgaaggccagagggaacatcatgctgagccagaaacttcagatgattcttaaagactacgccaagctctgaagggcacactacactattaataaaaatggaatcattaaatactctcttcacccaaatatgcttgattattctgcaaaagtgattagaactaagatgcaggggaaattgcttaacattttcagatatcagataactgcagattttcattttctactaatttttcatgtatcattatttttacaaggaactatatataagctagcacataattatccttctgttcttagatctgtatcttcataataaaaaattttgcccaagtcctgtttc

SEQ ID NO: 141774 - DNA, 2494 bp, Homo sapiens
  Payload ID: 7875
  Gene Symbol: HSD17B4
  Gene Name: hydroxysteroid (17-beta) dehydrogenase 4
  Uniprot ID: P51659
  ENST ID: ENST00000515320
  CDS Start-End: 80-2236
attccccgcctcctcctgtcccgcagtcggcgtccagcggctctgcttgttcgtgtgtgtgtcgttgcaggccttattcatgggctcaccgctgaggttcgacgggcgggtggtactggtcaccggcgcgggggcagtgaatgatttgggaggggacttcaaaggagttggtaaaggctccttagctgctgataaggttgttgaagaaataagaaggagaggtggaaaagcagtggccaactatgattcagtggaagaaggagagaaggttgtgaagacagccctggatgcttttggaagaatagatgttgtggtcaacaatgctggaattctgagggatcgttcctttgctaggataagtgatgaagactgggatataatccacagagttcatttgcggggttcattccaagtgacacgggcagcatgggaacacatgaagaaacagaagtatggaaggattattatgacttcatcagcttcaggaatatatggcaactttggccaggccaattatagtgctgcaaagttgggtcttctgggccttgcaaattctcttgcaattgaaggcaggaaaagcaacattcattgtaacaccattgctcctaatgcgggatcacggatgactcagacagttatgcctgaagatcttgtggaagccctgaagccagagtatgtggcacctcttgtcctttggctttgtcacgagagttgtgaggagaatggtggcttgtttgaggttggagcaggatggattggaaaattacgctgggagcggactcttggagctattgtaagacaaaagaatcacccaatgactcctgaggcagtcaaggctaactggaagaagatctgtgactttgagaatgccagcaagcctcagagtatccaagaatcaactggcagtataattgaagttctgagtaaaatagattcagaaggaggagtttcagcaaatcatactagtcgtgcaacgtctacagcaacatcaggatttgctggagctattggccagaaactccctccattttcttatgcttatacggaactggaagctattatgtatgcccttggagtgggagcgtcaatcaaggatccaaaagatttgaaatttatttatgaaggaagttctgatttctcctgtttgcccaccttcggagttatcataggtcagaaatctatgatgggtggaggattagcagaaattcctggactttcaatcaactttgcaaaggttcttcatggagagcagtacttagagttatataaaccacttcccagagcaggaaaattaaaatgtgaagcagttgttgctgatgtcctagataaaggatccggtgtagtgattattatggatgtctattcttattctgagaaggaacttatatgccacaatcagttctctctctttcttgttggctctggaggctttggtggaaaacggacatcagacaaagtcaaggtagctgtagccatacctaatagacctcctgatgctgtacttacagataccacctctcttaatcaggctgctttgtaccgcctcagtggagactggaatcccttacacattgatcctaactttgctagtctagcaggttttgacaagcccatattacatggattatgtacatttggattttctgccaggcgtgtgttacagcagtttgcagataatgatgtgtcaagattcaaggcaattaaggctcgttttgcaaaaccagtatatccaggacaaactctacaaactgagatgtggaaggaaggaaacagaattcattttcaaaccaaggtccaagaaactggagacattgtcatttcaaatgcatatgtggatcttgcaccaacatctggtacttcagctaagacaccctctgagggcgggaagcttcagagtacctttgtatttgaggaaataggacgccgcctaaaggatattgggcctgaggtggtgaagaaagtaaatgctgtatttgagtggcatataaccaaaggcggaaatattggggctaagtggactattgacctgaaaagtggttctggaaaagtgtaccaaggccctgcaaaaggtgctgctgatacaacaatcatactttcagatgaagatttcatggaggtggtcctgggcaagcttgaccctcagaaggcattctttagtggcaggctgaaggccagagggaacatcatgctgagccagaaacttcagatgattcttaaagactacgccaagctctgaagggcacactacactattaataaaaatggaatcattaaatactctcttcacccaaatatgcttgattattctgcaaaagtgattagaactaagatgcaggggaaattgcttaacattttcagatatcagataactgcagattttcattttctactaatttttcatgtatcattatttttacaaggaactatatataagctagcacataattatccttctgttcttagatctgtatcttcataataaaaaattttgccc

SEQ ID NO: 141775 - DNA, 2589 bp, Homo sapiens
  Payload ID: 7875
  Gene Symbol: HSD17B4
  Gene Name: hydroxysteroid (17-beta) dehydrogenase 4
  ENST ID: ENST00000510025
  CDS Start-End: 176-2314
tctgcttgttcgtgtgtgtgtcgttgcaggccttattcatgggctcaccgctgaggttcgacgggcgggtggtactggtcaccggcgcgggggcaggattgggccgagcctatgccctggcttttgcagaaagaggagcgttagttgttgctttcaaaatctatgcaataaccctatggagaagatcatttcacaatgcagattctttgtttcaatgaatgatttgggaggggacttcaaaggagttggtaaaggctccttagctgctgataaggttgttgaagaaataagaaggagaggtggaaaagcagtggccaactatgattcagtggaagaaggagagaaggttgtgaagacagccctggatgcttttggaagaatagatgttgtggtcaacaatgctggaattctgagggatcgttcctttgctaggataagtgatgaagactgggatataatccacagagttcatttgcggggttcattccaagtgacacgggcagcatgggaacacatgaagaaacagaagtatggaaggattattatgacttcatcagcttcaggaatatatggcaactttggccaggccaattatagtgctgcaaagttgggtcttctgggccttgcaaattctcttgcaattgaaggcaggaaaagcaacattcattgtaacaccattgctcctaatgcgggatcacggatgactcagacagttatgcctgaagatcttgtggaagccctgaagccagagtatgtggcacctcttgtcctttggctttgtcacgagagttgtgaggagaatggtggcttgtttgaggttggagcaggatggattggaaaattacgctgggagcggactcttggagctattgtaagacaaaagaatcacccaatgactcctgaggcagtcaaggctaactggaagaagatctgtgactttgagaatgccagcaagcctcagagtatccaagaatcaactggcagtataattgaagttctgagtaaaatagattcagaaggaggagtttcagcaaatcatactagtcgtgcaacgtctacagcaacatcaggatttgctggagctattggccagaaactccctccattttcttatgcttatacggaactggaagctattatgtatgcccttggagtgggagcgtcaatcaaggatccaaaagatttgaaatttatttatgaaggaagttctgatttctcctgtttgcccaccttcggagttatcataggtcagaaatctatgatgggtggaggattagcagaaattcctggactttcaatcaactttgcaaaggttcttcatggagagcagtacttagagttatataaaccacttcccagagcaggaaaattaaaatgtgaagcagttgttgctgatgtcctagataaaggatccggtgtagtgattattatggatgtctattcttattctgagaaggaacttatatgccacaatcagttctctctctttcttgttggctctggaggctttggtggaaaacggacatcagacaaagtcaaggtagctgtagccatacctaatagacctcctgatgctgtacttacagataccacctctcttaatcaggctgctttgtaccgcctcagtggagactggaatcccttacacattgatcctaactttgctagtctagcaggttttgacaagcccatattacatggattatgtacatttggattttctgccaggcgtgtgttacagcagtttgcagataatgatgtgtcaagattcaaggcaattaaggctcgttttgcaaaaccagtatatccaggacaaactctacaaactgagatgtggaaggaaggaaacagaattcattttcaaaccaaggtccaagaaactggagacattgtcatttcaaatgcatatgtggatcttgcaccaacatctggtacttcagctaagacaccctctgagggcgggaagcttcagagtacctttgtatttgaggaaataggacgccgcctaaaggatattgggcctgaggtggtgaagaaagtaaatgctgtatttgagtggcatataaccaaaggcggaaatattggggctaagtggactattgacctgaaaagtggttctggaaaagtgtaccaaggccctgcaaaaggtgctgctgatacaacaatcatactttcagatgaagatttcatggaggtggtcctgggcaagcttgaccctcagaaggcattctttagtggcaggctgaaggccagagggaacatcatgctgagccagaaacttcagatgattcttaaagactacgccaagctctgaagggcacactacactattaataaaaatggaatcattaaatactctcttcacccaaatatgcttgattattctgcaaaagtgattagaactaagatgcaggggaaattgcttaacattttcagatatcagataactgcagattttcattttctactaatttttcatgtatcattatttttacaaggaactatatataagctagcacataattatccttctgttcttagatctgtatcttcataataaaaaattttgcccaagtcctgtttccttag

SEQ ID NO: 141776 - DNA, 2225 bp, Homo sapiens
  Payload ID: 7875
  Gene Symbol: HSD17B4
  Gene Name: hydroxysteroid (17-beta) dehydrogenase 4
  ENST ID: ENST00000513628
  CDS Start-End: 246-2045
aatagtgcctgactgtcttttggaagaagagttagtgtctttgatttagaattaagctaagaagagcttttagtttctgcttcccttgtaacaactggggtaaaaaagaagctgagaaagataggatttgctggcaaagggggcctatgttggtgcttttcttggtgctgcaacgggactgagatataatccacagagttcatttgcggggttcattccaagtgacacgggcagcatgggaacacatgaagaaacagaagtatggaaggattattatgacttcatcagcttcaggaatatatggcaactttggccaggccaattatagtgctgcaaagttgggtcttctgggccttgcaaattctcttgcaattgaaggcaggaaaagcaacattcattgtaacaccattgctcctaatgcgggatcacggatgactcagacagttatgcctgaagatcttgtggaagccctgaagccagagtatgtggcacctcttgtcctttggctttgtcacgagagttgtgaggagaatggtggcttgtttgaggttggagcaggatggattggaaaattacgctgggagcggactcttggagctattgtaagacaaaagaatcacccaatgactcctgaggcagtcaaggctaactggaagaagatctgtgactttgagaatgccagcaagcctcagagtatccaagaatcaactggcagtataattgaagttctgagtaaaatagattcagaaggaggagtttcagcaaatcatactagtcgtgcaacgtctacagcaacatcaggatttgctggagctattggccagaaactccctccattttcttatgcttatacggaactggaagctattatgtatgcccttggagtgggagcgtcaatcaaggatccaaaagatttgaaatttatttatgaaggaagttctgatttctcctgtttgcccaccttcggagttatcataggtcagaaatctatgatgggtggaggattagcagaaattcctggactttcaatcaactttgcaaaggttcttcatggagagcagtacttagagttatataaaccacttcccagagcaggaaaattaaaatgtgaagcagttgttgctgatgtcctagataaaggatccggtgtagtgattattatggatgtctattcttattctgagaaggaacttatatgccacaatcagttctctctctttcttgttggctctggaggctttggtggaaaacggacatcagacaaagtcaaggtagctgtagccatacctaatagacctcctgatgctgtacttacagataccacctctcttaatcaggctgctttgtaccgcctcagtggagactggaatcccttacacattgatcctaactttgctagtctagcaggttttgacaagcccatattacatggattatgtacatttggattttctgccaggcgtgtgttacagcagtttgcagataatgatgtgtcaagattcaaggcaattaaggctcgttttgcaaaaccagtatatccaggacaaactctacaaactgagatgtggaaggaaggaaacagaattcattttcaaaccaaggtccaagaaactggagacattgtcatttcaaatgcatatgtggatcttgcaccaacatctggtacttcagctaagacaccctctgagggcgggaagcttcagagtacctttgtatttgaggaaataggacgccgcctaaaggatattgggcctgaggtggtgaagaaagtaaatgctgtatttgagtggcatataaccaaaggcggaaatattggggctaagtggactattgacctgaaaagtggttctggaaaagtgtaccaaggccctgcaaaaggtgctgctgatacaacaatcatactttcagatgaagatttcatggaggtggtcctgggcaagcttgaccctcagaaggcattctttagtggcaggctgaaggccagagggaacatcatgctgagccagaaacttcagatgattcttaaagactacgccaagctctgaagggcacactacactattaataaaaatggaatcattaaatactctcttcacccaaatatgcttgattattctgcaaaagtgattagaactaagatgcaggggaaattgcttaacattttcagatatcagataactgcagattttcattttctactaatttttcatgtatcattattttta

SEQ ID NO: 141777 - DNA, 2314 bp, Homo sapiens
  Payload ID: 7875
  Gene Symbol: HSD17B4
  Gene Name: hydroxysteroid (17-beta) dehydrogenase 4
  ENST ID: ENST00000509514
  CDS Start-End: 632-2056
gtaacaactggggtaaaaaagaagctgagaaagataggatttgctggcaaagggggcctatgttggtgcttttcttggtgctgcaacgggactgagatataatccacagagttcatttgcggggttcattccaagtgacacgggcagcatgggaacacatgaagaaacagaagtatggaaggattattatgacttcatcagcttcaggaatatatggcaactttggccaggccaattatagtgctgcaaagttgggtcttctgggccttgcaaattctcttgcaattgaaggcaggaaaagcaacattcattgtaacaccattgctcctaatgcgggatcacggatgactcagacagttatgcctgaagatcttgtggaagccctgaagccagagtatgtggcacctcttgtcctttggctttgtcacgagagttgtgaggagaatggtggcttgtttgaggttggagcaggatggattggaaaattacgctgggagcggactcttggagctattgtaagacaaaagaatcacccaatgactcctgaggcagtcaaggctaactggaagaagatctgtgactttgagaatgccagcaagcctcagagtatccaaggctggagtatggtggcatgatctcagctcactacaacctctgccccttgggttcaagcgattctcccacctcagcctcccaagtagctgggattacagaatcaactggcagtataattgaagttctgagtaaaatagattcagaaggaggagtttcagcaaatcatactagtcgtgcaacgtctacagcaacatcaggatttgctggagctattggccagaaactccctccattttcttatgcttatacggaactggaagctattatgtatgcccttggagtgggagcgtcaatcaaggatccaaaagatttgaaatttatttatgaaggaagttctgatttctcctgtttgcccaccttcggagttatcataggtcagaaatctatgatgggtggaggattagcagaaattcctggactttcaatcaactttgcaaaggttcttcatggagagcagtacttagagttatataaaccacttcccagagcaggaaaattaaaatgtgaagcagttgttgctgatgtcctagataaaggatccggtgtagtgattattatggatgtctattcttattctgagaaggaacttatatgccacaatcagttctctctctttcttgttggctctggaggctttggtggaaaacggacatcagacaaagtcaaggtagctgtagccatacctaatagacctcctgatgctgtacttacagataccacctctcttaatcaggctgctttgtaccgcctcagtggagactggaatcccttacacattgatcctaactttgctagtctagcaggttttgacaagcccatattacatggattatgtacatttggattttctgccaggcgtgtgttacagcagtttgcagataatgatgtgtcaagattcaaggcaattaaggctcgttttgcaaaaccagtatatccaggacaaactctacaaactgagatgtggaaggaaggaaacagaattcattttcaaaccaaggtccaagaaactggagacattgtcatttcaaatgcatatgtggatcttgcaccaacatctggtacttcagctaagacaccctctgagggcgggaagcttcagagtacctttgtatttgaggaaataggacgccgcctaaaggatattgggcctgaggtggtgaagaaagtaaatgctgtatttgagtggcatataaccaaaggcggaaatattggggctaagtggactattgacctgaaaagtggttctggaaaagtgtaccaaggccctgcaaaaggtgctgctgatacaacaatcatactttcagatgaagatttcatggaggtggtcctgggcaagcttgaccctcagaaggcattctttagtggcaggctgaaggccagagggaacatcatgctgagccagaaacttcagatgattcttaaagactacgccaagctctgaagggcacactacactattaataaaaatggaatcattaaatactctcttcacccaaatatgcttgattattctgcaaaagtgattagaactaagatgcaggggaaattgcttaacattttcagatatcagataactgcagattttcattttctactaatttttcatgtatcattatttttacaaggaactatatataagctagcacataattatccttctgttcttagatctgtatcttcataataaaaaattttgccc

SEQ ID NO: 141778 - DNA, 1512 bp, Homo sapiens
  Payload ID: 7876
  Gene Symbol: HSD17B6
  Gene Name: hydroxysteroid (17-beta) dehydrogenase 6
  Uniprot ID: O14756
  ENST ID: ENST00000322165
  CDS Start-End: 111-1064
agcagttggggcaggaggaagccgactgctgcctggtctgcaaagaagtcctttcaagtctctaggactggactcttcctaagcaagtccgagaaggaagcaccctcactatgtggctctacctggcggccttcgtgggcctgtactaccttctgcactggtaccgggagaggcaggtggtgagccacctccaagacaagtatgtctttatcacgggctgtgactcgggctttgggaacctgctggccagacagctggatgcacgaggcttgagagtgctggctgcgtgtctgacggagaagggggccgagcagctgaggggccagacgtctgacaggctggagacggtgaccctggatgttaccaagatggagagcatcgctgcagctactcagtgggtgaaggagcatgtgggggacagaggactctggggactggtgaacaatgcaggcattcttacaccaattaccttatgtgagtggctgaacactgaggactctatgaatatgctcaaagtgaacctcattggtgtgatccaggtgaccttgagcatgcttcctttggtgaggagagcacggggaagaattgtcaatgtctccagcattctgggaagagttgctttctttgtaggaggctactgtgtctccaagtatggagtggaagccttttcagatattctgaggcgtgagattcaacattttggggtgaaaatcagcatagttgaacctggctacttcagaacgggaatgacaaacatgacacagtccttagagcgaatgaagcaaagttggaaagaagcccccaagcatattaaggagacctatggacagcagtattttgatgccctttacaatatcatgaaggaagggctgttgaattgtagcacaaacctgaacctggtcactgactgcatggaacatgctctgacatcggtgcatccgcgaactcgatattcagctggctgggatgctaaatttttcttcatccctctatcttatttacctacatcactggcagactacattttgactagatcttggcccaaaccagcccaggcagtctaaagaaaactgggttggtgcttcttggaatgaaggcaaaaatctgaaattgttagtgtctcagtaatcctgatttagaacccaggctttttgtaacaatgtgttttcttgcctaaattcatttatctggcatcatcagagtactaacatgtttatatttcagatatccaaagcttaccactttaggtgatgaatctttactattttagcccttttttgatgagactatttgtctaaagtgaatcatttgttcttgccttattaaacagagtagatggaaaacaatttaacctattttgaagtcatttctttatgaatatgaataattgttctatgctttaataatctattgtgaggaaactactaagaaatatgttggtgtgtttgtccttacttgaaatgggtctgtattatggtacttttaataaatatttgatttttctttctcttc

SEQ ID NO: 141779 - DNA, 1525 bp, Homo sapiens
  Payload ID: 7876
  Gene Symbol: HSD17B6
  Gene Name: hydroxysteroid (17-beta) dehydrogenase 6
  Uniprot ID: O14756
  ENST ID: ENST00000555159
  CDS Start-End: 178-1131
actccgctcccgaacccattcctcgcctccatcacctccaccgtagttgagccagcgatagtactgagagtagggaaagagcctccggtaataaagtttaagcagctcgggcagctcggtggggtcaaacgtctccattgagcgcggaactcgccacgagaaggaagcaccctcactatgtggctctacctggcggccttcgtgggcctgtactaccttctgcactggtaccgggagaggcaggtggtgagccacctccaagacaagtatgtctttatcacgggctgtgactcgggctttgggaacctgctggccagacagctggatgcacgaggcttgagagtgctggctgcgtgtctgacggagaagggggccgagcagctgaggggccagacgtctgacaggctggagacggtgaccctggatgttaccaagatggagagcatcgctgcagctactcagtgggtgaaggagcatgtgggggacagaggactctggggactggtgaacaatgcaggcattcttacaccaattaccttatgtgagtggctgaacactgaggactctatgaatatgctcaaagtgaacctcattggtgtgatccaggtgaccttgagcatgcttcctttggtgaggagagcacggggaagaattgtcaatgtctccagcattctgggaagagttgctttctttgtaggaggctactgtgtctccaagtatggagtggaagccttttcagatattctgaggcgtgagattcaacattttggggtgaaaatcagcatagttgaacctggctacttcagaacgggaatgacaaacatgacacagtccttagagcgaatgaagcaaagttggaaagaagcccccaagcatattaaggagacctatggacagcagtattttgatgccctttacaatatcatgaaggaagggctgttgaattgtagcacaaacctgaacctggtcactgactgcatggaacatgctctgacatcggtgcatccgcgaactcgatattcagctggctgggatgctaaatttttcttcatccctctatcttatttacctacatcactggcagactacattttgactagatcttggcccaaaccagcccaggcagtctaaagaaaactgggttggtgcttcttggaatgaaggcaaaaatctgaaattgttagtgtctcagtaatcctgatttagaacccaggctttttgtaacaatgtgttttcttgcctaaattcatttatctggcatcatcagagtactaacatgtttatatttcagatatccaaagcttaccactttaggtgatgaatctttactattttagcccttttttgatgagactatttgtctaaagtgaatcatttgttcttgccttattaaacagagtagatggaaaacaatttaacctattttgaagtcatttctttatgaatatgaataattgttctatgctttaataatctattgtgaggaaactactaagaaatatgttggtgtgtttgtccttacttg

SEQ ID NO: 141780 - DNA, 1751 bp, Homo sapiens
  Payload ID: 7876
  Gene Symbol: HSD17B6
  Gene Name: hydroxysteroid (17-beta) dehydrogenase 6
  Uniprot ID: O14756
  ENST ID: ENST00000554643
  CDS Start-End: 350-1303
tcccacttggtgcgcgcgggggctgcgggagacgcagcagtttgcgatctgcccacgcgttcgggcactagggccaccgctcttgtgggcagaaggccgcgtccattccaggaagaggatcttctccggaaatctgatcaaggatgacactggtgagaaccctatgagggagtgaagcagcctggactcttaccacaagagggaggtgttataagagcaatgcagaggttggagtgggcagcagttggggcaggaggaagccgactgctgcctggtctgcaaagaagtcctttcaagtctctaggactggactcttcctaagcaagtccgagaaggaagcaccctcactatgtggctctacctggcggccttcgtgggcctgtactaccttctgcactggtaccgggagaggcaggtggtgagccacctccaagacaagtatgtctttatcacgggctgtgactcgggctttgggaacctgctggccagacagctggatgcacgaggcttgagagtgctggctgcgtgtctgacggagaagggggccgagcagctgaggggccagacgtctgacaggctggagacggtgaccctggatgttaccaagatggagagcatcgctgcagctactcagtgggtgaaggagcatgtgggggacagaggactctggggactggtgaacaatgcaggcattcttacaccaattaccttatgtgagtggctgaacactgaggactctatgaatatgctcaaagtgaacctcattggtgtgatccaggtgaccttgagcatgcttcctttggtgaggagagcacggggaagaattgtcaatgtctccagcattctgggaagagttgctttctttgtaggaggctactgtgtctccaagtatggagtggaagccttttcagatattctgaggcgtgagattcaacattttggggtgaaaatcagcatagttgaacctggctacttcagaacgggaatgacaaacatgacacagtccttagagcgaatgaagcaaagttggaaagaagcccccaagcatattaaggagacctatggacagcagtattttgatgccctttacaatatcatgaaggaagggctgttgaattgtagcacaaacctgaacctggtcactgactgcatggaacatgctctgacatcggtgcatccgcgaactcgatattcagctggctgggatgctaaatttttcttcatccctctatcttatttacctacatcactggcagactacattttgactagatcttggcccaaaccagcccaggcagtctaaagaaaactgggttggtgcttcttggaatgaaggcaaaaatctgaaattgttagtgtctcagtaatcctgatttagaacccaggctttttgtaacaatgtgttttcttgcctaaattcatttatctggcatcatcagagtactaacatgtttatatttcagatatccaaagcttaccactttaggtgatgaatctttactattttagcccttttttgatgagactatttgtctaaagtgaatcatttgttcttgccttattaaacagagtagatggaaaacaatttaacctattttgaagtcatttctttatgaatatgaataattgttctatgctttaataatctattgtgaggaaactactaagaaatatgttggtgtgtttgtccttacttgaaatgggtctgtattatggtacttttaataaatatttgatttttctttctcttc

SEQ ID NO: 141781 - DNA, 592 bp, Homo sapiens
  Payload ID: 7876
  Gene Symbol: HSD17B6
  Gene Name: hydroxysteroid (17-beta) dehydrogenase 6
  ENST ID: ENST00000554155
  CDS Start-End: 327-592
agtttgcgatctgcccacgcgttcgggcactagggccaccgctcttgtgggcagaaggccgcgtccattccaggaagaggatcttctccggaaattaacagatctgattctgcagctgatcaaggatgacactggtgagaaccctatgagggagtgaagcagcctggactcttaccacaagagggaggtgttataagagcaatgcagaggttggagtgggcagcagttggggcaggaggaagccgactgctgcctggtctgcaaagaagtcctttcaagtctctaggactggactcttcctaagcaagtccggaagcaccctcactatgtggctctacctggcggccttcgtgggcctgtactaccttctgcactggtaccgggagaggcaggtggtgagccacctccaagacaagtatgtctttatcacgggctgtgactcgggctttgggaacctgctggccagacagctggatgcacgaggcttgagagtgctggctgcgtgtctgacggagaagggggccgagcagctgaggggccagacgtctgacaggctggagacggtgaccctggatgttaccaagatggagag

SEQ ID NO: 141782 - DNA, 1722 bp, Homo sapiens
  Payload ID: 7876
  Gene Symbol: HSD17B6
  Gene Name: hydroxysteroid (17-beta) dehydrogenase 6
  Uniprot ID: O14756
  ENST ID: ENST00000555805
  CDS Start-End: 375-1328
actccgctcccgaacccattcctcgcctccatcacctccaccgtagttgagccagcgatagtactgagagtagggaaagagcctccggtaataaagtttaagcagctcgggcagctcggtggggtcaaacgtctccattgagcgcggaactcgccacgctgatcaaggatgacactggtgagaaccctatgagggagtgaagcagcctggactcttaccacaagagggaggtgttataagagcaatgcagaggttggagtgggcagcagttggggcaggaggaagccgactgctgcctggtctgcaaagaagtcctttcaagtctctaggactggactcttcctaagcaagtccgagaaggaagcaccctcactatgtggctctacctggcggccttcgtgggcctgtactaccttctgcactggtaccgggagaggcaggtggtgagccacctccaagacaagtatgtctttatcacgggctgtgactcgggctttgggaacctgctggccagacagctggatgcacgaggcttgagagtgctggctgcgtgtctgacggagaagggggccgagcagctgaggggccagacgtctgacaggctggagacggtgaccctggatgttaccaagatggagagcatcgctgcagctactcagtgggtgaaggagcatgtgggggacagaggactctggggactggtgaacaatgcaggcattcttacaccaattaccttatgtgagtggctgaacactgaggactctatgaatatgctcaaagtgaacctcattggtgtgatccaggtgaccttgagcatgcttcctttggtgaggagagcacggggaagaattgtcaatgtctccagcattctgggaagagttgctttctttgtaggaggctactgtgtctccaagtatggagtggaagccttttcagatattctgaggcgtgagattcaacattttggggtgaaaatcagcatagttgaacctggctacttcagaacgggaatgacaaacatgacacagtccttagagcgaatgaagcaaagttggaaagaagcccccaagcatattaaggagacctatggacagcagtattttgatgccctttacaatatcatgaaggaagggctgttgaattgtagcacaaacctgaacctggtcactgactgcatggaacatgctctgacatcggtgcatccgcgaactcgatattcagctggctgggatgctaaatttttcttcatccctctatcttatttacctacatcactggcagactacattttgactagatcttggcccaaaccagcccaggcagtctaaagaaaactgggttggtgcttcttggaatgaaggcaaaaatctgaaattgttagtgtctcagtaatcctgatttagaacccaggctttttgtaacaatgtgttttcttgcctaaattcatttatctggcatcatcagagtactaacatgtttatatttcagatatccaaagcttaccactttaggtgatgaatctttactattttagcccttttttgatgagactatttgtctaaagtgaatcatttgttcttgccttattaaacagagtagatggaaaacaatttaacctattttgaagtcatttctttatgaatatgaataattgttctatgctttaataatctattgtgaggaaactactaagaaatatgttggtgtgtttgtccttacttg

SEQ ID NO: 141783 - DNA, 591 bp, Homo sapiens
  Payload ID: 7876
  Gene Symbol: HSD17B6
  Gene Name: hydroxysteroid (17-beta) dehydrogenase 6
  ENST ID: ENST00000556650
  CDS Start-End: 366-591
acttggtgcgcgcgggggctgcgggagacgcagcagtttgcgatctgcccacgcgttcgggcactagggccaccgctcttgtgggcagaaggccgcgtccattccaggaagaggatcttctccggaaattaacagatctgattctgcagctgatcaaggatgacactggtgagaaccctatgagggagtgaagcagcctggactcttaccacaagagggaggtgttataagagcaatgcagaggttggagtgggcagcagttggggcaggaggaagccgactgctgcctggtctgcaaagaagtcctttcaagtctctaggactggactcttcctaagcaagtccgagaaggaagcaccctcactatgtggctctacctggcggccttcgtgggcctgtactaccttctgcactggtaccgggagaggcaggtggtgagccacctccaagacaagtatgtctttatcacgggctgtgactcgggctttgggaacctgctggccagacagctggatgcacgaggcttgagagtgctggctgcgtgtctgacggagaagggggccgagcagctgaggggccagacgtctgaca

SEQ ID NO: 141784 - DNA, 1547 bp, Homo sapiens
  Payload ID: 7876
  Gene Symbol: HSD17B6
  Gene Name: hydroxysteroid (17-beta) dehydrogenase 6
  Uniprot ID: O14756
  ENST ID: ENST00000554150
  CDS Start-End: 360-1313
acttggtgcgcgcgggggctgcgggagacgcagcagtttgcgatctgcccacgcgttcgggcactagggccaccgctcttgtgggcagaaggccgcgtccattccaggaagaggatcttctccggaaatatctgattctgcagctgatcaaggatgacactggtgagaaccctatgagggagtgaagcagcctggactcttaccacaagagggaggtgttataagagcaatgcagaggttggagtgggcagcagttggggcaggaggaagccgactgctgcctggtctgcaaagaagtcctttcaagtctctaggactggactcttcctaagcaagtccgagaaggaagcaccctcactatgtggctctacctggcggccttcgtgggcctgtactaccttctgcactggtaccgggagaggcaggtggtgagccacctccaagacaagtatgtctttatcacgggctgtgactcgggctttgggaacctgctggccagacagctggatgcacgaggcttgagagtgctggctgcgtgtctgacggagaagggggccgagcagctgaggggccagacgtctgacaggctggagacggtgaccctggatgttaccaagatggagagcatcgctgcagctactcagtgggtgaaggagcatgtgggggacagaggactctggggactggtgaacaatgcaggcattcttacaccaattaccttatgtgagtggctgaacactgaggactctatgaatatgctcaaagtgaacctcattggtgtgatccaggtgaccttgagcatgcttcctttggtgaggagagcacggggaagaattgtcaatgtctccagcattctgggaagagttgctttctttgtaggaggctactgtgtctccaagtatggagtggaagccttttcagatattctgaggcgtgagattcaacattttggggtgaaaatcagcatagttgaacctggctacttcagaacgggaatgacaaacatgacacagtccttagagcgaatgaagcaaagttggaaagaagcccccaagcatattaaggagacctatggacagcagtattttgatgccctttacaatatcatgaaggaagggctgttgaattgtagcacaaacctgaacctggtcactgactgcatggaacatgctctgacatcggtgcatccgcgaactcgatattcagctggctgggatgctaaatttttcttcatccctctatcttatttacctacatcactggcagactacattttgactagatcttggcccaaaccagcccaggcagtctaaagaaaactgggttggtgcttcttggaatgaaggcaaaaatctgaaattgttagtgtctcagtaatcctgatttagaacccaggctttttgtaacaatgtgttttcttgcctaaattcatttatctggcatcatcagagtactaacatgtttatatttcagatatccaaagcttaccactttaggtgatgaatctttactattttagcccttttttgatgagactatttgtctaa

SEQ ID NO: 141785 - DNA, 1190 bp, Homo sapiens
  Payload ID: 7877
  Gene Symbol: HSD17B7
  Gene Name: hydroxysteroid (17-beta) dehydrogenase 7
  Uniprot ID: P56937
  ENST ID: ENST00000254521
  CDS Start-End: 56-1081
ttccgaaagcagcggcggtgtttgcttcactgcttggaagtgtgagtgcgcgaagatgcgaaaggtggttttgatcaccggggctagcagtggcattggcctggccctctgcaagcggctgctggcggaagatgatgagcttcatctgtgtttggcgtgcaggaacatgagcaaggcagaagctgtctgtgctgctctgctggcctctcaccccactgctgaggtcaccattgtccaggtggatgtcagcaacctgcagtcggtcttccgggcctccaaggaacttaagcaaaggtttcagagattagactgtatatatctaaatgctgggatcatgcctaatccacaactaaatatcaaagcacttttctttggcctcttttcaagaaaagtgattcatatgttctccacagctgaaggcctgctgacccagggtgataagatcactgctgatggacttcaggaggtgtttgagaccaatgtctttggccattttatcctgattcgggaactggagcctctcctctgtcacagtgacaatccatctcagctcatctggacatcatctcgcagtgcaaggaaatctaatttcagcctcgaggacttccagcacagcaaaggcaaggaaccctacagctcttccaaatatgccactgaccttttgagtgtggctttgaacaggaacttcaaccagcagggtctctattccaatgtggcctgtccaggtacagcattgaccaatttgacatatggaattctgcctccgtttatatggacgctgttgatgccggcaatattgctacttcgcttttttgcaaatgcattcactttgacaccatataatggaacagaagctctggtatggcttttccaccaaaagcctgaatctctcaatcctctgatcaaatatctgagtgccaccactggctttggaagaaattacattatgacccagaagatggacctagatgaagacactgctgaaaaattttatcaaaagttactggaactggaaaagcacattagggtcactattcaaaaaacagataatcaggccaggctcagtggctcatgcctataattccagcactttgggaggccaaggcagaaggatcacttgagaccaggagttcaagaccagcctgagaaacatagtgagcccttgtctctacaaaaagaaataaaaataa

SEQ ID NO: 141786 - DNA, 666 bp, Homo sapiens
  Payload ID: 7877
  Gene Symbol: HSD17B7
  Gene Name: hydroxysteroid (17-beta) dehydrogenase 7
  ENST ID: ENST00000367913
  CDS Start-End: 13-348
gagtgcgcgaagatgcgaaaggtggttttgatcaccggggctagcagtggcattggcctggccctctgcaagcggctgctggcggaagatgatgagcttcatctgtgtttggcgtgcaggaacatgagcaaggcagaagctgtctgtgctgctctgctggcctctcaccccactgctgaggtcaccattgtccaggtggatgtcagcaacctgcagtcggtcttccgggcctccaaggaacttaagcaaaggtttcagagattagactgtatatatctaaatgctgggatcatgcctaatccacaactaaatatcaaagcacttttctttggcctcttttcaagctgaaggcctgctgacccagggtgataagatcactgctgatggacttcaggaggtgtttgagaccaatgtctttggccattttatcctggtaaagaagctgtgggcttaataagctaatatttcgtgtgatagtttctgtaaagctctgggcacagggcattattatagttgagcagccagttaactgatttaatctcatgtttgagttttcttgattgcatttgccttgtttattgtgagcatggaatacttctggaagctttcctagtagatttttctttaataaatgtactaatagtttttgatttacagaattactgc

SEQ ID NO: 141787 - DNA, 507 bp, Homo sapiens
  Payload ID: 7877
  Gene Symbol: HSD17B7
  Gene Name: hydroxysteroid (17-beta) dehydrogenase 7
  ENST ID: ENST00000367915
  CDS Start-End: 79-333
gaggcggcccgaaatcgtaggacttccgaaagcagcggcggtgtttgcttcactgcttggaagtgtgagtgcgcgaagatgcgaaaggtggttttgatcaccggggctagcagtggcattggcctggccctctgcaagcggctgctggcggaagatgatgagcttcatctgtgtttggcgtgcaggaacatgagcaaggcagaagctgtctgtgctgctctgctggcctctcaccccactgctgaggtcaccattgtccaggtggatgtcagcaacctgcagtcggtcttccgggcctccaaggaacttaagcaaaggtatatctcttgctgatggattttttttctcatgtgattgtgcagcataacacttaataaaataagagaggaaagaaaaacctgaaaagaaacaggtgcggtgtaagcagttatgttgaggaagtctgtatagggtgacccattgtgtctcagtaccacgttttctttctttttttttttttttttaaag

SEQ ID NO: 141788 - DNA, 650 bp, Homo sapiens
  Payload ID: 7877
  Gene Symbol: HSD17B7
  Gene Name: hydroxysteroid (17-beta) dehydrogenase 7
  ENST ID: ENST00000466176
  CDS Start-End: 69-398
gaaatcgtaggacttccgaaagcagcggcggtgtttgcttcactgcttggaagtgtgagtgcgcgaagatgcgaaaggtggttttgatcaccggggctagcagtggcattggcctggccctctgcaagcggctgctggcggaagatgatgagcttcatctgtgtttggcgtgcaggaacatgagcaaggcagaagctgtctgtgctgctctgctggcctctcaccccactgctgaggtcaccattgtccaggtggatgtcagcaacctgcagtcggtcttccgggcctccaaggaacttaagcaaaggatgatcaagaaatggttgtatgtgatctgtgttgaagaccatgtttcagagattagactgtatatatctaaatgctgggatcatgcctaatccacaactaaatatcaaagcacttttctttggcctcttttcaagaaaagtgattcatatgttctccacagctgaaggcctgctgacccagggtgataagatcactgctgatggacttcaggaggtgtttgagaccaatgtctttggccattttatcctgattcgggaactggagcctctcctctgtcacagtgacaatccatctcagctcatctggacatcatctcgcagtgcaaggaaatctaatttcag

SEQ ID NO: 141789 - DNA, 593 bp, Homo sapiens
  Payload ID: 7877
  Gene Symbol: HSD17B7
  Gene Name: hydroxysteroid (17-beta) dehydrogenase 7
  ENST ID: ENST00000470195
  CDS Start-End: 1-187
cagcctcgaggacttccagcacagcaaaggcaaggaaccctacagctcttccaaatatgccactgaccttttgagtgtggctttgaacaggaacttcaaccagcaggtgctgtattcgtctgtgtatgtcattaaatacctgcctcattacatggaggtgggtctaagtattaccattttcagatgaggacactaaatctcggagaaccttcgcttttttgcaaatgcattcactttgacaccatataatggaacagaagctctggtatggcttttccaccaaaagcctgaatctctcaatcctctgatcaaatatctgagtgccaccactggctttggaagaaattacattatgacccagaagatggacctagatgaagacactgctgaaaaattttatcaaaagttactggaactggaaaagcacattagggtcactattcaaaaaacagataatcaggccaggctcagtggctcatgcctataattccagcactttgggaggccaaggcagaaggatcacttgagaccaggagttcaagaccagcctgagaaacatagtgagcccttgtctctacaaaaagaaataaaaa

SEQ ID NO: 141790 - DNA, 990 bp, Homo sapiens
  Payload ID: 7878
  Gene Symbol: HSD17B8
  Gene Name: hydroxysteroid (17-beta) dehydrogenase 8
  Uniprot ID: Q92506
  ENST ID: ENST00000230236
  CDS Start-End: 28-813
gggattcccacccacccacagcccgccatggcgtctcagctccagaaccgactccgctccgcactggccttggtcacaggtgcggggagcggcatcggccgagcggtcagtgtacgcctggccggagagggggccaccgtagctgcctgcgacctggaccgggcagcggcacaggagacggtgcggctgctgggcgggccagggagcaaggaggggccgccccgagggaaccatgctgccttccaggctgacgtgtctgaggccagggccgccaggtgcctgctggaacaagtgcaggcctgcttttctcgcccaccatctgtcgttgtgtcctgtgcgggcatcacccaggatgagtttctgctgcacatgtctgaggatgactgggacaaagtcatagctgtcaacctcaagggcaccttcctagtcactcaggctgcagcacaagccctggtgtccaatggttgtcgtggttccatcatcaacatcagtagcatcgtaggaaaggtggggaacgtggggcagacaaactatgcagcatccaaggctggagtgattgggctgacccagaccgcagcccgggagcttggacgacatgggatccgctgtaactctgtcctcccagggttcattgcaacacccatgacacagaaagtgccacagaaagtggtggacaagattactgaaatgatcccgatgggacacttgggggaccctgaggatgtggcagatgtggtcgcattcttggcatctgaagatagtggatacatcacagggacctcagtggaagtcactggaggtcttttcatgtaactgcctcaaggaccctggactctgctcacccccccaccactctgcctggcctcctgctgatgaggactctaagttcccaggatacaaaaggggtggcagtgtatggttcaggaatgctgaatatgggaagcaggggtgcttgtgaccctaataaattccaagtcctcttccctgcca

SEQ ID NO: 141791 - DNA, 990 bp, Homo sapiens; identical to SEQ ID NO: 141790
  Payload ID: 7878
  Gene Symbol: HSD17B8
  Gene Name: hydroxysteroid (17-beta) dehydrogenase 8
  Uniprot ID: Q92506
  ENST ID: ENST00000374662
  CDS Start-End: 28-813

SEQ ID NO: 141792 - DNA, 990 bp, Homo sapiens; identical to SEQ ID NO: 141790
  Payload ID: 7878
  Gene Symbol: HSD17B8
  Gene Name: hydroxysteroid (17-beta) dehydrogenase 8
  Uniprot ID: Q92506
  ENST ID: ENST00000414463
  CDS Start-End: 28-813

SEQ ID NO: 141793 - DNA, 990 bp, Homo sapiens; identical to SEQ ID NO: 141790
  Payload ID: 7878
  Gene Symbol: HSD17B8
  Gene Name: hydroxysteroid (17-beta) dehydrogenase 8
  Uniprot ID: Q92506
  ENST ID: ENST00000427295
  CDS Start-End: 28-813

SEQ ID NO: 141794 - DNA, 990 bp, Homo sapiens; identical to SEQ ID NO: 141790
  Payload ID: 7878
  Gene Symbol: HSD17B8
  Gene Name: hydroxysteroid (17-beta) dehydrogenase 8
  Uniprot ID: Q92506
  ENST ID: ENST00000422433
  CDS Start-End: 28-813

SEQ ID NO: 141795 - DNA, 990 bp, Homo sapiens; identical to SEQ ID NO: 141790
  Payload ID: 7878
  Gene Symbol: HSD17B8
  Gene Name: hydroxysteroid (17-beta) dehydrogenase 8
  Uniprot ID: Q92506
  ENST ID: ENST00000454191
  CDS Start-End: 28-813

SEQ ID NO: 141796 - DNA, 3519 bp, Homo sapiens
  Payload ID: 7879
  Gene Symbol: HSDL1
  Gene Name: hydroxysteroid dehydrogenase like 1
  Uniprot ID: Q3SXM5
  ENST ID: ENST00000219439
  CDS Start-End: 178-1170
acgcgggtcacgtgagggcgcggcgcggcagcagctccggcggccgagacgggggcggcggccgcgcgggtctggcgggaccggtttggaagactttgccggcctgcagattggccttaagagaaggacggagccacatactgctgacggcccagaactggcagagagaaggttgccatggctgctgttgacagtttctacctcttgtacagggaaatcgccaggtcttgcaattgctatatggaagctctagctttggttggagcctggtatacggccagaaaaagcatcactgtcatctgtgacttttacagcctgatcaggctgcattttatcccccgcctggggagcagagcagacttgatcaagcagtatggaagatgggccgttgtcagcggtgcaacagatgggattggaaaagcctacgctgaagagttagcaagccgaggtctcaatataatcctgattagtcggaacgaggagaagttgcaggttgttgctaaagacatagccgacacgtacaaagtggaaactgatattatagttgcggacttcagcagcggtcgtgagatctaccttccaattcgagaagccctgaaggacaaagacgttggcatcttggtaaataacgtgggtgtgttttatccctacccgcagtatttcactcagctgtccgaggacaagctctgggacatcataaatgtgaacattgccgccgctagtttgatggtccatgttgtgttaccgggaatggtggagagaaagaaaggtgccatcgtcacgatctcttctggctcctgctgcaaacccactcctcagctggctgcattttctgcttctaaggcttatttagaccacttcagcagagccttgcaatatgaatatgcctctaaaggaatctttgtacagagtctaatccctttctatgtagccaccagcatgacagcacccagcaactttctgcacaggtgctcgtggttggtgccttcgccaaaagtctatgcacatcatgctgtttctactcttgggatttccaaaaggaccacaggatattggtcccattctattcagtttctttttgcacagtatatgcctgaatggctctgggtgtggggagcaaatattctcaaccgttcactacgtaaggaagccttatcctgcacagcctgagtctggatggccacttgagaagttttgccaactcctgggaacctcgatattctgacatttggaaaaacacatttaatttatctcctgtgtttcattgctgattattcagcatactgttgattcgtcatttgcaaaacacacataataccgtcagagtgctgtgaaaaaccttaagggtgtgtggatggcacaggatcaataatgcctgaggctgattgacgacatctacatttcagtgctttttccctaagctgtttgaaagttacgcttttctgttgttctagagccacagcagtctaatattgaaatataatatgatttgtcaggtcttataatttcagatgttgttttttaagggaaattgaccatttcactagaggagttgtgctggtttttaaatgtgcatcaagaaagactactgaaaagtattattttgtaactaagattgctggtactattaggaaaaatctgtgtgtattgtatagctctagctgtttgactatctgtaatgaaaatgctgcacttcaactggtatttcattagagaaccgtgtgtgtgcgtgtgtgtggtgcctttgagcaactttatttatggttaccatatttttaaaaagattttttgtcagggtgacttaacatggactcttatagggtattaaaacaatctagattattccttttcatcctaaataagcctaccaaatttcatgctgttggtttgccatgaatgatattacttcctacattatatttgtgttttttcaaatctgctatggaatgaacttattcctagatttggatatgtaagagaaacctgcagtcatcttttgatttataaggcaattcttgtggataaatagtgatttctcagcctctgacccattttataactgaaatttagccctttagagcttgttatatctggttttcctacgtttttctatgtaatattattccattccagtagcattattgatagaaatagtaagtatttatggaatagtaaaatatggacaaattacgtgtgtgacatatctgtcaatataagttagaagcttattcttggtttgtgtaatgaatttatgtattgtagtgaatacctttactggtgtgaagataattatgcacaaaccctcacaatacgcgttaacattgaaacctgtgaaatgtccttagtttgggtcatataaagccaaccatttttgaggaccatgtacctagtgctttgaaaactctaagtcactatatgaatatgacaatatgtgcacatttaaaattcagagctcggcattgtgatactgatgcagaagctagtagattggttaaaagtctggacttctgtggcatttttttcgtgacgtgataatctatcataagcagacctaagcacagttttatgaacacaattttgcccatgacattgcctacaggatttccagatgtgacttgcactcagaagatcagtggtcaacttcagaagctcttccacgcttagatcatgtcttcagaacttagatgtgaaaatctacacactgggagatgctgtgagccccaaggttttgatggagtttgcttggaatcctcttgacttcatgccacattgacgtgaactttgatgtataataagcagcagcaacttcatgtgaaaatatggtcaggtagttatatgtaaggttacgtggtccagtaatgtcttagattgataaattaggtatggaatccatcagtgttacgtgatgagaataggtgaacacaccttgtcagtgatgatgtaaacttctctccttggcaggacatgggcaaacatgctgattggtgcaaatgtggtgccgagctgtccatagctgcagtgaaagatgaagagcaagaccttctctaggttttctagctttcattaaatgtatttttttccccagagctaatttgaaagttgattggaccactgtggatggggtgtcattaagaatgtgggaaataggggccgagtgcggtggctcacacctgtaatcccagcagtttggaaggccagggcaggtggatcgcttgatcccaggaggtcgagaccagcctggggaacacatcctgtctctacaaaaaatacaaaaattagccaggcagggtggtgcatgcctgtagtcccagctacttgggaggctgaggcaggagaattttttgagcccaggatgcagaggttgaagtgagccaagatcgtgccactgcactccagccttgagacagagcgagaccctgtctcaaaaaaaaaaaaagaacgtgggaaatatgaacctttgaaagttaatctgtgaattgaaagtttaacaataaaagtagttgtttgtttcctttggaa

SEQ ID NO: 141797 - DNA, 1493 bp, Homo sapiens
  Payload ID: 7879
  Gene Symbol: HSDL1
  Gene Name: hydroxysteroid dehydrogenase like 1
  Uniprot ID: Q3SXM5
  ENST ID: ENST00000434463
  CDS Start-End: 159-986
gcggcgcggcagcagctccggcggccgagacgggggcggcggccgcgcgggtctggcgggaccggtttggaagactttgccggcctgcagattggccttaagagaaggacggagccacatactgctgacggcccagaactggcagagagaaggttgccatggctgctgttgacagtttctacctcttgtacagggaaatcgccaggtcttgcaattgctatatggaagctctagctttggttggagcctggtatacggccagaaaaagcatcactgtcatctgtgacttttacagcctgatcaggctgcattttatcccccgcctggggagcagagcagacttgatcaagcagtatggaagatgggccgttgtcagcggtgcaacagatgggattggaaaagcctacgctgaagagttagcaagccgaggtctcaatataatcctgattagtcggaacgaggagaagttgcagtatttcactcagctgtccgaggacaagctctgggacatcataaatgtgaacattgccgccgctagtttgatggtccatgttgtgttaccgggaatggtggagagaaagaaaggtgccatcgtcacgatctcttctggctcctgctgcaaacccactcctcagctggctgcattttctgcttctaaggcttatttagaccacttcagcagagccttgcaatatgaatatgcctctaaaggaatctttgtacagagtctaatccctttctatgtagccaccagcatgacagcacccagcaactttctgcacaggtgctcgtggttggtgccttcgccaaaagtctatgcacatcatgctgtttctactcttgggatttccaaaaggaccacaggatattggtcccattctattcagtttctttttgcacagtatatgcctgaatggctctgggtgtggggagcaaatattctcaaccgttcactacgtaaggaagccttatcctgcacagcctgagtctggatggccacttgagaagttttgccaactcctgggaacctcgatattctgacatttggaaaaacacatttaatttatctcctgtgtttcattgctgattattcagcatactgttgattcgtcatttgcaaaacacacataataccgtcagagtgctgtgaaaaaccttaagggtgtgtggatggcacaggatcaataatgcctgaggctgattgacgacatctacatttcagtgctttttccctaagctgtttgaaagttacgcttttctgttgttctagagccacagcagtctaatattgaaatataatatgatttgtcaggtcttataatttcagatgttgttttttaagggaaattgaccatttcactagaggagttgtgctggtttttaaatgtgcatcaagaaagactactgaaaagtattattttgtaactaagattgctggtactattaggaaaaatctgtgtgtattgtatagctctagctgtttgactatctgt

SEQ ID NO: 141798 - DNA, 459 bp, Homo sapiens
  Payload ID: 7879
  Gene Symbol: HSDL1
  Gene Name: hydroxysteroid dehydrogenase like 1
  ENST ID: ENST00000564998
  CDS Start-End: 249-459
gagggcgcggcgcggcagcagctccggcggccgagacgggggcggcggccgcgcgggtctggcgggaccggtttggaagactttgccggcctgcaggacacatgatgacattggacccaccctccccagctcggagtctttaactcagtcacatctacggagtccctttggccacataagattggccttaagagaaggacggagccacatactgctgacggcccagaactggcagagagaaggttgccatggctgctgttgacagtttctacctcttgtacagggaaatcgccaggtcttgcaattgctatatggaagctctagctttggttggagcctggtatacggccagaaaaagcatcactgtcatctgtgacttttacagcctgatcaggctgcattttatcccccgcctggggagcagagcagacttgatcaagcagtatggaagatgggccg

SEQ ID NO: 141799 - DNA, 457 bp, Homo sapiens
  Payload ID: 7879
  Gene Symbol: HSDL1
  Gene Name: hydroxysteroid dehydrogenase like 1
  ENST ID: ENST00000562224
  CDS Start-End: 134-457
agctccggcggccgagacgggggcggcggccgcgcgggtctggcgggaccggtttggaagactttgccggcctgcagagaaggacggagccacatactgctgacggcccagaactggcagagagaaggttgccatggctgctgttgacagtttctacctcttgtacagggaaatcgccaggtcttgcaattgctatatggaagctctagctttggttggagcctggtatacggccagaaaaagcatcactgtcatctgtgacttttacagcctgatcaggctgcattttatcccccgcctggggagcagagcagacttgatcaagcagtatggaagatgggccgttgtcagcggtgcaacagatgggattggaaaagcctacgctgaagagttagcaagccgaggtctcaatataatcctgattagtcggaacgaggagaagttgcaggttgttgct

SEQ ID NO: 141800 - DNA, 549 bp, Homo sapiens
  Payload ID: 7879
  Gene Symbol: HSDL1
  Gene Name: hydroxysteroid dehydrogenase like 1
  ENST ID: ENST00000568857
  CDS Start-End: 217-549
agacgcagccccagaaaccggatcgctgcagcgcccctcggcgatcccaacatgatgtgtacaggtgactgcgaggcagtcggggggtctcacagtgggctccctggacaggactctgcgccttgctatacctccatctgaattgcagattggccttaagagaaggacggagccacatactgctgacggcccagaactggcagagagaaggttgccatggctgctgttgacagtttctacctcttgtacagggaaatcgccaggtcttgcaattgctatatggaagctctagctttggttggagcctggtatacggccagaaaaagcatcactgtcatctgtgacttttacagcctgatcaggctgcattttatcccccgcctggggagcagagcagacttgatcaagcagtatggaagatgggccgttgtcagcggtgcaacagatgggattggaaaagcctacgctgaagagttagcaagccgaggtctcaatataatcctgattagtcggaacgaggagaagttgcaggttgttgctaaagacata

SEQ ID NO: 141801 - DNA, 2983 bp, Homo sapiens
  Payload ID: 7880
  Gene Symbol: HSDL2
  Gene Name: hydroxysteroid dehydrogenase like 2
  Uniprot ID: Q6YN16
  ENST ID: ENST00000398803
  CDS Start-End: 85-1122
gataaatgcggagggacggtccagctttagctctctgctcgccgccgccgctgtcgccgccacctcctctgatctacgaaagtcatgttacccaacaccgggaggctggcaggatgtacagtttttatcacaggtgcaagccgtggcattggcaaagctattgcattgaaagcagcaaaggatggagcaaatattgttattgctgcaaagaccgcccagccacatccaaaacttctaggcacaatctatactgctgctgaagaaattgaagcagttggaggaaaggccttgccatgtattgttgatgtgagagatgaacagcagatcagtgctgcagtggagaaagccatcaagaaatttggagcttataccattgctaagtatggtatgtctatgtatgtgcttggaatggcagaagaatttaaaggtgaaattgcagtcaatgcattatggcctaaaacagccatacacactgctgctatggatatgctgggaggacctggtatcgaaagccagtgtagaaaagttgatatcattgcagatgcagcatattccattttccaaaagccaaaaagttttactggcaactttgtcattgatgaaaatatcttaaaagaagaaggaatagaaaattttgacgtttatgcaattaaaccaggtcatcctttgcaaccagatttcttcttagatgaatacccagaagcagttagcaagaaagtggaatcaactggtgctgttccagaattcaaagaagagaaactgcagctgcaaccaaaaccacgttctggagctgtggaagaaacatttagaattgttaaggactctctcagtgatgatgttgttaaagccactcaagcaatctatctgtttgaactctccggtgaagatggtggcacgtggtttcttgatctgaaaagcaagggtgggaatgtcggatatggagagccttctgatcaggcagatgtggtgatgagtatgactactgatgactttgtaaaaatgttttcagggaaactaaaaccaacaatggcattcatgtcagggaaattgaagattaaaggtaacatggccctagcaatcaaattggagaagctaatgaatcagatgaatgccagactgtgaaggaaaatataaaaaaaaagtcgactgctatgctcaaaaagtaaaaaaagctcaacagttaaaatctaatgtttgttttctttcctgttatattataaggatatgcacgtttgttctggaaaagatagaatttgtctctaaaagacttgaaattgtaattaaaatggcaagctaatcaaacataagcttcattaagtgggattctaagacagtctgtgtttttatatttcaagggtttaaccctttgagccttacatctcattcactgtctttctccaagaaaagtattttgggcggacagtcagatcaagcagtaaaattagctctttcaaatcttcttgtcatgtaaaatgaagctagtctgttttaaaatttttagttttggattgtatactaatgaaaatcttaatgatgtttttgatttttatatacttattttaaagaaaatcttatatagtacattttacaaaaattataaaaaatgaattagtactggcgaggactaaatgaaacaataatttttcattttgataactagctttccaggtggacttagccataggaaaatattactaatgtaatttaacaaattgctgcatgtattccatttaaaaatatgtttaaattgtcctaaaacaaaataattttctccctaggagtatgcatttggctacagtgttttgaaacagaaaccttagaataggtcattggtatgggctgaactgtgtatcccccaattcatttgttgaggtcctaactcccatttcttttgaatgtgactgttcggagatgaggcctttaaagaggtgacttaagttcaaaggaggctgttagtctaatccaacatggtgtcctttggacataagagataccagcaatgtgtgcacagaacaaagaccaggagaggacacagtgagaaggcagttatctgcaagcaaagagagaggcttcagaagaaacaaaatcaccagcaccttgatctttgacttctaatctccagaatagtgagaaataaatttctgttgttaagccgtccactgtgggaggccgacgcaggaggattgcttgaggccaggagttcaaggccagcctggacaacatagtaagaccctatctctacccccctaataaattaatttaaaaagccccccaatctgtggtattttattatggcagccctagcaagctaatacagtggtttgagaggctgggagggttgaggggaagataaacttttaaaaagctcttatctttcatttcaatcagttaaaaatacttgctcagtgtaacaattttgcttctcagcttccactctaatattgttgtgccattaagcaatttagctaatcctgacatttcttagattcataatgttaggagcatttaatctgtattttacaagttaggaagcagaggatcagagatgggaaaggactagcccaaggccaacattaacaagccctctaacaaaaactttacaatacatttatgttgaatggaactccaagatctcacctctccatccaggaatggagtccatgtaatcaaagtgaacttaaaaataggacagtttcaacaagtcaggagattcacagcaactgatcaaagggagtccagtcaacgtgagcaagcgtgattatgatgaggaagccccctctgctttaatccacacaaggaacgtaacctgaagtaacctgatgttaaccaatctgctgtgtctactatgctgtttccttgttcctgctagtgctgctttacaaatgcagaccattctatcatacctggcggggcttctgttttattttgtaggctggatgctacccagttcatgaatcgctaataaaagccaattagatcttta

SEQ ID NO: 141802 - DNA, 3350 bp, Homo sapiens
  Payload ID: 7880
  Gene Symbol: HSDL2
  Gene Name: hydroxysteroid dehydrogenase like 2
  Uniprot ID: Q6YN16
  ENST ID: ENST00000398805
  CDS Start-End: 228-1484
agggaccaggcttgggaggcgacgaagaggaacgctgggcgcaggaggcccactgcatacgcaggcgcactcggcgatcccggcttttccgcgcgcagttcccgcacaggcatcggggggggcaggggcggggcaggggcggggataaatgcggagggacggtccagctttagctctctgctcgccgccgccgctgtcgccgccacctcctctgatctacgaaagtcatgttacccaacaccgggaggctggcaggatgtacagtttttatcacaggtgcaagccgtggcattggcaaagctattgcattgaaagcagcaaaggatggagcaaatattgttattgctgcaaagaccgcccagccacatccaaaacttctaggcacaatctatactgctgctgaagaaattgaagcagttggaggaaaggccttgccatgtattgttgatgtgagagatgaacagcagatcagtgctgcagtggagaaagccatcaagaaatttggaggaattgatattctggtaaataatgccagtgccattagtttgaccaatacattggacacacctaccaagagattggatctgatgatgaacgtgaacaccagaggcacctaccttgcatctaaagcatgtattccttatttgaaaaagagcaaagttgctcatatcctcaatatcagtccaccactgaacctaaatccagtttggttcaaacagcactgtgcttataccattgctaagtatggtatgtctatgtatgtgcttggaatggcagaagaatttaaaggtgaaattgcagtcaatgcattatggcctaaaacagccatacacactgctgctatggatatgctgggaggacctggtatcgaaagccagtgtagaaaagttgatatcattgcagatgcagcatattccattttccaaaagccaaaaagttttactggcaactttgtcattgatgaaaatatcttaaaagaagaaggaatagaaaattttgacgtttatgcaattaaaccaggtcatcctttgcaaccagatttcttcttagatgaatacccagaagcagttagcaagaaagtggaatcaactggtgctgttccagaattcaaagaagagaaactgcagctgcaaccaaaaccacgttctggagctgtggaagaaacatttagaattgttaaggactctctcagtgatgatgttgttaaagccactcaagcaatctatctgtttgaactctccggtgaagatggtggcacgtggtttcttgatctgaaaagcaagggtgggaatgtcggatatggagagccttctgatcaggcagatgtggtgatgagtatgactactgatgactttgtaaaaatgttttcagggaaactaaaaccaacaatggcattcatgtcagggaaattgaagattaaaggtaacatggccctagcaatcaaattggagaagctaatgaatcagatgaatgccagactgtgaaggaaaatataaaaaaaaagtcgactgctatgctcaaaaagtaaaaaaagctcaacagttaaaatctaatgtttgttttctttcctgttatattataaggatatgcacgtttgttctggaaaagatagaatttgtctctaaaagacttgaaattgtaattaaaatggcaagctaatcaaacataagcttcattaagtgggattctaagacagtctgtgtttttatatttcaagggtttaaccctttgagccttacatctcattcactgtctttctccaagaaaagtattttgggcggacagtcagatcaagcagtaaaattagctctttcaaatcttcttgtcatgtaaaatgaagctagtctgttttaaaatttttagttttggattgtatactaatgaaaatcttaatgatgtttttgatttttatatacttattttaaagaaaatcttatatagtacattttacaaaaattataaaaaatgaattagtactggcgaggactaaatgaaacaataatttttcattttgataactagctttccaggtggacttagccataggaaaatattactaatgtaatttaacaaattgctgcatgtattccatttaaaaatatgtttaaattgtcctaaaacaaaataattttctccctaggagtatgcatttggctacagtgttttgaaacagaaaccttagaataggtcattggtatgggctgaactgtgtatcccccaattcatttgttgaggtcctaactcccatttcttttgaatgtgactgttcggagatgaggcctttaaagaggtgacttaagttcaaaggaggctgttagtctaatccaacatggtgtcctttggacataagagataccagcaatgtgtgcacagaacaaagaccaggagaggacacagtgagaaggcagttatctgcaagcaaagagagaggcttcagaagaaacaaaatcaccagcaccttgatctttgacttctaatctccagaatagtgagaaataaatttctgttgttaagccgtccactgtgggaggccgacgcaggaggattgcttgaggccaggagttcaaggccagcctggacaacatagtaagaccctatctctacccccctaataaattaatttaaaaagccccccaatctgtggtattttattatggcagccctagcaagctaatacagtggtttgagaggctgggagggttgaggggaagataaacttttaaaaagctcttatctttcatttcaatcagttaaaaatacttgctcagtgtaacaattttgcttctcagcttccactctaatattgttgtgccattaagcaatttagctaatcctgacatttcttagattcataatgttaggagcatttaatctgtattttacaagttaggaagcagaggatcagagatgggaaaggactagcccaaggccaacattaacaagccctctaacaaaaactttacaatacatttatgttgaatggaactccaagatctcacctctccatccaggaatggagtccatgtaatcaaagtgaacttaaaaataggacagtttcaacaagtcaggagattcacagcaactgatcaaagggagtccagtcaacgtgagcaagcgtgattatgatgaggaagccccctctgctttaatccacacaaggaacgtaacctgaagtaacctgatgttaaccaatctgctgtgtctactatgctgtttccttgttcctgctagtgctgctttacaaatgcagaccattctatcatacctggcggggcttctgttttattttgtaggctggatgctacccagttcatgaatcgctaataaaagccaattagatctttacataa

SEQ ID NO: 141803 - DNA, 3053 bp, Homo sapiens
  Payload ID: 7881
  Gene Symbol: HIC1
  Gene Name: hypermethylated in cancer 1
  Uniprot ID: Q14526
  ENST ID: ENST00000322941
  CDS Start-End: 1-2202
atgacttttcctgaagcggacattttacttaaatcgggagagtgtgctgggcagacgatgctggacacgatggaggcgcccggccactccaggcagctgctgctgcagctcaacaaccagcgcaccaagggcttcttgtgcgacgtgatcatcgtggtgcagaacgccctcttccgcgcgcacaagaacgtgctggcggccagcagcgcctacctcaagtccctggtggtgcatgacaacctgctcaacctggaccatgacatggtgagcccggccgtgttccgcctggtgctggacttcatctacaccggccgcctggctgacggcgcagaggcggctgcggccgcggccgtggccccgggggctgagccgagcctgggcgccgtgctggccgccgccagctacctgcagatccccgacctcgtggcgctgtgcaagaaacgcctcaagcgccacggcaagtactgccacctgcggggcggcggcggcggcggcggcggctacgcgccctatggtcggccgggccggggcctgcgggccgccacgccggtcatccaggcctgctacccgtccccagtcgggcctccgccgccgcctgccgcggagccgccctcgggcccagaggccgcggtcaacacgcactgcgccgagctgtacgcgtcgggacccggcccggccgccgcactctgtgcctcggagcgccgctgctcccctctttgtggcctggacctgtccaagaagagcccgccgggctccgcggcgccagagcggccgctggctgagcgcgagctgcccccgcgcccggacagccctcccagcgccggccccgccgcctacaaggagccgcctctcgccctgccgtcgctgccgccgctgcccttccagaagctggaggaggccgcaccgccttccgacccatttcgcggcggcagcggcagcccgggacccgagccccccggccgccccgacgggcctagtctcctctatcgctggatgaagcacgagccgggcctgggtagctatggcgacgagctgggccgggagcgcggctcccccagcgagcgctgcgaagagcgtggtggggacgcggccgtctcgcccggggggcccccgctcggcctggcgccgccgccgcgctaccctggcagcctggacgggcccggcgcgggcggcgacggcgacgactacaagagcagcagcgaggagaccggtagcagcgaggaccccagcccgcctggcggccacctcgagggctacccatgcccgcacctggcctatggcgagcccgagagcttcggtgacaacctgtacgtgtgcattccgtgcggcaagggcttccccagctctgagcagctgaacgcgcacgtggaggctcacgtggaggaggaggaagcgctgtacggcagggccgaggcggccgaagtggccgctggggccgccggcctagggcccccttttggaggcggcggggacaaggtcgccggggctccgggtggcctgggagagctgctgcggccctaccgctgcgcgtcgtgcgacaagagctacaaggacccggccacgctgcggcagcacgagaagacgcactggctgacccggccctacccatgcaccatctgcgggaagaagttcacgcagcgtgggaccatgacgcgccacatgcgcagccacctgggcctcaagcccttcgcgtgcgacgcgtgcggcatgcggttcacgcgccagtaccgcctcacggagcacatgcgcatccactcgggcgagaagccctacgagtgccaggtgtgcggcggcaagttcgcacagcaacgcaacctcatcagccacatgaagatgcacgccgtggggggcgcggccggcgcggccggggcgctggcgggcttgggggggctccccggcgtccccggccccgacggcaagggcaagctcgacttccccgagggcgtctttgctgtggctcgcctcacggccgagcagctgagcctgaagcagcaggacaaggcggccgcggccgagctgctggcgcagaccacgcacttcctgcacgaccccaaggtggcgctggagagcctctacccgctggccaagttcacggccgagctgggcctcagccccgacaaggcggccgaggtgctgagccagggcgctcacctggcggccgggcccgacggccggaccatcgaccgtttctctcccacctagagcgcccctcgccagcccgctctgtcgctgctgcgcggccctggcccgcaccccagggagcggcgggggcggcgcgcagggcccactgtgcccgggacaaccgcagcgtcgccacagtggcggctccacctctcggcggcctcacctggcctcactgcttcgtgccttagctcgggggtcgggggagaaccccgggacgggggtgggatggggtaagggaaatttatatttttgatatcagctttgaccaaaggagaccccaggcccctcccgcctcttcctgtggttcgtcggccccctcccccggctccgcgctgctcttagagggggaggggtgtcactgtcggggcactcctagccctacctccggcccttgcgaccacacccattctcactgtgaatctccccgctggggtcggagcgtcgggcagagttggggagtggggaggggactgagccggccggagggccccccgcacccccgctcccacccaccccgggactgataatgtgaagttcctcattttgcacaagtggcactagccccagggccaacccttccttcctcagtcaccaagggcggggagttctggagtcggaaggcgaagagcctaccaccaggtctcccactcccgcggtgccctcccttcccttccctgcggccccggaccatatttattgcatgcgccccggcggccccccatcccgagcccaggctgggctgggctggaacgcggtctctttagctccctcctcttcgtttgtatatttcctaccttgtacacaggctcttccagagccgcttccattttctatactcgaaccaaacagcaataaagcagtaaccaagg

SEQ ID NO: 141804 - DNA, 3156 bp, Homo sapiens
  Payload ID: 7881
  Gene Symbol: HIC1
  Gene Name: hypermethylated in cancer 1
  Uniprot ID: Q14526
  ENST ID: ENST00000399849
  CDS Start-End: 161-2305
ggctgagacgcgaccaggacgcggggaggacggaccagcaggacagaccgaccgggggcccggcgggcggagggcagcgcagccacgtcccccctggatccgccgtcagccgggcccggggctttcgacatgccccccaggagagtgtgctgggcagacgatgctggacacgatggaggcgcccggccactccaggcagctgctgctgcagctcaacaaccagcgcaccaagggcttcttgtgcgacgtgatcatcgtggtgcagaacgccctcttccgcgcgcacaagaacgtgctggcggccagcagcgcctacctcaagtccctggtggtgcatgacaacctgctcaacctggaccatgacatggtgagcccggccgtgttccgcctggtgctggacttcatctacaccggccgcctggctgacggcgcagaggcggctgcggccgcggccgtggccccgggggctgagccgagcctgggcgccgtgctggccgccgccagctacctgcagatccccgacctcgtggcgctgtgcaagaaacgcctcaagcgccacggcaagtactgccacctgcggggcggcggcggcggcggcggcggctacgcgccctatggtcggccgggccggggcctgcgggccgccacgccggtcatccaggcctgctacccgtccccagtcgggcctccgccgccgcctgccgcggagccgccctcgggcccagaggccgcggtcaacacgcactgcgccgagctgtacgcgtcgggacccggcccggccgccgcactctgtgcctcggagcgccgctgctcccctctttgtggcctggacctgtccaagaagagcccgccgggctccgcggcgccagagcggccgctggctgagcgcgagctgcccccgcgcccggacagccctcccagcgccggccccgccgcctacaaggagccgcctctcgccctgccgtcgctgccgccgctgcccttccagaagctggaggaggccgcaccgccttccgacccatttcgcggcggcagcggcagcccgggacccgagccccccggccgccccgacgggcctagtctcctctatcgctggatgaagcacgagccgggcctgggtagctatggcgacgagctgggccgggagcgcggctcccccagcgagcgctgcgaagagcgtggtggggacgcggccgtctcgcccggggggcccccgctcggcctggcgccgccgccgcgctaccctggcagcctggacgggcccggcgcgggcggcgacggcgacgactacaagagcagcagcgaggagaccggtagcagcgaggaccccagcccgcctggcggccacctcgagggctacccatgcccgcacctggcctatggcgagcccgagagcttcggtgacaacctgtacgtgtgcattccgtgcggcaagggcttccccagctctgagcagctgaacgcgcacgtggaggctcacgtggaggaggaggaagcgctgtacggcagggccgaggcggccgaagtggccgctggggccgccggcctagggcccccttttggaggcggcggggacaaggtcgccggggctccgggtggcctgggagagctgctgcggccctaccgctgcgcgtcgtgcgacaagagctacaaggacccggccacgctgcggcagcacgagaagacgcactggctgacccggccctacccatgcaccatctgcgggaagaagttcacgcagcgtgggaccatgacgcgccacatgcgcagccacctgggcctcaagcccttcgcgtgcgacgcgtgcggcatgcggttcacgcgccagtaccgcctcacggagcacatgcgcatccactcgggcgagaagccctacgagtgccaggtgtgcggcggcaagttcgcacagcaacgcaacctcatcagccacatgaagatgcacgccgtggggggcgcggccggcgcggccggggcgctggcgggcttgggggggctccccggcgtccccggccccgacggcaagggcaagctcgacttccccgagggcgtctttgctgtggctcgcctcacggccgagcagctgagcctgaagcagcaggacaaggcggccgcggccgagctgctggcgcagaccacgcacttcctgcacgaccccaaggtggcgctggagagcctctacccgctggccaagttcacggccgagctgggcctcagccccgacaaggcggccgaggtgctgagccagggcgctcacctggcggccgggcccgacggccggaccatcgaccgtttctctcccacctagagcgcccctcgccagcccgctctgtcgctgctgcgcggccctggcccgcaccccagggagcggcgggggcggcgcgcagggcccactgtgcccgggacaaccgcagcgtcgccacagtggcggctccacctctcggcggcctcacctggcctcactgcttcgtgccttagctcgggggtcgggggagaaccccgggacgggggtgggatggggtaagggaaatttatatttttgatatcagctttgaccaaaggagaccccaggcccctcccgcctcttcctgtggttcgtcggccccctcccccggctccgcgctgctcttagagggggaggggtgtcactgtcggggcactcctagccctacctccggcccttgcgaccacacccattctcactgtgaatctccccgctggggtcggagcgtcgggcagagttggggagtggggaggggactgagccggccggagggccccccgcacccccgctcccacccaccccgggactgataatgtgaagttcctcattttgcacaagtggcactagccccagggccaacccttccttcctcagtcaccaagggcggggagttctggagtcggaaggcgaagagcctaccaccaggtctcccactcccgcggtgccctcccttcccttccctgcggccccggaccatatttattgcatgcgccccggcggccccccatcccgagcccaggctgggctgggctggaacgcggtctctttagctccctcctcttcgtttgtatatttcctaccttgtacacaggctcttccagagccgcttccattttctatactcgaaccaaacagcaataaagcagtaaccaagg

SEQ ID NO: 141805 - DNA, 654 bp, Homo sapiens
  Payload ID: 7881
  Gene Symbol: HIC1
  Gene Name: hypermethylated in cancer 1
  ENST ID: ENST00000571990
  CDS Start-End: 366-654
aacctgaccttcacgtggggcgcgggaccttgcggggtcccagccgcaggcgcccctgttgtttccttcgggcggctcaggtgcgcgggaggaaggcagcggcctgccgcgcagagccctgcgcgcccgcgaggtggcgccatagccgcagcagcgcccgccggcccgggccgctccagataagagtgtgcggaaagcgcggcggggctgagacgcgaccaggacgcggggaggacggaccagcaggacagaccgaccgggggcccggcgggcggagggcagcgcagccacgtcccccctggatccgccgtcagccgggcccggggctttcgacatgccccccaggagagtgtgctgggcagacgatgctggacacgatggaggcgcccggccactccaggcagctgctgctgcagctcaacaaccagcgcaccaagggcttcttgtgcgacgtgatcatcgtggtgcagaacgccctcttccgcgcgcacaagaacgtgctggcggccagcagcgcctacctcaagtccctggtggtgcatgacaacctgctcaacctggaccatgacatggtgagcccggccgtgttccgcctggtgctggacttcatctacaccggccgcctggctgacggcgcagaggcggctgcggccg

SEQ ID NO: 141806 - DNA, 1134 bp, Homo sapiens
  Payload ID: 7881
  Gene Symbol: HIC1
  Gene Name: hypermethylated in cancer 1
  ENST ID: ENST00000574370
  CDS Start-End: 1106-1134
tgcgagcagcggcgcgacagtgcggggtcccctttctcccagaagagacgtcacccacacaaacctgaccttcacgtggggcgcgggaccttgcggggtcccagccgcaggcgcccctgttgtttccttcgggcgggtgggttggagaagaagtccacgcgggattcttcaaaacggcgtacagggggattctagggccccatggttacttctttggaccccccggaggcgctgtccagccacttccagtcgccctgatgactcgtcgtgggttcctttaggagacccgaaagttcagggcgggctgtgtgggtaacacctctgcccaggttcccggagggccctacgtggctgcccctggagtatcccagagcgctagggctgcgggaaggggcgggtgtgcttctggaaacatgagcgcctgttagtatcagtgcctggatagggctggggacaaatcagtttatgccgcgcacaccgaatccatgcgcctgagtgagggtgggtgtgttggggagtgcgtccaagtggacagtgccgtacagtaatgtctacggggagttccaggagagctcggctactcctgcgcaggataacctctcccccaccacccgagtcccgtgctcgcgggcaggacttttccgaactggggctgtgtgcctagaaatacgtacatgggagcgctcagctcaaagccccagggtttctgggactcgcgtgtccggggtcggggtcccaggtgggtacaggtgggagggcgaacctgcgggtagggtgggcccctccccgcgggctcagcatctgtgcgcctccagctcaggtgcgcgggaggaaggcagcggcctgccgcgcagagccctgcgcgcccgcgaggtggcgccatagccgcagcagcgcccgccggcccgggccgctccagataagagtgtgcggaaagcgcggcggggctgagacgcgaccaggacgcggggaggacggaccagcaggacagaccgaccgggggcccggcgggcggagggcagcgcagccacgtcccccctggatccgccgtcagccgggcccggggctttcgacatgccccccaggagagtgtgctgggcagacgatgctggacacgatggaggcgcccggcca

SEQ ID NO: 141807 - DNA, 725 bp, Homo sapiens
  Payload ID: 7881
  Gene Symbol: HIC1
  Gene Name: hypermethylated in cancer 1
  ENST ID: ENST00000576444
  CDS Start-End: 473-725
cttcccccaactggggcaacttctcccgaggcgggaggcgctggttcctcggctccctttctccctacttgggtaaagttctccgccctgaatgacttttcctgaagcggacattttacttaaatcgggtaactgtctccaaaagggtcactgcgcctgaacagttttcttctcggaagccccagcacccagccaggtgccctggggcgtgcaggccgccctggcctcccctccaccggcggccgctcacctcctgctccttctcctggtccgggcgggccggcctgggctcccactccagagggcagccggtccttcgccggtgcccaggccgcagggctgatgcccccgctcagctgagggaaggggaagtggaggggagaagtgccgggctggggccaggcggccagggcgccgcacggctctcacccggccggtgtgtgtccccgcaggagagtgtgctgggcagacgatgctggacacgatggaggcgcccggccactccaggcagctgctgctgcagctcaacaaccagcgcaccaagggcttcttgtgcgacgtgatcatcgtggtgcagaacgccctcttccgcgcgcacaagaacgtgctggcggccagcagcgcctacctcaagtccctggtggtgcatgacaacctgctcaacctggaccatgacatggtgagcccggccgtgttccgcctggtgctggacttcatctacaccg

SEQ ID NO: 141808 - DNA, 812 bp, Homo sapiens
  Payload ID: 7881
  Gene Symbol: HIC1
  Gene Name: hypermethylated in cancer 1
  ENST ID: ENST00000571875
  CDS Start-End: 614-812
aacctgaccttcacgtggggcgcgggaccttgcggggtcccagccgcaggcgcccctgttgtttccttcgggcgggtgggttggagaagaagtccacgcgggattcttcaaaacggcgtacagggggattctagggccccatggttacttctttggaccccccggaggcgctgtccagccacttccagtcgccctgatgactcgtcgtgggttcctttaggagacccgaaagttcagggcgggctgtgtgggtacaggtgggagggcgaacctgcgggtagggtgggcccctccccgcgggctcagcatctgtgcgcctccagctcaggtgcgcgggaggaaggcagcggcctgccgcgcagagccctgcgcgcccgcgaggtggcgccatagccgcagcagcgcccgccggcccgggccgctccagataagagtgtgcggaaagcgcggcggggctgagacgcgaccaggacgcggggaggacggaccagcaggacagaccgaccgggggcccggcgggcggagggcagcgcagccacgtcccccctggatccgccgtcagccgggcccggggctttcgacatgccccccaggagagtgtgctgggcagacgatgctggacacgatggaggcgcccggccactccaggcagctgctgctgcagctcaacaaccagcgcaccaagggcttcttgtgcgacgtgatcatcgtggtgcagaacgccctcttccgcgcgcacaagaacgtgctggcggccagcagcgcctacctcaagtccctggtggtgcatgacaacctgctcaacctggacc

SEQ ID NO: 141809 - DNA, 6711 bp, Homo sapiens
  Payload ID: 7881
  Gene Symbol: HIC1
  Gene Name: hypermethylated in cancer 1
  Uniprot ID: Q14526
  ENST ID: ENST00000619757
  CDS Start-End: 161-2305
ggctgagacgcgaccaggacgcggggaggacggaccagcaggacagaccgaccgggggcccggcgggcggagggcagcgcagccacgtcccccctggatccgccgtcagccgggcccggggctttcgacatgccccccaggagagtgtgctgggcagacgatgctggacacgatggaggcgcccggccactccaggcagctgctgctgcagctcaacaaccagcgcaccaagggcttcttgtgcgacgtgatcatcgtggtgcagaacgccctcttccgcgcgcacaagaacgtgctggcggccagcagcgcctacctcaagtccctggtggtgcatgacaacctgctcaacctggaccatgacatggtgagcccggccgtgttccgcctggtgctggacttcatctacaccggccgcctggctgacggcgcagaggcggctgcggccgcggccgtggccccgggggctgagccgagcctgggcgccgtgctggccgccgccagctacctgcagatccccgacctcgtggcgctgtgcaagaaacgcctcaagcgccacggcaagtactgccacctgcggggcggcggcggcggcggcggcggctacgcgccctatggtcggccgggccggggcctgcgggccgccacgccggtcatccaggcctgctacccgtccccagtcgggcctccgccgccgcctgccgcggagccgccctcgggcccagaggccgcggtcaacacgcactgcgccgagctgtacgcgtcgggacccggcccggccgccgcactctgtgcctcggagcgccgctgctcccctctttgtggcctggacctgtccaagaagagcccgccgggctccgcggcgccagagcggccgctggctgagcgcgagctgcccccgcgcccggacagccctcccagcgccggccccgccgcctacaaggagccgcctctcgccctgccgtcgctgccgccgctgcccttccagaagctggaggaggccgcaccgccttccgacccatttcgcggcggcagcggcagcccgggacccgagccccccggccgccccgacgggcctagtctcctctatcgctggatgaagcacgagccgggcctgggtagctatggcgacgagctgggccgggagcgcggctcccccagcgagcgctgcgaagagcgtggtggggacgcggccgtctcgcccggggggcccccgctcggcctggcgccgccgccgcgctaccctggcagcctggacgggcccggcgcgggcggcgacggcgacgactacaagagcagcagcgaggagaccggtagcagcgaggaccccagcccgcctggcggccacctcgagggctacccatgcccgcacctggcctatggcgagcccgagagcttcggtgacaacctgtacgtgtgcattccgtgcggcaagggcttccccagctctgagcagctgaacgcgcacgtggaggctcacgtggaggaggaggaagcgctgtacggcagggccgaggcggccgaagtggccgctggggccgccggcctagggcccccttttggaggcggcggggacaaggtcgccggggctccgggtggcctgggagagctgctgcggccctaccgctgcgcgtcgtgcgacaagagctacaaggacccggccacgctgcggcagcacgagaagacgcactggctgacccggccctacccatgcaccatctgcgggaagaagttcacgcagcgtgggaccatgacgcgccacatgcgcagccacctgggcctcaagcccttcgcgtgcgacgcgtgcggcatgcggttcacgcgccagtaccgcctcacggagcacatgcgcatccactcgggcgagaagccctacgagtgccaggtgtgcggcggcaagttcgcacagcaacgcaacctcatcagccacatgaagatgcacgccgtggggggcgcggccggcgcggccggggcgctggcgggcttgggggggctccccggcgtccccggccccgacggcaagggcaagctcgacttccccgagggcgtctttgctgtggctcgcctcacggccgagcagctgagcctgaagcagcaggacaaggcggccgcggccgagctgctggcgcagaccacgcacttcctgcacgaccccaaggtggcgctggagagcctctacccgctggccaagttcacggccgagctgggcctcagccccgacaaggcggccgaggtgctgagccagggcgctcacctggcggccgggcccgacggccggaccatcgaccgtttctctcccacctagagcgcccctcgccagcccgctctgtcgctgctgcgcggccctggcccgcaccccagggagcggcgggggcggcgcgcagggcccactgtgcccgggacaaccgcagcgtcgccacagtggcggctccacctctcggcggcctcacctggcctcactgcttcgtgccttagctcgggggtcgggggagaaccccgggacgggggtgggatggggtaagggaaatttatatttttgatatcagctttgaccaaaggagaccccaggcccctcccgcctcttcctgtggttcgtcggccccctcccccggctccgcgctgctcttagagggggaggggtgtcactgtcggggcactcctagccctacctccggcccttgcgaccacacccattctcactgtgaatctccccgctggggtcggagcgtcgggcagagttggggagtggggaggggactgagccggccggagggccccccgcacccccgctcccacccaccccgggactgataatgtgaagttcctcattttgcacaagtggcactagccccagggccaacccttccttcctcagtcaccaagggcggggagttctggagtcggaaggcgaagagcctaccaccaggtctcccactcccgcggtgccctcccttcccttccctgcggccccggaccatatttattgcatgcgccccggcggccccccatcccgagcccaggctgggctgggctggaacgcggtctctttagctccctcctcttcgtttgtatatttcctaccttgtacacaggctcttccagagccgcttccattttctatactcgaaccaaacagcaataaagcagtaaccaaggaccccgaccccgctgctctcttctgcccctgcacaaggacctggatgggctgcgcccgctgggtggaggagccagaaagggccaccctcacacaggtgcagaggcttggacctgcctccctccccagtcccagaaacagatcagcaagaggtcaggtatgtttcataactaaaaatttattaaggaaacaaaaccagtgctgcaaacgggacagaaaggagagctgggtctccctcccgaccacccagtcatcggccttccagctggggagagaatcttaaaggagaggccggggaccctgtactccaaagagcccagtcttctgagactctaggggactcctacccccaaactactggccttggctcccctacacggtaccccatcgcttctggcatagtcctgggcctcagggagggcagagctgcgcacccatcctccaggcaggctgtgcagtcaggccatgggctctggggtatcccccactggtcccattaagatttgcccctggctccaccgaaaaccccgtcttcccctaagttgtccttgtctctggccctgggtttcaggaactcattcttggtaaggaagcctccccactgaggtaccagctaaaggggcaaggaaagggcccctgtgtcagtgtcagtttttccggggagtgagggcaaagctagaaaccaggttaggcgacggtgccccagcactggaatgcctcaggctgggctgtccacgcctggaagtttctcccagcacaggagccgagggtggaaggccctgggtgggagacctgtactaggttcctgccatgggtagtagagagggaaagttcagagtgagaacccctatgacgaggaaccgcggtgaagaaatgaaggggatcagggaggtgaaaaggatcaactagaaggggaagaagggtgaggggctattctggagggagggtaggcgggcaaggaggggtgaagggggagctgaggggagtcaggacatttcctgaagaggaagctagacggaaagaaaggccagtgaggagagagggagcaggtggaggccacccgagagcacgggcctgagaccagatgcccctttcctctagactcatgactgtccacggggacgcaactggcgaagtgtgagggacccaggttgataagggcaggaagaggagcagcaggaagggtgtgtggtaagtctggggtggatggtagaagaggtgggggcccagggctgctgttagggacatgctgtctagaagccgacttgggttcatgggcgagtccaggcctcagggagactggggacacacaccctgggcacttcttcctgacttaaccaaagcctcttgaacacattcacgacagaggttctgaagatgaaagggaactgtgatttcactgcatctgacggaaactcagaacccctgccctgtctccactggagaaagtggctgcgtccccaggcgagaaggccctccctcagccttggaatgagacgggggagggagaaaggctgagagcatgggcggcctatctggcttgcccagctgctgttgctgtagccagccacctccctgctaaatcctggcagcccaggagggtcccagcagcttccgcccgatccttgggaggggctctgtgaggagcaggtcccccacagcatggccgtggcgtgggttggaagaggatggtttattgtctgggtggattggtggctcaggcacgtgggcatcttccgtgctacactgggcgcctggtggcctttcaggaacggttccacggggggggggccccagtgtggctccctcagcccacctgggcccacgtgaggaaggctgggatgtcccgtacaggaacattccttgtgagcgccttcacacgcaggttccggtcatccgtcaacagcaccacctcccgcagtagccggattggctcctctgtgggcatgagagagcagaaggctgtcactgaggacaggaggcagagggctggctgctcttctcaccctggagaatgtggtcctggggagggggtgccacgctagccgtgtcttggctcttctaccagtcctttcctccgtccgggctctcagccccggggaccctcccctgctggcctagagagggctgcactgggcttctgccttgactccggcctcccatacaggactctcttctgcctagttcccaaaagctgcccaaacccgtcagcctcccaggaccctaaactgagggaatagaagcagccccttgacctctactcctttttaccacatggctggcccccagatcacaacaccgctctccccacaccccacttttttttttttaacaagtcctctccctctaaaagccagcaggttgaagctttacgcatccagaggcagaaaactaaagatggaacagaaaatgtatccagggttttccagatgtggggagaggggttaagggagccctgaggagaggagagggtaagggtcttggcagaattgtgccaagggcacaccaaggctttggccaaccggtcgcccctgctaagtaacagtaatccatgtatacaggcgaaagtctctaagaggacagaagagtaaaaaggaagagtagagttaagatgatgatcccagttctccgtcttgtaccccagggaagacctgtgtatccttccaggtttctttaggcacatttacaagtacatacacttggacatataacctttttttcctacagcatcatgatcatattagccacactttcagagtatatacttaaaaggtcttgctatagtggcacagatatctttcattctttttagatgactttttttttttttaagcacagtctctccactacctctctttccctaactccctaatctttaacacattggagagaatttaagccagggacaagcactcacacaagtgacatccctaccctgacaggcctgcttgggtggcaggtctactcgtcagtcccaggctgggcatttcctgacagaggtccaggtccggcagacagcaaggcacaggaagtgtcctgctgtgctcactgactgcgtgggctggcgggggtggggggctgcaaatatccatgtcggacctgagcagtctcaggcttgccagctccaggcagggaggctgagaactggctttcagcctggggaggagtttggaggattcgggagggagaggtttgtggggttggtggtggcgagagaagaggacaggaggaaggagagtgtgaagggaggcaaggggctgtgggcagaggggaaaggaaggtggcctcgggtgaggggatactcagagactactcagctgcctgggccaggcccctctgcagataagtgtggctggggtggtggtatgcagggctgtgtggggctcccagctgactggctgcgtctgtagcagccccactattcctgccctgggcctcaaaccaggagcgtcccaggccttaggtcagctaaccaaggcccgacattgctggcaggggtctgcaggggtttctgtggatactttgacatttttcacaataaacatcctctgttttga

SEQ ID NO: 141810 - DNA, 4734 bp, Homo sapiens
  Payload ID: 7882
  Gene Symbol: HIC2
  Gene Name: hypermethylated in cancer 2
  Uniprot ID: Q96JB3
  ENST ID: ENST00000407598
  CDS Start-End: 196-2043
ttttaaaaggcagtggtagggtagagggtggcagtggagacagctggagagcactgaggacgcggacccacgggtactgtgtgagctgtgaagcccgcttgggagaccccactgccagccaggtgaccaggcattgatgcacccccaggaaggccacgcgctcaggagccccccccgccgctggctgctgctcacatggtgtctgggcccttggcactccggtggtgcgcgtgggcagggcgcggggacatggggcccgacatggagctgcccagccactcgaagcagctcctgctgcagctgaaccagcagaggaccaagggcttcctgtgtgacgtcatcatcatggtggagaactccatcttccgggcccacaagaacgtcctagccgccagcagcatctatttcaagtccctggtcctgcacgacaacctcatcaacctggacacagacatggtcagctccacagtgttccagcagatcttggacttcatctacacaggcaagctgctgcccagcgaccagccagccgagcccaacttcagcaccctcctcactgccgccagctacctccagctgcccgagttggcagccctctgccgccgcaaactcaagcgagccggcaagccctttggctctgggagggcggggtccactggcatggggcggcccccccgcagccagcggctgtccacggcctctgtcatccaagctcggtatcaggggctcgtggatgggcgcaagggggcccacgccccccaggagctcccccaagccaaaggctcagacgatgaactctttcttggtggctctaaccaggatagcgtgcaaggtctgggccgggctgtctgcccagctggcggggaggcgggtctggggggctgcagcagcagcaccaacgggagcagcgggggctgcgagcaggagctgggcttggacctgtccaagaaaagcccacccttgccccctgccaccccaggtccccacctcactcccgatgacgcagcccagctgagcgacagccaacatggctcgccccctgcggcctctgctcctcccgttgccaacagtgcctcttattctgagctggggggcacccctgatgagcccatggatctggagggggccgaggacaaccacctgagcctgctggaggcgcctggtgggcagcctcggaagagcctccggcactccactcggaagaaggagtggggcaagaaggagcctgtggctggctccccctttgagcggagagaagcagggcccaagggtccctgcccgggagaggagggtgagggggtcggggacagggttcccaatggcatcctggctagtggggctggccctagcgggccctatggggagcccccctacccctgcaaggaggaggaggagaacggcaaggatgcaagtgaagacagtgcgcagagcgggagcgaggggggcagcggccatgccagcgcccactacatgtaccggcaggagggctacgagacggtgtcctacggggacaacttgtatgtgtgcattccctgcgccaagggcttccccagctctgagcagctcaatgcgcacgtggagactcacacggaggaagagctgttcatcaaggaagagggggcctacgagacaggcagtgggggtgccgaggaggaggccgaggacctgtcagcacccagtgcggcctacacggctgagccccggcccttcaagtgttcggtctgcgagaagacctacaaggacccagccacgctgcggcagcacgagaagacgcactggctgacacggcccttcccctgcaacatctgtggcaaaatgttcacgcagcgcggcaccatgacgcgtcacatgcggagccacctgggcctgaagcccttcgcctgcgatgagtgtggcatgcgcttcacccgtcagtaccgcctcacggagcacatgcgtgtgcactcgggcgagaaaccttacgagtgccagctgtgcgggggcaagttcacccagcagcgcaacctcatcagccacctgcgcatgcacacctccccctcctagaagccaaagacccgcgggcgccctctgccaccttgctccccgggaacccatggaaggagaagcgaggtgatgcagcagcaggggcaagaccctgggtccagtggaggctccgggtggcccctctggcccccactgcccacacccagagctttaatggacagtccgtaccaagcagagccgagaggagggaagccaggggtcccagcccgtctacctccccatcccacccaggcccccagctccccgcgggggccaccgcagggcctgtgggctgggtcacgtgggtctcgctgggacctggtccctttgttgcaggcggcttggagaaagggcagtgggacgctggccacggccagggtggtgtcgggagcaggcctcaccccgctggccgtgtctgtgtgtgtgcacgtgtgcttgtgtctgtgcgggcgcgtgcagccctggttctgcagggaacaggtgctgggggtgcagatccctccctccttgagccagggtggcactgttcactggcgctgggacagtcagggtgaccccaccgcctacctctctacatctaaagagccctctgggcctgtgttgctgttattcctactgatctgttcctctgtttttctttttgatttttgttttttaaaccaaaacagacaatagcttattttctttccgccccctccggggctgagcctgggtctgaagactgaatgtaacaggggccgctggcactcctgcgcgtcccccggctctggcgctgcaggggtgtcggcgcgccacctctccaggccccagaagcccttcttgcccaaaggcttccctggtccctgagccctgcctcggctgcctcaggggagagtgcttttcctgtagtttccaaggaatattctttgtttagaggtacttgttttttattaagagaaaaaccagtgtaacgtttatgtgactgtttgaactggaaggtctggggttccggggggtggggggaggctagactcaatgccggggccgtcggtactcttgttttcatttgtgtgtgcgtgcgtgtgtgtgtgtgtatgtgcgtatgtgtgtgtctatgtgtggtgtgtgccgtatgcatgggcagatgtttcgctttccctccttcctcgctgaacaaggtggagacttctgaccttttgctacctcttgaattcatgacaacgatatgttggtgactggcagtggaagcccttgacactcttgttttccttcgcttagcacctaggaagtcgtgtgcaggagccagcagggcgccaagtggcccagtgcctgcagctcacctgtgggttttccctttgagcctttggccacatccacctcgaggggaccctggcaccccgggcacacaaacctctgtggtataggtgaggggtgtgaggccccagcctggagccaggcactgggtgctgacaggggaaccatgaggagggtggcaggtctttgcagctcccggccagggtgaggcggaagtgagccctcatcctgccactcctatcctccattcctgcaagagttttaagcttgagagagctgaccacagggccccccggggaacagggatggcacttccctgagcagtcctggcccccggccactgtctcggggcccacctctcgcccctcatcttggtaattagccagcctcagatacttctgtgggccctgaagtgggctctcaaggtcagaccaaggttgctgatctcagtcccactgtcttcagccagctgaagctgtggggctgggctggcagcctttattgtcatcttgcttcaccatttttttttctctctcttttcattctattttaagtttagaccaaaaaaatacagagtcatcccctacccccacccctctagagaccctccagctaaaaacagagcctgagttcagggacccaagtggtgagcggcgtcttttgggggtgagggagcttgggtagatgaggctcctggctgagccctccctgtggtgatcccagcctaagatggcccctcttccctcctggtgggagacagaggactggaccctgggtctcaggttccagcaagtcaggctagggacctggggggaggagacccatggacttcacccatactcagtgagggggctcctgccgtcctgacgccaccccgccccatcagcacttaagccacatgacacaaagtctgtaccgcacgggaaatgttcacgcgcctggccgtgtgcatggcctcccgggctgtgggcagccgcatctgtgaggtgactcgtgaaagtaggtgattcctttgcagaacttcagggactgggagcagaggcccctcactcaacgacgtttgtgcgacatagtattgtatccaccttagtattgtatcgagccttttctgtgttttaatgagaaagcagaacactagtttcctatttaagactttaagggtttgtggggcggggcgggattaacacaacatttggctttgttttctttttcctttgatttccacatcaggtgtgtgcgagtgtgtgtgtgtggagatgttaagagcctcacaaggaaactgggttattggaggccaaggcggcttacagttctctgcgttcgtcacttaattcctgaatgtttcagagaaacaggaatcagaaaatagcagatatcatgtaggaaagagaggataaacaaagaaaaaagaaaaaaaaa

SEQ ID NO: 141811 - DNA, 6798 bp, Homo sapiens
  Payload ID: 7882
  Gene Symbol: HIC2
  Gene Name: hypermethylated in cancer 2
  Uniprot ID: Q96JB3
  ENST ID: ENST00000407464
  CDS Start-End: 231-2078
gtgagcggcgctcggggcgcgctaggcggggagccgagccgggctggcggcaggcggacggggcgggcgcgtgcggcgcgagccgggcgctgaggacaagggccgctggtagggccggccggccggcgggcggagcgccgccgccgacgcacacgaggtgaccaggcattgatgcacccccaggaaggccacgcgctcaggagccccccccgccgctggctgctgctcacatggtgtctgggcccttggcactccggtggtgcgcgtgggcagggcgcggggacatggggcccgacatggagctgcccagccactcgaagcagctcctgctgcagctgaaccagcagaggaccaagggcttcctgtgtgacgtcatcatcatggtggagaactccatcttccgggcccacaagaacgtcctagccgccagcagcatctatttcaagtccctggtcctgcacgacaacctcatcaacctggacacagacatggtcagctccacagtgttccagcagatcttggacttcatctacacaggcaagctgctgcccagcgaccagccagccgagcccaacttcagcaccctcctcactgccgccagctacctccagctgcccgagttggcagccctctgccgccgcaaactcaagcgagccggcaagccctttggctctgggagggcggggtccactggcatggggcggcccccccgcagccagcggctgtccacggcctctgtcatccaagctcggtatcaggggctcgtggatgggcgcaagggggcccacgccccccaggagctcccccaagccaaaggctcagacgatgaactctttcttggtggctctaaccaggatagcgtgcaaggtctgggccgggctgtctgcccagctggcggggaggcgggtctggggggctgcagcagcagcaccaacgggagcagcgggggctgcgagcaggagctgggcttggacctgtccaagaaaagcccacccttgccccctgccaccccaggtccccacctcactcccgatgacgcagcccagctgagcgacagccaacatggctcgccccctgcggcctctgctcctcccgttgccaacagtgcctcttattctgagctggggggcacccctgatgagcccatggatctggagggggccgaggacaaccacctgagcctgctggaggcgcctggtgggcagcctcggaagagcctccggcactccactcggaagaaggagtggggcaagaaggagcctgtggctggctccccctttgagcggagagaagcagggcccaagggtccctgcccgggagaggagggtgagggggtcggggacagggttcccaatggcatcctggctagtggggctggccctagcgggccctatggggagcccccctacccctgcaaggaggaggaggagaacggcaaggatgcaagtgaagacagtgcgcagagcgggagcgaggggggcagcggccatgccagcgcccactacatgtaccggcaggagggctacgagacggtgtcctacggggacaacttgtatgtgtgcattccctgcgccaagggcttccccagctctgagcagctcaatgcgcacgtggagactcacacggaggaagagctgttcatcaaggaagagggggcctacgagacaggcagtgggggtgccgaggaggaggccgaggacctgtcagcacccagtgcggcctacacggctgagccccggcccttcaagtgttcggtctgcgagaagacctacaaggacccagccacgctgcggcagcacgagaagacgcactggctgacacggcccttcccctgcaacatctgtggcaaaatgttcacgcagcgcggcaccatgacgcgtcacatgcggagccacctgggcctgaagcccttcgcctgcgatgagtgtggcatgcgcttcacccgtcagtaccgcctcacggagcacatgcgtgtgcactcgggcgagaaaccttacgagtgccagctgtgcgggggcaagttcacccagcagcgcaacctcatcagccacctgcgcatgcacacctccccctcctagaagccaaagacccgcgggcgccctctgccaccttgctccccgggaacccatggaaggagaagcgaggtgatgcagcagcaggggcaagaccctgggtccagtggaggctccgggtggcccctctggcccccactgcccacacccagagctttaatggacagtccgtaccaagcagagccgagaggagggaagccaggggtcccagcccgtctacctccccatcccacccaggcccccagctccccgcgggggccaccgcagggcctgtgggctgggtcacgtgggtctcgctgggacctggtccctttgttgcaggcggcttggagaaagggcagtgggacgctggccacggccagggtggtgtcgggagcaggcctcaccccgctggccgtgtctgtgtgtgtgcacgtgtgcttgtgtctgtgcgggcgcgtgcagccctggttctgcagggaacaggtgctgggggtgcagatccctccctccttgagccagggtggcactgttcactggcgctgggacagtcagggtgaccccaccgcctacctctctacatctaaagagccctctgggcctgtgttgctgttattcctactgatctgttcctctgtttttctttttgatttttgttttttaaaccaaaacagacaatagcttattttctttccgccccctccggggctgagcctgggtctgaagactgaatgtaacaggggccgctggcactcctgcgcgtcccccggctctggcgctgcaggggtgtcggcgcgccacctctccaggccccagaagcccttcttgcccaaaggcttccctggtccctgagccctgcctcggctgcctcaggggagagtgcttttcctgtagtttccaaggaatattctttgtttagaggtacttgttttttattaagagaaaaaccagtgtaacgtttatgtgactgtttgaactggaaggtctggggttccggggggtggggggaggctagactcaatgccggggccgtcggtactcttgttttcatttgtgtgtgcgtgcgtgtgtgtgtgtgtatgtgcgtatgtgtgtgtctatgtgtggtgtgtgccgtatgcatgggcagatgtttcgctttccctccttcctcgctgaacaaggtggagacttctgaccttttgctacctcttgaattcatgacaacgatatgttggtgactggcagtggaagcccttgacactcttgttttccttcgcttagcacctaggaagtcgtgtgcaggagccagcagggcgccaagtggcccagtgcctgcagctcacctgtgggttttccctttgagcctttggccacatccacctcgaggggaccctggcaccccgggcacacaaacctctgtggtataggtgaggggtgtgaggccccagcctggagccaggcactgggtgctgacaggggaaccatgaggagggtggcaggtctttgcagctcccggccagggtgaggcggaagtgagccctcatcctgccactcctatcctccattcctgcaagagttttaagcttgagagagctgaccacagggccccccggggaacagggatggcacttccctgagcagtcctggcccccggccactgtctcggggcccacctctcgcccctcatcttggtaattagccagcctcagatacttctgtgggccctgaagtgggctctcaaggtcagaccaaggttgctgatctcagtcccactgtcttcagccagctgaagctgtggggctgggctggcagcctttattgtcatcttgcttcaccatttttttttctctctcttttcattctattttaagtttagaccaaaaaaatacagagtcatcccctacccccacccctctagagaccctccagctaaaaacagagcctgagttcagggacccaagtggtgagcggcgtcttttgggggtgagggagcttgggtagatgaggctcctggctgagccctccctgtggtgatcccagcctaagatggcccctcttccctcctggtgggagacagaggactggaccctgggtctcaggttccagcaagtcaggctagggacctggggggaggagacccatggacttcacccatactcagtgagggggctcctgccgtcctgacgccaccccgccccatcagcacttaagccacatgacacaaagtctgtaccgcacgggaaatgttcacgcgcctggccgtgtgcatggcctcccgggctgtgggcagccgcatctgtgaggtgactcgtgaaagtaggtgattcctttgcagaacttcagggactgggagcagaggcccctcactcaacgacgtttgtgcgacatagtattgtatccaccttagtattgtatcgagccttttctgtgttttaatgagaaagcagaacactagtttcctatttaagactttaagggtttgtggggcggggcgggattaacacaacatttggctttgttttctttttcctttgatttccacatcaggtgtgtgcgagtgtgtgtgtgtggagatgttaagagcctcacaaggaaactgggttattggaggccaaggcggcttacagttctctgcgttcgtcacttaattcctgaatgtttcagagaaacaggaatcagaaaatagcagatatcatgtaggaaagagaggataaacaaagaaaaaagaaaaaaaaataagctcatacccaaattcacaaagcctattttttaaaccaaagcacattttgaatgagtatggaacctccatgggctcagaaaaaagatgctaatatatttatctcattgtttacataagcttttacagtttcagacctcagcagctgtaaggccagtccagggaaccctcccctgctgctggaaacccttctgagttggccctggagtggctcacgggcagagaagggtagccctggggctgggggagggattggaagcctccctggagtcacctgagccctcgtccccattcccagggcccctccaagcccagctggcaccaaagagcttgggcccgtgctgaccagcccccaaggccctctggccggaccatgctggtcctgaccagctagcctacgcggggatggccgtcagttctggccacaggacccgagtctgggcttgggtccccctgctgctctgcccgtgacccttggggatgggttgatgcgagggtcccactcaagccaaaaagccgggacctttgcgcagctctgtcgactctggtgggtccccactcctggggccccctaaccccaccccaggcagcggaaggggctgactgggtctggtccttaccaacatagacggtgcaaacactcttaacagtgttgtttttgtatcaatatgtttgtgcagtgatgaatgtatttatttctcagacttggggcgagtgagcgggtggcaggccgggctccgccactgcatgctcccgccggaccgagccccagcaagggctcctccaggattgcaaaaaaaaaaggaagagaaaagatgaacctttaagcaaataagaatctcagagactcgcagcatagccatacacctcagcctgtgaaatgaacgatccggaccctcaccaactttccccacctcaggcagccctgtgtgtttaccgttcatcaccactcgggggcaccgggccgcccacccactcccaaaatccgtcagtattcactggacctcaggccctgtgcaggagtgcgatccgggctgggccgctgggcaggctgaccccctgccctcctgcggccatcctgagttggggtgaggcctgggcagccggagggcagggctcagggagcaggaggctgcatccgtccacccccaggcgtgggggacaaaagccaaaggtgccaggccttagagcagacaagggctctcagccctggcatgccccctaaagggaccaaggtcctcctatttcccagaaccccgttggggcagatgttactgaacctgtgaatcagacgccaggagtgagggctggggagggacctaactggagcctcagtctgacattccacgccggggtgggggtgggcatgagcggtgggaactgaggctgcccaggacccccttcctaggatgccccggcttcagtcaccccactttaactttctaccaggaccccctccccctacctcaccttgctatttattgctgtaatttattgacctcaaaaatgctgcataacagacctcactggggcagggaggatccccagggctcccaccctccacttggcgggccccgtggggccaggtgctgaggggagcctctctaccccacccatcactagcttccctctgccctctcccaccccgggggggacccaggttgggcactggctcatttctcgcaaatacctcgaaggggaggggggagggatggggttatagctgttttgtttaattggaactggaagagggatcatgttttgttttatgcccttcccagaaggggggagggacaccgggatcgcactcctgtactggccaccgccgctgtcacttgtcacattgagttcatgtcccttgagagtttgtataaattcaggtcagagctgcagctacacagctgcccagtgtcatagaaaagcaattcaccaacgactgatctctccattcagaagtgtgcagtcttaaatgtacagcgataagaaactgttattttatgatcttttcattaaaagcttgattgaaaa

SEQ ID NO: 141812 - DNA, 6940 bp, Homo sapiens
  Payload ID: 7882
  Gene Symbol: HIC2
  Gene Name: hypermethylated in cancer 2
  Uniprot ID: Q96JB3
  ENST ID: ENST00000443632
  CDS Start-End: 373-2220
ggccaagaattgtgtgtctgccaccagcgccccctggcctaggtggcccctgggtgtccttaatctcctgtgtgtgttagaggggcaggcattgcacccaccgaactccctagacctgttcgctggtccttactcttcctggctgtcagatccaactaccaggctctgtggccacagtctcctgctgggctgcccctggtgccccagccagagacccccaggtgcgtcccttcatcgcccttccctcccttcttcgctgatggctgtctgggtgactgtgttcgtcttctcttccccaggtgaccaggcattgatgcacccccaggaaggccacgcgctcaggagccccccccgccgctggctgctgctcacatggtgtctgggcccttggcactccggtggtgcgcgtgggcagggcgcggggacatggggcccgacatggagctgcccagccactcgaagcagctcctgctgcagctgaaccagcagaggaccaagggcttcctgtgtgacgtcatcatcatggtggagaactccatcttccgggcccacaagaacgtcctagccgccagcagcatctatttcaagtccctggtcctgcacgacaacctcatcaacctggacacagacatggtcagctccacagtgttccagcagatcttggacttcatctacacaggcaagctgctgcccagcgaccagccagccgagcccaacttcagcaccctcctcactgccgccagctacctccagctgcccgagttggcagccctctgccgccgcaaactcaagcgagccggcaagccctttggctctgggagggcggggtccactggcatggggcggcccccccgcagccagcggctgtccacggcctctgtcatccaagctcggtatcaggggctcgtggatgggcgcaagggggcccacgccccccaggagctcccccaagccaaaggctcagacgatgaactctttcttggtggctctaaccaggatagcgtgcaaggtctgggccgggctgtctgcccagctggcggggaggcgggtctggggggctgcagcagcagcaccaacgggagcagcgggggctgcgagcaggagctgggcttggacctgtccaagaaaagcccacccttgccccctgccaccccaggtccccacctcactcccgatgacgcagcccagctgagcgacagccaacatggctcgccccctgcggcctctgctcctcccgttgccaacagtgcctcttattctgagctggggggcacccctgatgagcccatggatctggagggggccgaggacaaccacctgagcctgctggaggcgcctggtgggcagcctcggaagagcctccggcactccactcggaagaaggagtggggcaagaaggagcctgtggctggctccccctttgagcggagagaagcagggcccaagggtccctgcccgggagaggagggtgagggggtcggggacagggttcccaatggcatcctggctagtggggctggccctagcgggccctatggggagcccccctacccctgcaaggaggaggaggagaacggcaaggatgcaagtgaagacagtgcgcagagcgggagcgaggggggcagcggccatgccagcgcccactacatgtaccggcaggagggctacgagacggtgtcctacggggacaacttgtatgtgtgcattccctgcgccaagggcttccccagctctgagcagctcaatgcgcacgtggagactcacacggaggaagagctgttcatcaaggaagagggggcctacgagacaggcagtgggggtgccgaggaggaggccgaggacctgtcagcacccagtgcggcctacacggctgagccccggcccttcaagtgttcggtctgcgagaagacctacaaggacccagccacgctgcggcagcacgagaagacgcactggctgacacggcccttcccctgcaacatctgtggcaaaatgttcacgcagcgcggcaccatgacgcgtcacatgcggagccacctgggcctgaagcccttcgcctgcgatgagtgtggcatgcgcttcacccgtcagtaccgcctcacggagcacatgcgtgtgcactcgggcgagaaaccttacgagtgccagctgtgcgggggcaagttcacccagcagcgcaacctcatcagccacctgcgcatgcacacctccccctcctagaagccaaagacccgcgggcgccctctgccaccttgctccccgggaacccatggaaggagaagcgaggtgatgcagcagcaggggcaagaccctgggtccagtggaggctccgggtggcccctctggcccccactgcccacacccagagctttaatggacagtccgtaccaagcagagccgagaggagggaagccaggggtcccagcccgtctacctccccatcccacccaggcccccagctccccgcgggggccaccgcagggcctgtgggctgggtcacgtgggtctcgctgggacctggtccctttgttgcaggcggcttggagaaagggcagtgggacgctggccacggccagggtggtgtcgggagcaggcctcaccccgctggccgtgtctgtgtgtgtgcacgtgtgcttgtgtctgtgcgggcgcgtgcagccctggttctgcagggaacaggtgctgggggtgcagatccctccctccttgagccagggtggcactgttcactggcgctgggacagtcagggtgaccccaccgcctacctctctacatctaaagagccctctgggcctgtgttgctgttattcctactgatctgttcctctgtttttctttttgatttttgttttttaaaccaaaacagacaatagcttattttctttccgccccctccggggctgagcctgggtctgaagactgaatgtaacaggggccgctggcactcctgcgcgtcccccggctctggcgctgcaggggtgtcggcgcgccacctctccaggccccagaagcccttcttgcccaaaggcttccctggtccctgagccctgcctcggctgcctcaggggagagtgcttttcctgtagtttccaaggaatattctttgtttagaggtacttgttttttattaagagaaaaaccagtgtaacgtttatgtgactgtttgaactggaaggtctggggttccggggggtggggggaggctagactcaatgccggggccgtcggtactcttgttttcatttgtgtgtgcgtgcgtgtgtgtgtgtgtatgtgcgtatgtgtgtgtctatgtgtggtgtgtgccgtatgcatgggcagatgtttcgctttccctccttcctcgctgaacaaggtggagacttctgaccttttgctacctcttgaattcatgacaacgatatgttggtgactggcagtggaagcccttgacactcttgttttccttcgcttagcacctaggaagtcgtgtgcaggagccagcagggcgccaagtggcccagtgcctgcagctcacctgtgggttttccctttgagcctttggccacatccacctcgaggggaccctggcaccccgggcacacaaacctctgtggtataggtgaggggtgtgaggccccagcctggagccaggcactgggtgctgacaggggaaccatgaggagggtggcaggtctttgcagctcccggccagggtgaggcggaagtgagccctcatcctgccactcctatcctccattcctgcaagagttttaagcttgagagagctgaccacagggccccccggggaacagggatggcacttccctgagcagtcctggcccccggccactgtctcggggcccacctctcgcccctcatcttggtaattagccagcctcagatacttctgtgggccctgaagtgggctctcaaggtcagaccaaggttgctgatctcagtcccactgtcttcagccagctgaagctgtggggctgggctggcagcctttattgtcatcttgcttcaccatttttttttctctctcttttcattctattttaagtttagaccaaaaaaatacagagtcatcccctacccccacccctctagagaccctccagctaaaaacagagcctgagttcagggacccaagtggtgagcggcgtcttttgggggtgagggagcttgggtagatgaggctcctggctgagccctccctgtggtgatcccagcctaagatggcccctcttccctcctggtgggagacagaggactggaccctgggtctcaggttccagcaagtcaggctagggacctggggggaggagacccatggacttcacccatactcagtgagggggctcctgccgtcctgacgccaccccgccccatcagcacttaagccacatgacacaaagtctgtaccgcacgggaaatgttcacgcgcctggccgtgtgcatggcctcccgggctgtgggcagccgcatctgtgaggtgactcgtgaaagtaggtgattcctttgcagaacttcagggactgggagcagaggcccctcactcaacgacgtttgtgcgacatagtattgtatccaccttagtattgtatcgagccttttctgtgttttaatgagaaagcagaacactagtttcctatttaagactttaagggtttgtggggcggggcgggattaacacaacatttggctttgttttctttttcctttgatttccacatcaggtgtgtgcgagtgtgtgtgtgtggagatgttaagagcctcacaaggaaactgggttattggaggccaaggcggcttacagttctctgcgttcgtcacttaattcctgaatgtttcagagaaacaggaatcagaaaatagcagatatcatgtaggaaagagaggataaacaaagaaaaaagaaaaaaaaataagctcatacccaaattcacaaagcctattttttaaaccaaagcacattttgaatgagtatggaacctccatgggctcagaaaaaagatgctaatatatttatctcattgtttacataagcttttacagtttcagacctcagcagctgtaaggccagtccagggaaccctcccctgctgctggaaacccttctgagttggccctggagtggctcacgggcagagaagggtagccctggggctgggggagggattggaagcctccctggagtcacctgagccctcgtccccattcccagggcccctccaagcccagctggcaccaaagagcttgggcccgtgctgaccagcccccaaggccctctggccggaccatgctggtcctgaccagctagcctacgcggggatggccgtcagttctggccacaggacccgagtctgggcttgggtccccctgctgctctgcccgtgacccttggggatgggttgatgcgagggtcccactcaagccaaaaagccgggacctttgcgcagctctgtcgactctggtgggtccccactcctggggccccctaaccccaccccaggcagcggaaggggctgactgggtctggtccttaccaacatagacggtgcaaacactcttaacagtgttgtttttgtatcaatatgtttgtgcagtgatgaatgtatttatttctcagacttggggcgagtgagcgggtggcaggccgggctccgccactgcatgctcccgccggaccgagccccagcaagggctcctccaggattgcaaaaaaaaaaggaagagaaaagatgaacctttaagcaaataagaatctcagagactcgcagcatagccatacacctcagcctgtgaaatgaacgatccggaccctcaccaactttccccacctcaggcagccctgtgtgtttaccgttcatcaccactcgggggcaccgggccgcccacccactcccaaaatccgtcagtattcactggacctcaggccctgtgcaggagtgcgatccgggctgggccgctgggcaggctgaccccctgccctcctgcggccatcctgagttggggtgaggcctgggcagccggagggcagggctcagggagcaggaggctgcatccgtccacccccaggcgtgggggacaaaagccaaaggtgccaggccttagagcagacaagggctctcagccctggcatgccccctaaagggaccaaggtcctcctatttcccagaaccccgttggggcagatgttactgaacctgtgaatcagacgccaggagtgagggctggggagggacctaactggagcctcagtctgacattccacgccggggtgggggtgggcatgagcggtgggaactgaggctgcccaggacccccttcctaggatgccccggcttcagtcaccccactttaactttctaccaggaccccctccccctacctcaccttgctatttattgctgtaatttattgacctcaaaaatgctgcataacagacctcactggggcagggaggatccccagggctcccaccctccacttggcgggccccgtggggccaggtgctgaggggagcctctctaccccacccatcactagcttccctctgccctctcccaccccgggggggacccaggttgggcactggctcatttctcgcaaatacctcgaaggggaggggggagggatggggttatagctgttttgtttaattggaactggaagagggatcatgttttgttttatgcccttcccagaaggggggagggacaccgggatcgcactcctgtactggccaccgccgctgtcacttgtcacattgagttcatgtcccttgagagtttgtataaattcaggtcagagctgcagctacacagctgcccagtgtcatagaaaagcaattcaccaacgactgatctctccattcagaagtgtgcagtcttaaatgtacagcgataagaaactgttattttatgatcttttcattaaaagcttgattgaaaa

SEQ ID NO: 141813 - DNA, 9885 bp, Homo sapiens
  Payload ID: 7883
  Gene Symbol: HCN1
  Gene Name: hyperpolarization activated cyclic nucleotide gated potassium channel 1
  Uniprot ID: O60741
  ENST ID: ENST00000303230
  CDS Start-End: 242-2914
ccagccgcaccggagcccggaccgcagccactaagggcagcggcggcggcgggagccaggcgcgcagctagcagcggcgcggtcgggaagcagcagccgccgccgccgccgccgccgccgcgacgggcagctgggctcgccggcagccggctcgggcccctaccctctcggctacgtgtctccggcgccgggcggccggcgagtctggagcccgcgccgtcgccggccgcgtcctccgggcatggaaggaggcggcaagcccaactcttcgtctaacagccgggacgatggcaacagcgtcttccccgccaaggcgtccgcgacgggcgcggggccggccgcggccgagaagcgcctgggcaccccgccggggggcggcggggccggcgcgaaggagcacggcaactccgtgtgcttcaaggtggacggcggtggcggcggtggcggcggcggcggcggcggcgaggagccggcggggggcttcgaagacgccgaggggccccggcggcagtacggcttcatgcagaggcagttcacctccatgctgcagcccggggtcaacaaattctccctccgcatgtttgggagccagaaggcggtggaaaaggagcaggaaagggttaaaactgcaggcttctggattatccacccttacagtgatttcaggttttactgggatttaataatgcttataatgatggttggaaatctagtcatcataccagttggaatcacattctttacagagcaaacaacaacaccatggattattttcaatgtggcatcagatacagttttcctattggacctgatcatgaattttaggactgggactgtcaatgaagacagttctgaaatcatcctggaccccaaagtgatcaagatgaattatttaaaaagctggtttgtggttgacttcatctcatccatcccagtggattatatctttcttattgtagaaaaaggaatggattctgaagtttacaagacagccagggcacttcgcattgtgaggtttacaaaaattctcagtctcttgcgtttattacgactttcaaggttaattagatacatacatcaatgggaagagatattccacatgacatatgatctcgccagtgcagtggtgagaatttttaatctcatcggcatgatgctgctcctgtgccactgggatggttgtcttcagttcttagtaccactactgcaggacttcccaccagattgctgggtgtctttaaatgaaatggttaatgattcttggggaaagcagtattcatacgcactcttcaaagctatgagtcacatgctgtgcattgggtatggagcccaagccccagtcagcatgtctgacctctggattaccatgctgagcatgatcgtcggggccacctgctatgccatgtttgtcggccatgccaccgctttaatccagtctctggattcttcgaggcggcagtatcaagagaagtataagcaagtggaacaatacatgtcattccataagttaccagctgatatgcgtcagaagatacatgattactatgaacacagataccaaggcaaaatctttgatgaggaaaatattctcaatgaactcaatgatcctctgagagaggagatagtcaacttcaactgtcggaaactggtggctacaatgcctttatttgctaatgcggatcctaattttgtgactgccatgctgagcaagttgagatttgaggtgtttcaacctggagattatatcatacgagaaggagccgtgggtaaaaaaatgtatttcattcaacacggtgttgctggtgtcattacaaaatccagtaaagaaatgaagctgacagatggctcttactttggagagatttgcctgctgaccaaaggacgtcgtactgccagtgttcgagctgatacatattgtcgtctttactcactttccgtggacaatttcaacgaggtcctggaggaatatccaatgatgaggagagcctttgagacagttgccattgaccgactagatcgaataggaaagaaaaattcaattcttctgcaaaagttccagaaggatctgaacactggtgttttcaacaatcaggagaacgaaatcctcaagcagattgtgaaacatgacagggagatggtgcaggcaatcgctcccatcaattatcctcaaatgacaaccctgaattccacatcgtctactacgaccccgacctcccgcatgaggacacaatctccaccggtgtacacagcgaccagcctgtctcacagcaacctgcactcccccagtcccagcacacagaccccccagccatcagccatcctgtcaccctgctcctacaccaccgcggtctgcagccctcctgtacagagccctctggccgctcgaactttccactatgcctcccccaccgcctcccagctgtcactcatgcaacagcagccgcagcagcaggtacagcagtcccagccgccgcagactcagccacagcagccgtccccgcagccacagacacctggcagctccacgccgaaaaatgaagtgcacaagagcacgcaggcgcttcacaacaccaacctgacccgggaagtcaggccactctccgcctcgcagccctcgctgccccatgaggtgtccactctgatttccagacctcatcccactgtgggcgagtccctggcctccatccctcaacccgtgacggcggtccccggaacgggccttcaggcagggggcaggagcactgtcccgcagcgcgtcaccctcttccgacagatgtcgtcgggagccatccccccgaaccgaggagtccctccagcaccccctccaccagcagctgctcttccaagagaatcttcctcagtcttaaacacagacccagacgcagaaaagccacgatttgcttcaaatttatgatccctgctgattgtcaaagcagaaagaaatactctcataaactgagactatactcagatcttattttattctatctcctgatagatccctctagcctactatgaagagatattttagacagctgtggcctacacgtgaaatgtaaaaatatatatacatatactataaaatatatatctaaattcccaagagagggtcaaaagacctgtttagcattcagtgttatatgtcttcctttctttaaatcattaaaggatttaaaatgtcgttgtaagattatttatttctaacctacttttacttaagtcctttgatatgtatatttctctattttatgaagagttcttggattcaatggaaacaaaactgattttaaaaaggcaactcaaatgaactagtaaatagcaccaatcaaaactttctttcattagctgtgtctctgcatctaaattgttaatcattaatggtggagaattaaataacaaatcccattttatagatctaaattgtatttcggtgctttcaatttcaaattaggttaaagaatgcactacttgcttggccaccgtaggagactagcattgccactgtttgttaagaatatcactaacctcaaacatgttcattgatctttcagaaagctgagggaaaattaatatttgtcttcatgtgttatcggacttttaccaagactcgatcaatgttagttgtaaataactttttcaacccaaataaaaatagctattctgtgttgtatgaaggtaaaagtcattgtttaagaatttagttttattgcttcacttcaaaacttagagttttaaattttacaaaacctgattgtgagaattattcaattgtaatgcaatggcttgaaacctacaatattattttaacctgcaatgttttatgcaaaattgtatgctcgaatctacaaattgcttgtattacaccaaaaatcgttacttttctttcttcttgccataatcaagcatctgaaaatagtccctgcatgcttctggggaaaaaaaaataggttcaaatcagtcattgtagagaaaggcttacagtatttctcgtttctagaaaagcataacaattcattaattgcctatcttataattcctataaggctgacttggatctctgacttaagtctagaagtgaggttttcacttttatttaatattattgctattattatttaaataattatttgtaaaccacagcttgatttggagttaagtgttgtctgtgtcttcactgtagctggtaatttactatggtattaatttaaagaaataaattcaatacagcatcacgtctgtttgggaacacacattttgctctatgtatattgtaactaaatggttagtaaactttaaggcatgtggtgactaacgtagcccttagataggaggtttgtcatttttaatgtgttgaaaatagtacagacatggtgacagaaagcaggggtaaagttgaacgtctatgagcattgtctgtctgttttcttaactctttacatgatctgtgagcacctgcttcttctcaaagaactcccttagtaatcatttgtgcctaatgcatcccacacatgtggagtatgactggaacacaattgaaagattcctaacaactggctgcggtaaataacccaagttaagagcatgacttaaagtggaggtcttcagtatctctggcactggcaatacatttaagaacatacagagatcacacattatgtgggacagggcctgcagatagacttgaggacagaaaacaaaaacaaaagcagaaactctaaagtggatccttgctgcctgttatgccttttgtggatataatacctataataccaaaatgagttgttatgtttaatttcaaacaaatcccaactggtgtggaagtaattaactgctagtcgatgtaatgtaatcatcaatatgctggtgacatatgatggcatgtcaggaatactgttgtaagaaagggattgttcagtctacctagaacctatgggaaagctgcaagaccatttacatatcagtacaaaactcctttattttattaaaatatgagaattaacttcaatttattaagattacgtattggtcctttaaattattaaaggtttacatttgataggattaatggatttggtagtgaaatatttttatatatataaatttttggttttttattttgagcactattgggaaacataagcaaaattgaaatgcatggtctttcagtgcaaccatacaatttttattcactttgtaatagaatggacaaaaaaactaaggtttatatattaaactaataaaaaggtacagggtaaattatatacatatatgtatgaatgtatatatacttagattaagaaaaaaaaatgactcacattcctgtaatataaaggtccattgctagttgaaaagtgacctcttttctctgtacatagtgaagcccgtatgtatggagttttaatctgtacagaaagaaatgtattattcattggtctttctgctgctggaaagataatagaatagctgattcttacaacaactgtatgatcagggatgagttagagtatttcttttgtctttgctcaaagccatacatatataaatatatataaagattattaataaattcaacaaaaaataaactacaatcatgaatattttattttatcaatatatgctaatcaaatgttttattttattaatgagtacagctttgcctctatttttacatcataaaatttccaagagcttatacttgataatcacataaaatcaattatattctataattctggaatgagaggactttaaatagaacatggatttttcaaccacttctttgtttacctttttcgtatagtaaaatatgagcttattttcttttttgctctgtgcctttttagaatgtggttgttctccaacttcaaaacacaaccattttgtgtaattattggatatacagatgagaaataattttcctgtaataatggtaaataattgtcctgtaatatatttatacaaacctattttgttataatagttctatgacatacctattttgttataatagttttataacatacctattttgttataatagggccttgggctctattataacaaaacaggtttatataaatacattcatatttatagccttaaacaaaataggtttgtatagtaggcccaaggccctattataacaaaataggtttgtataaatatattcatatttatagccttgggccctgcaaagttatttggagagtgatagaacctccccacacaagtgggttttaaatgatacctaaaagcctgagatagagtttatcataatgagaataagtagtgaagcattcctgaaaacaaggaggataaatagtagcaatggcaatatattctattcaccaaaaaagtagcttgtctccaggtctggatgacctcttcataagtgaacaattccctgatgaatgctgttccactttaaagagatggttattttgcaatttataaacttaactgagcatactattttcaggacactacaaagtacatagtcaagttattaccgtcattcctataggacagagaatgatttaaacaatatgacatgtttaaaattttagatgatttatttcaaatcctgaattatgtctacttcaaattatgagcaatctctattatctttcaggactatttaaaaaatctccatacctcctctttcagcttaggtttttatatttgttaattttactatgttactttgcttctatggccctcacttgcactgtttataatgttaacctgtttgaatgagatatctctccattatatctttatctttttagaacatgtgccataaaacccatgtggttattttgttcatatgcactacaactagcaaacttttattttatgttcacctactttaaaaagtactcatactgtaccatgggaaagaaacatgggccttatagaatggaatgctgagctattttgagtcctgaaaacaatggccaaaaatttaaggaactgtggttgctgcatgcaccaaattgtagcacatacaaataaataaaatacagttctataactgtattcaatatggttattttcaaggaaaaataggatagaaattttctttgaaagatttgctattgtacttagggaagtacacctgctattacccctcaaaagcaatgactttcttaagcaatttcaatttttttcctttttaacaaccctgcacttgcacaaccctgcatctcttgtctcaccctaatgctgaccctgcttccaattcaggctttgacagggacaaatggagattttaaggttttttaatgagagaagccttgctgacactccccgcatcccaccttgaaaattatttaaagatgatcttaaaagaacctacagataatgctctgaatttgtttacaaggtccttgatgtggagagaatgagtaatacattaaatgctggggaaataattatcatttagtgaaaaattaagcatgcttttctaaaatgtggatgtttaacagagcacagctgattgggaacactggcagttcaatgcagctggagtgtctcacagggtgaagaggaacccagatcaagtgggaaatagggatttcaaaaaccttctgaaaggcttttaacatcagggcaaaggttttacagtgttgtactttatattcttaatttaagcttatcaacggggaggattcacattgaaatgtctgttttgctaatgtaacaaggaataaaataatttatgacacagcaaaaactgggggctatttacaaccccaccctgccttgtgaggatgctgggtcctaaggaaggtcctaggtttgctaaatagagtaatgggaataggaaactgaaagtttacttgctttgcgtaagataatatattgcggcagggaaggggtacaagaagataagagctagaacctgtgagaagggaaagaagtgataaaataattttggctaaaataaagcaagttctcaggccaggcgtggtggctcatgcctgtaatcctagcactttgggaggccaaagtgggaggaatgcttgaggccaggaattggagaccaaccagggcagcatgtcaagacctggtctctacaaggaaaaaaaatttttttaattgaccagtatatacttacatacctgcagtgtttagaaaacccgactataggtggtgtattcctgtagtcctagttactcagaaagttaaggcaggaggatcgcttgaacttaggaggtcaaggctgcagtgagccctgttcgttccactgcactccagcttgggggacagagcaaaaccctttctcaagaaaaacccaaacaaacaaaaaagtgaagccagttctttaatttctattggagatatcacacacgctccaaagagtggcaaaggtgaacattctttggagctattatatttctaatgtaacatcaatggccatttactcccaaagggaaacatctttttttttttttttttttaagatggagtctggctctgtcacccaggtgggagtgcaatggcaggatcttggcccactgcaacatcagcctcccaggtttaagcaattctcctgcatcagcctccagagtagctgggattacaggtgcccgccaccatggctagctaaatttttgtaatttttagtagagacagggttttaccatgttggccaggccggtctcgaacccctaacctcaagtgatccgcccgcctcaccctccagaagtgctaggattacaggcctgagccaccgcacccggccctgctatttttttctatgtagttgtttcagtaataccatatgagcagagaatactattgattcattcaattgaagaaatctgaataaattagtaaatataataattcttcaaaagaggaccactttatgtttccaatagattatataattgaattcaggtaacgtagagttattcagacttttttttttaaataacggaattttgcaaaaaaacaggttgcatcgttttctacagagaatattcagatgtgtagaggcaaagagactttcttgaaaggtttttatttcctgttaaatttgtgaggaaaactcctgagaaaggaaagatttacttttgaaggaagaaagaacataacccaaagaaatttgaaagattcaaaaagagttttccaaatgtattctcatttctttctcatatttgttcaaggtcttagtttccaagcattcaaaattaaatcttgtttgcctaactcttctaacatctattaccaacctaacatattacaattctgtttaaaatgtgcagttctaaatgttcttgcgtgcctcactgtggaaagtgtggtgcatggaactgcagcgtcagtatcacccagaagtataattacaagaagtgcagagtccttggccttaccctgtacctacagaagtccgcttttgggcaagatccccagatgattcatatgtgtattaatattgaaaaaattggaactagtaagtcctagaggaggtaaattttaagggctttttaagggaacttccaagtgtgaagacatttctggagatgacaagtcaacatagcatgggatcttggctagacaaggaaagcgagagaacattaaataaacacaagcaacgacaaaccacctatgttataattttatcctggaccatccaaagtttactcttggtcacgctgtctaacccagcctgcctcctggcacttgctagttagaaccagggaagagaaaactaatatgtgttaggtattataatttccttatgtcacataaattttggtgccatagctagcaatgtttcttaatatcacatcagtacaatgtgtccattgccttctgtaacatttttaatgctatcaataatacattgacattataaaaataaatgaatgtggtcaa

SEQ ID NO: 141814 - DNA, 4738 bp, Homo sapiens
  Payload ID: 7883
  Gene Symbol: HCN1
  Gene Name: hyperpolarization activated cyclic nucleotide gated potassium channel 1
  ENST ID: ENST00000634658
  CDS Start-End: 406-1293
aatgtcacgctgggcagaagtagagcaagagtaacgagcatgtgtggagagcggacggggagagaccctttctggccaacagagggcagccgaggggaggcgctggggcgcgagggctgagccgagctgagcctcgcctagctccggcagcctcagcttcagcaccagccgcaccggagcccggaccgcagccactaagggcagcggcggcggcgggagccaggcgcgcagctagcagcggcgcggtcgggaagcagcagccgccgccgccgccgccgccgccgcgacgggcagctgggctcgccggcagccggctcgggcccctaccctctcggctacgtgtctccggcgccgggcggccggcgagtctggagcccgcgccgtcgccggccgcgtcctccgggcatggaaggaggcggcaagcccaactcttcgtctaacagccgggacgatggcaacagcgtcttccccgccaaggcgtccgcgacgggcgcggggccggccgcggccgagaagcgcctgggcaccccgccggggggcggcggggccggcgcgaaggagcacggcaactccgtgtgcttcaaggtggacggcggtggcggcggtggcggcggcggcggcggcggcgaggagccggcggggggcttcgaagacgccgaggggccccggcggcagtacggcttcatgcagaggcagttcacctccatgctgcagcccggggtcaacaaattctccctccgcatgtttgggagccagaaggcggtggaaaaggagcaggaaagggttaaaactgcaggcttctggattatccacccttacagtgatttcaggttttactgggatttaataatgcttataatgatggttggaaatctagtcatcataccagttggaatcacattctttacagagcaaacaacaacaccatggattattttcaatgtggcatcagatacagttttcctattggacctgatcatgaattttaggactgggactgtcaatgaagacagttctgaaatcatcctggaccccaaagtgatcaagatgaattatttaaaaagctggtttgtggttgacttcatctcatccatcccagtggattatatctttcttattgtagaaaaaggaatggattctgaagtttacaagacagccagggcacttcgcattgtgaggtttacaaaaattctcagtctcttgcgtttattacgactttcaaggttaattagatacatacatcaatgggaagaggtaagatgcatctttttcttttttaaatctatatcatgaaattgttaattatggctgttttacaatgaacaactgtgcaatgtgtaatgagttttatgaaattcaagtagaaaaatgtattcgacgactcttttccatgcataagtgatatatttgtatccctaaaatatatgatcaaataatggatttgaatgaactgaaaaaaatagtgatcgttttatgccaatttattttatttttaaataaatgcactttaatcagcaattattatcttgatcaatacaacccctttcccaccttggttttttttaatctaatataaatacatcaagtaccattattttgataaagatgtgtagggtctgattgctaatctggcacatcattagctctgtgagatagtgtggtttttgtatcctctaatattgaagtttcattgaattcatgattgggtaaaacagattgtttctttatttccaaattgtatatataaaggctttgattttagcatattaattttgcttattgttatgccttgcctatagtaacttattttagtttctccctattagttcatttcataatactaaaaaggaacatattcatgagggacattagtacatagaaaacacaaagagtatagtgaataaatggagtgaatctgaccaatcaggcccatattttgctgaatagagcatctgttgttaggcagtgggtgggacctgagagggctcagccaactggagtttccaaagatctgagttaaaccatcatcaagcaaaggagttcatatccctatcttcaaagtctgaatattaaccattttgacttccttttcttcctaagtctttttgtattaattataacctgaattttatagtctgcataagcgtaagagtccaaaagacttgtagaatgcctaaatcgacactaatgaaagtcatataaagtcatatactggctatagaatattgctttcctccctacagaaatactttttagcattttcaagataaattatgtttttaaatatgtcataaaatggaagttctgtttgatttctgtgaggcggtagcagtgtttttgtatgtgcttgtcagtgacattttggttcacaggatttcaggaaatgacatgcaataataaaacactgcataatacactgataaaaaggcataaaaatggatcattcttaaaatatagatatgggatatatttaaaatcaaatgaagcacatttgagaaatcagattcatcttgtaatttttctctatatagcacattccatctaaaatggaataaatgttcagttctcaaagcctttttatgctaatttgagattaataccaaaccaagatgattcttgctaataattgctaatatttattgaaggcttattacacgtcagctagtatgtttgattctttacatatattagctcactgaatcttcctaacaacacaaagatgtaaatataattattgtcattattttacagatgagaacaattaaatacaataaggtaactcgtccagattcatagaactagtaagaagtggagctgggattccaaacttggcaatcagactcaggagccagtgctcttaactgcaaaactatataggttcttactatgatatataatgttttagttataaatatcttaatattctaccattttatagattgtctaacgaattatagggaacttttcttaagtaagactgtgggccatgcaatacaacagagttgaatagtacctcttaaaacaaggccatggaaaaatattttaacaaatatcctgtgagaggaaagtcactgatataaacatccagtcaattaaaaatacagtagcaatgtgactatttttaatatcttgtggttttagcccagttaccctagagaatggcagcaggatgaacagatggcatcctatcagataaaatggcaggccatgtggtcatataagagtatactccttaccaccaatgtcctttggcttctggcagtaattacaggcacctagatctgtgtaacatgatgtgttttaaagatgccatgataaaatttaggaacatcagctcactgctatcattattgtaaaatgcaatttaatatgcacttacagacatttggtaaccaagcacattcaggctagagttgtgggttggcaacatgtttcttataaataaatgaccttggtaataaatgaaccataagcccatttaggtgaagaatgttttcttgattatatgatacccccatataatatcatatatcatgggtatttaatgcccattagtaatgctgttcaacagggaagaaacagagtcataatccagaatttaatacaaattaatctttccatcacctacatgtttctaaccataatctccaagaaacttgaatggttccaaaactggaaatctctctacctgatttttctaaatgtcaccaggatgtgtttacaagtaaaaatacaacaaataaatcagaaaaagtagctctgtgagcttttgcaataaaaattcagaggaagatgtgagttcacccacatgtctttggttctgggtgttttagtatcaagctggctaatgctaaattcagcaaatttggggaagtaatgtgtgaagtctggaagctgccactgttctaaatgaatcattcctgaggaaagctgctgccttctataggaagctgcttccatcttcaacaatacatttttttttttctggactgaattagttcaactgaaaaacaacaagaagccctgatgccagataaattagaaaaatattatgaatgagatacagaagctttaaatttttgtgcttatgttattatcattactaaagctgaattagtggttaatacaggaggaaaaaactgatttgagcaactaatttatgaaacacatggtgttaagaagtgaggagggaagttgttttcatgaaccaattataagatcaatagatttgggatgtaaaaatagctttctgtgacattacactgaaactttatatatattgccaggtgaggtaaaaaccagagacaatttagataaatcaagccagaaatttcttttcttgtaatagctagaaagctgaggtgaatctttccaatttttatgtttggttttaaaaaactattatttgaattcagcattgtcgttgttgttattgtgtttaaagacagtgatccaagccagactgctatttcataacctatcacaagggtaacaaattccttgtgatcttcctaaaagagacatacggtgaggaaatccctggaaattaaatggaatatgtgacaatcacaagccactgaagagataaagagtagattaagggcttagtgaataggagattattcagtttgtaaaggtgaagagttcctttacagctgctgatctcagtcattttatcaacaggagatgaccttcgaaattttttagaggtttaggaaatattaattgcaaatacaaa

SEQ ID NO: 141815 - DNA, 3408 bp, Homo sapiens
  Payload ID: 7884
  Gene Symbol: HCN2
  Gene Name: hyperpolarization activated cyclic nucleotide gated potassium channel 2
  Uniprot ID: Q9UL51
  ENST ID: ENST00000251287
  CDS Start-End: 54-2723
ggccggcggcggcggcggcggctccgctccgcactgcccggcgccgcctcgccatggacgcgcgcgggggcggcgggcggcccggggagagcccgggcgcgacccccgcgccggggccgccgccgccgccgccgcccgcgcccccccaacagcagccgccgccgccgccgccgcccgcgccccccccgggccccgggcccgcgcccccccagcacccgccccgggccgaggcgttgcccccggaggcggcggatgagggcggcccgcggggccggctccgcagccgcgacagctcgtgcggccgccccggcaccccgggcgcggcgagcacggccaagggcagcccgaacggcgagtgcgggcgcggcgagccgcagtgcagccccgcggggcccgagggcccggcgcgggggcccaaggtgtcgttctcgtgccgcggggcggcctcggggcccgcgccggggccggggccggcggaggaggcgggcagcgaggaggcgggcccggcgggggagccgcgcggcagccaggccagcttcatgcagcgccagttcggcgcgctcctgcagccgggcgtcaacaagttctcgctgcggatgttcggcagccagaaggccgtggagcgcgagcaggagcgcgtcaagtcggcgggggcctggatcatccacccgtacagcgacttcaggttctactgggacttcaccatgctgctgttcatggtgggaaacctcatcatcatcccagtgggcatcaccttcttcaaggatgagaccactgccccgtggatcgtgttcaacgtggtctcggacaccttcttcctcatggacctggtgttgaacttccgcaccggcattgtgatcgaggacaacacggagatcatcctggaccccgagaagatcaagaagaagtatctgcgcacgtggttcgtggtggacttcgtgtcctccatccccgtggactacatcttccttatcgtggagaagggcattgactccgaggtctacaagacggcacgcgccctgcgcatcgtgcgcttcaccaagatcctcagcctcctgcggctgctgcgcctctcacgcctgatccgctacatccatcagtgggaggagatcttccacatgacctatgacctggccagcgcggtgatgaggatctgcaatctcatcagcatgatgctgctgctctgccactgggacggctgcctgcagttcctggtgcctatgctgcaggacttcccgcgcaactgctgggtgtccatcaatggcatggtgaaccactcgtggagtgaactgtactccttcgcactcttcaaggccatgagccacatgctgtgcatcgggtacggccggcaggcgcccgagagcatgacggacatctggctgaccatgctcagcatgattgtgggtgccacctgctacgccatgttcatcggccacgccactgccctcatccagtcgctggactcctcgcggcgccagtaccaggagaagtacaagcaggtggagcagtacatgtccttccacaagctgccagctgacttccgccagaagatccacgactactatgagcaccgttaccagggcaagatgtttgacgaggacagcatcctgggcgagctcaacgggcccctgcgggaggagatcgtcaacttcaactgccggaagctggtggcctccatgccgctgttcgccaacgccgaccccaacttcgtcacggccatgctgaccaagctcaagttcgaggtcttccagccgggtgactacatcatccgcgaaggcaccatcgggaagaagatgtacttcatccagcacggcgtggtcagcgtgctcactaagggcaacaaggagatgaagctgtccgatggctcctacttcggggagatctgcctgctcacccggggccgccgcacggcgagcgtgcgggctgacacctactgccgcctctattcgctgagcgtggacaacttcaacgaggtgctggaggagtaccccatgatgcggcgcgccttcgagacggtggccatcgaccgcctggaccgcatcggcaagaagaattccatcctcctgcacaaggtgcagcatgacctcaactcgggcgtattcaacaaccaggagaacgccatcatccaggagatcgtcaagtacgaccgcgagatggtgcagcaggccgagctgggtcagcgcgtgggcctcttcccgccgccgccgccgccgccgcaggtcacctcggccatcgccacgctgcagcaggcggcggccatgagcttctgcccgcaggtggcgcggccgctcgtggggccgctggcgctcggctcgccgcgcctcgtgcgccgcccgcccccggggcccgcacctgccgccgcctcacccgggcccccgccccccgccagccccccgggcgcgcccgccagcccccgggcaccgcggacctcgccctacggcggcctgcccgccgccccccttgctgggcccgccctgcccgcgcgccgcctgagccgcgcgtcgcgcccactgtccgcctcgcagccctcgctgcctcacggcgcccccggccccgcggcctccacacgcccggccagcagctccacaccgcgcttggggcccacgcccgctgcccgggccgccgcgcccagcccggaccgcagggactcggcctcacccggcgccgccggcggcctggacccccaggactccgcgcgctcgcgcctctcgtccaacttgtgaccctcgccgaccgccccgcgggcccaggcgggccgggggcggggccgtcatccagaccaaagccatgccattgcgctgccccggccgccagtccgcccagaagccatagacgagacgtaggtagccgtagttggacggacgggcagggccggcggggcagccccctccgcgcccccggccgtcccccctcatcgccccgcgcccacccccatcgcccctgcccccggcggcggcctcgcgtgcgagggggctcccttcacctcggtgcctcagttcccccagctgtaagacagggacggggcggcccagtggctgagaggagccggctgtggagccccgcccgccccccaccctctaggtggcccccgtccgaggaggatcgttttctaagtgcaatacttggcccgccggcttcccgctgcccccatcgcgctcacgcaataaccggcccggcccccgtccgcgcgcgtcccccggtgacctcggggagcagcaccccgcctccctccagcactggcaccgagaggcaggcctggctgcgcagggcgcgggggggaggctggggtcccgccgccgtgatgaatgtactgacgagccgaggcagcagtgcccccaccgtggccccccacgccccattaacccccacacccccattccgcgcaataaacgacagcattggcgccaa

SEQ ID NO: 141816 - DNA, 3718 bp, Homo sapiens
  Payload ID: 7885
  Gene Symbol: HCN3
  Gene Name: hyperpolarization activated cyclic nucleotide gated potassium channel 3
  Uniprot ID: Q9P1Z3
  ENST ID: ENST00000368358
  CDS Start-End: 9-2333
tgggcgccatggaggcagagcagcggccggcggcgggggccagcgaaggggcgacccctggactggaggcggtgcctcccgttgctcccccgcctgcgaccgcggcctcaggtccgatccccaaatctgggcctgagcctaagaggaggcaccttgggacgctgctccagcctacggtcaacaagttctcccttcgggtgttcggcagccacaaagcagtggaaatcgagcaggagcgggtgaagtcagcgggggcctggatcatccacccctacagcgacttccggttttactgggacctgatcatgctgctgctgatggtggggaacctcatcgtcctgcctgtgggcatcaccttcttcaaggaggagaactccccgccttggatcgtcttcaacgtattgtctgatactttcttcctactggatctggtgctcaacttccgaacgggcatcgtggtggaggagggtgctgagatcctgctggcaccgcgggccatccgcacgcgctacctgcgcacctggttcctggttgacctcatctcttctatccctgtggattacatcttcctagtggtggagctggagccacggttggacgctgaggtctacaaaacggcacgggccctacgcatcgttcgcttcaccaagatcctaagcctgctgaggctgctccgcctctcccgcctcatccgctacatacaccagtgggaggagatctttcacatgacctatgacctggccagtgctgtggttcgcatcttcaacctcattgggatgatgctgctgctatgtcactgggatggctgtctgcagttcctggtgcccatgctgcaggacttccctcccgactgctgggtctccatcaaccacatggtgaaccactcgtggggccgccagtattcccatgccctgttcaaggccatgagccacatgctgtgcattggctatgggcagcaggcacctgtaggcatgcccgacgtctggctcaccatgctcagcatgatcgtaggtgccacatgctacgccatgttcatcggccatgccacggcactcatccagtccctggactcttcccggcgtcagtaccaggagaagtacaagcaggtggagcagtacatgtccttccacaagctgccagcagacacgcggcagcgcatccacgagtactatgagcaccgctaccagggcaagatgttcgatgaggaaagcatcctgggcgagctgagcgagccgcttcgcgaggagatcattaacttcacctgtcggggcctggtggcccacatgccgctgtttgcccatgccgaccccagcttcgtcactgcagttctcaccaagctgcgctttgaggtcttccagccgggggatctcgtggtgcgtgagggctccgtggggaggaagatgtacttcatccagcatgggctgctcagtgtgctggcccgcggcgcccgggacacacgcctcaccgatggatcctactttggggagatctgcctgctaactaggggccggcgcacagccagtgttcgggctgacacctactgccgcctttactcactcagcgtggaccatttcaatgctgtgcttgaggagttccccatgatgcgccgggcctttgagactgtggccatggatcggctgctccgcatcggcaagaagaattccatactgcagcggaagcgctccgagccaagtccaggcagcagtggtggcatcatggagcagcacttggtgcaacatgacagagacatggctcggggtgttcggggtcgggccccgagcacaggagctcagcttagtggaaagccagtactgtgggagccactggtacatgcgccccttcaggcagctgctgtgacctccaatgtggccattgccctgactcatcagcggggccctctgcccctctcccctgactctccagccaccctccttgctcgctctgcttggcgctcagcaggctctccagcttccccgctggtgcccgtccgagctggcccatgggcatccacctcccgcctgcccgccccacctgcccgaaccctgcacgccagcctatcccgggcagggcgctcccaggtctccctgctgggtccccctccaggaggaggtggacggcggctaggacctcggggccgcccactctcagcctcccaaccctctctgcctcagcgggcaacaggcgatggctctcctgggcgtaagggatcaggaagtgagcggctgcctccctcagggctcctggccaaacctccaaggacagcccagccccccaggccaccagtgcctgagccagccacaccccggggtctccagctttctgccaacatgtaaaacctttgagtacatccagccttagttcttggggtgcagtagtatgtacccaagggcagatgcctcttggggaaggccatggggacctgaaacattgccccatggaaatgtcgaccctgtgcggacattccgcatactgccatgaagacggtctctgtgtcctcagctcaagaatcctgtagcttgtcccatcataatccattcacccgttcatcatgtgtactgagcagctaccatgttcaaggtaatatgccaggcgctgtatgtctccactgccaagtagaagtgactcaaaaccctctgacaaggatattcccttggctatggtcctgccaggtgcaggcccaggcccatgaccccacctttactaagcacaagtacttgccactgccatcactgccaagtaactagatgtctctgtttccctgccaatgatcctgcaggttctgcccggtctggttatcttcctgttcctgtagcatagccaggcactgccagtcacctgtgcccccattgctgtcagcagatgtcttgggtcctgagtgtgggtatccacttttacccgctcactgccacctgtggacactctgtgtctaccctctgagtgggaacatacttctaagttccctgcagtctctgtcctgtggtagaccatctttttgtaaactgcgagcttcctcttccctgtaccctctgccccagtcgtgaccccctaaaagttaaggggtagttggcacctccttattaatatgccagcctagatcccccccggtggaggggcaaatggctgaatccttgtgtgatatttttttcttcgcttgtttatttattcatttatttaattgtatttattcatttactaactttatgtgttaccaattaattttgtttacccattcctttatccatccctcccctccttttcaggtaaggagacaggaggagtaggaggaggcagggcctctccatgccagcctctgtggtccttgcccaaacccatcagcgcaatacttgaaccttctcccaggtaggggcaggaggagccacatgagagagggagaaggaccgcgtttacctttagagttttgttttgttttttccttctgagtttgctgttggtgcaggaataagggaaaggcccaaggtatccaagcctggggaagggcaggccagccagcacctctgccttctcagggacaagagtagtcctttaccaccctcactctgcctgtcccctctcctactctacagcattaaagactgtgggaccaggaccctaagtctcctttccttctgggtggggagttctggggttcttggtgtgtgggagaagttttataattgcttccaaacagctgggtttaaatataaaatagacacactca

SEQ ID NO: 141817 - DNA, 3718 bp, Homo sapiens; identical to SEQ ID NO: 141816
  Payload ID: 7885
  Gene Symbol: HCN3
  Gene Name: hyperpolarization activated cyclic nucleotide gated potassium channel 3
  Uniprot ID: Q9P1Z3
  ENST ID: ENST00000575670
  CDS Start-End: 9-2333

SEQ ID NO: 141818 - DNA, 7228 bp, Homo sapiens
  Payload ID: 7886
  Gene Symbol: HCN4
  Gene Name: hyperpolarization activated cyclic nucleotide gated potassium channel 4
  Uniprot ID: Q9Y3Q4
  ENST ID: ENST00000261917
  CDS Start-End: 995-4606
caaaaatgccagggaaaggcgagcccagagcttggtgatggagaaattgggaagccaccccccacccttcaatcttaggatggggaattcgcaactgaagccggagcttcagacttggggcgcactcccagcttagcccaggaaagagatttaagggcgcagcagtgtggatacctctcaccccggccccgaaggtctagcgagggtctaacctgggccccttgccaggcccgccccccgcccctttccagcccccggcccgtgcgccgctgcccctttaagaagcccaggtaggcaggcccggctgctggagccgctcctatggcaacccgcgagctgcggcggcttcatgaatattccggggcgcgggagcccgagcgctgccggagggcgcttcgggggaggcggccgctgatgtaagcccggcgggtcgctgggctccgctcggttgcggcgggagccccgggacgggccggacgggccggggcagaggaggcgaggcgagctcgcgggtggccagccacaaagcccgggcggcgagacagacggacagccagccctcccgcgggacgcacgcccgggacccgcgcgggccgtgcgctctgcactccggagcggttccctgagcgccgcggccgcagagcctctccggccggcgcccattgttccccgcgggggcggggcgcctggagccgggcggcgcgccgcgcccctgaacgccagagggagggagggaggcaagaagggagcgcggggtccccgcgcccagccgggcccgggaggaggtgtagcgcggcgagcccggggactcggagcgggactaggatcctccccgcggcgcgcagcctgcccaagcatgggcgcctgaggctgcccccacgccggcggcaaaggacgcgtccccacgggcggactgaccggcgggcggacctggagcccgtccgcggcgccgcgctcctgcccccggcccggtccgaccccggcccctggcgccatggacaagctgccgccgtccatgcgcaagcggctctacagcctcccgcagcaggtgggggccaaggcgtggatcatggacgaggaagaggacgccgaggaggagggggccgggggccgccaagaccccagccgcaggagcatccggctgcggccactgccctcgccctccccctcggcggccgcgggtggcacggagtcccggagctcggccctcggggcagcggacagcgaagggccggcccgcggcgcgggcaagtccagcacgaacggcgactgcaggcgcttccgcgggagcctggcctcgctgggcagccggggcggcggcagcggcggcacggggagcggcagcagtcacggacacctgcatgactccgcggaggagcggcggctcatcgccgagggcgacgcgtcccccggcgaggacaggacgcccccaggcctggcggccgagcccgagcgccccggcgcctcggcgcagcccgcagcctcgccgccgccgccccagcagccaccgcagccggcctccgcctcctgcgagcagccctcggtggacaccgctatcaaagtggagggaggcgcggctgccggcgaccagatcctcccggaggccgaggtgcgcctgggccaggccggcttcatgcagcgccagttcggggccatgctccaacccggggtcaacaaattctccctaaggatgttcggcagccagaaagccgtggagcgcgaacaggagagggtcaagtcggccggattttggattatccacccctacagtgacttcagattttactgggacctgaccatgctgctgctgatggtgggaaacctgattatcattcctgtgggcatcaccttcttcaaggatgagaacaccacaccctggattgtcttcaatgtggtgtcagacacattcttcctcatcgacttggtcctcaacttccgcacagggatcgtggtggaggacaacacagagatcatcctggacccgcagcggattaaaatgaagtacctgaaaagctggttcatggtagatttcatttcctccatccccgtggactacatcttcctcattgtggagacacgcatcgactcggaggtctacaagactgcccgggccctgcgcattgtccgcttcacgaagatcctcagcctcttacgcctgttacgcctctcccgcctcattcgatatattcaccagtgggaagagatcttccacatgacctacgacctggccagcgccgtggtgcgcatcgtgaacctcatcggcatgatgctcctgctctgccactgggacggctgcctgcagttcctggtacccatgctacaggacttccctgacgactgctgggtgtccatcaacaacatggtgaacaactcctgggggaagcagtactcctacgcgctcttcaaggccatgagccacatgctgtgcatcggctacgggcggcaggcgcccgtgggcatgtccgacgtctggctcaccatgctcagcatgatcgtgggtgccacctgctacgccatgttcattggccacgccactgccctcatccagtccctggactcctcccggcgccagtaccaggaaaagtacaagcaggtggagcagtacatgtcctttcacaagctcccgcccgacacccggcagcgcatccacgactactacgagcaccgctaccagggcaagatgttcgacgaggagagcatcctgggcgagctaagcgagcccctgcgggaggagatcatcaactttaactgtcggaagctggtggcctccatgccactgtttgccaatgcggaccccaacttcgtgacgtccatgctgaccaagctgcgtttcgaggtcttccagcctggggactacatcatccgggaaggcaccattggcaagaagatgtacttcatccagcatggcgtggtcagcgtgctcaccaagggcaacaaggagaccaagctggccgacggctcctactttggagagatctgcctgctgacccggggccggcgcacagccagcgtgagggccgacacctactgccgcctctactcgctgagcgtggacaacttcaatgaggtgctggaggagtaccccatgatgcgaagggccttcgagaccgtggcgctggaccgcctggaccgcattggcaagaagaactccatcctcctccacaaagtccagcacgacctcaactccggcgtcttcaactaccaggagaatgagatcatccagcagattgtgcagcatgaccgggagatggcccactgcgcgcaccgcgtccaggctgctgcctctgccaccccaacccccacgcccgtcatctggaccccgctgatccaggcaccactgcaggctgccgctgccaccacttctgtggccatagccctcacccaccaccctcgcctgcctgctgccatcttccgccctcccccaggatctgggctgggcaacctcggtgccgggcagacgccaaggcacctgaaacggctgcagtccctgatcccttctgcgctgggctccgcctcgcccgccagcagcccgtcccaggtggacacaccgtcttcatcctccttccacatccaacagctggctggattctctgcccccgctggactgagcccactcctgccctcatccagctcctccccaccccccggggcctgtggctccccctcggctcccacaccatcagctggcgtagccgccaccaccatagccgggtttggccacttccacaaggcgctgggtggctccctgtcctcctccgactctcccctgctcaccccgctgcagccaggcgcccgctccccgcaggctgcccagccatctcccgcgccacccggggcccggggaggcctgggactcccggagcacttcctgccacccccaccctcatccagatccccgtcatctagccccgggcagctgggccagcctcccggggagttgtccctaggtctggccactggcccactgagcacgccagagacacccccacggcagcctgagccgccgtcccttgtggcaggggcctctgggggggcttcccctgtaggctttactccccgaggaggtctcagcccccctggccacagcccaggccccccaagaaccttcccgagtgccccgccccgggcctctggctcccacggatccttgctcctgccacctgcatccagccccccaccaccccaggtcccccagcgccggggcacacccccgctcacccccggccgcctcacccaggacctcaagctcatctccgcgtctcagccagccctgcctcaggacggggcgcagactctccgcagagcctccccgcactcctcaggggagtccatggctgccttcccgctcttccccagggctgggggtggcagcgggggcagtgggagcagcgggggcctcggtccccctgggaggccctatggtgccatccccggccagcacgtcactctgcctcggaagacatcctcaggttctttgccaccccctctgtctttgtttggggcaagagccacctcttctggggggccccctctgactgctggaccccagagggaacctggggccaggcctgagccagtgcgctccaaactgccatccaatctatgagctgggcccttccttccctcttctttcttcttttctctcccttccttcttccttcaggtttaactgtgattaggagatataccaataacagtaataattatttaaaaaaccacacacaccagaaaaacaaaagacagcagaaaataaccaggtattcttagagctatagatttttggtcacttgcttttatagactattttaatactcagcactagagggagggagggggagggaggagggagcaggcaggtcccaaatgcaaaagccagagaaaggcagatggggtctccggggctgggcaggggtgggagtggccagtgttggcggttcttagagcagatgtgtcattgtgttcatttagagaaacagctgccatcagcccgttagctgtaacttggagctccactctgcccccagaaaggggctgccctggggtgtgccctggggagcctcagaagcctgcgaccttgggagaaaagggccagggccctgagggcctagcattttttctactgtaaacgtagcaagatctgtatatgaatatgtatatgtatatgtatgtaagatgtgtatatgtatagctatgtagcgctctgtagagccatgtagatagccactcacatgtgcgcacacgtgtgcggtctagtttaatcccatgttgacaggatgcccaggtcaccttacacccagcaacccgccttggcccacaggctgtgcactgcatggtctagggacgttctctctccagtcctcagggaagaggaccccaggacttcgcagcaggccccctctctccccatctctggtctcaaagccagtcccagcctgacctctcaccacacggaagtggaagactcccctttcctagggcctcaagcacacaccgccacctctggggccgtcagtttgcccatctgtacagtgggaggtgagcggaacttctgtttattgagtctgctctgtgccaagcactggtttcgcactttacacacattaactccttcagtttcacaaagaccatggggtgggtactttgattctccccatttagcagaggaagaaacagttttgggtaatttttccagaatcatgtaactaggagtggcagagtggggactgatttgaggttcgagtccacgcctccttgaggcccaagtctgtgttccttccatcagaaaactgtgttgaggggggctgaggtagatggtccccaagcatggtacagaaggaagacaccagattttggcagcagtcaggcctgggtttgaatcccagccctgccacttcttagctgtatgatcttgggcaagttatctgacctttctgtcacctcatttgtaaaatgggaataattatggtactgcctcacaaggacctatgaggaccagatgagaaaaatctatatgtgaaatgcccagcccagcgcctggcacataccatggtaggtgctcaataaaaaatcacatttcttctgcccctcatatgcccagcctattgctccagcaaactatgtgagagcccagggagctttggctgagggctccaagacttaaaatctcaggactcaggaggtggctgggcctccctaagggcccaaggaaggtgtgtggccagaggtgggtgggagccaggccttgagaagtgggaagacttcaacagggagagagggagggaatggtgggtgggatggagtgtatggtggggagattcctgaggtggatgtggagtggtggatcagggctttgggaggggatccccaggctgaggggtcagagggacggccttgggtgatagggtaagggattgtctgggcttagtcctggcaactaggagccataagcaggttccagattgcgggaacgagaaagcagctcagatgcctttggaggcaccatcctccctcctcccagatgggatcttgccagagccaaggtcaggggtctgcccctgcctatagggccagagcaggtatggctgcaatccccaagtaatgagaagggctggtcccacattatccatccagaaccttccatgctccaagccagaatgttggcaagatcgggttttgccttgagctatcctgggatgtgagacaaaccgatttctccatagatgggctgcagggagtgggaggcagtactccaggagagaagtgggtgaaggttcctgggatcttaggtaaagactagacgccgcctagtactggtctctactgtgctggctcaggagttctgagaactggaaggacttagcctcaacctgagttctgcacacaccccttccccttaaggaaggcagctctgagaggcagcaggacttgatccaaacccacagtcttgtcctggaggcagcaggggtgaaggtggagggtccagggccatgaggagcccccttgccatcagagcctggcctaaccaccctcttctctacttacacacacatgcattttataatagctctgacccaacctggccactctgcagagactgggacagacaggtgcaggcaatgggccctcccacacccagtcacctacaaggaattttcaaatccacttttaaaacagaaaccggtaaatgcgccgtattgtatattttatttaaataaaaaaaattccagca

SEQ ID NO: 141819 - DNA, 577 bp, Homo sapiens
  Payload ID: 7887
  Gene Symbol: HCRT
  Gene Name: hypocretin (orexin) neuropeptide precursor
  Uniprot ID: O43612
  ENST ID: ENST00000293330
  CDS Start-End: 88-483
cacaattgacagcctcaaggttcctggctttttgaaccaccacagacatctcctttcccggctaccccaccctgagcgccagacaccatgaaccttccttccacaaaggtctcctgggccgccgtgacgctactgctgctgctgctgctgctgccgcccgcgctgttgtcgtccggggcggctgcacagcccctgcccgactgctgtcgtcaaaagacttgctcttgccgcctctacgagctgctgcacggcgcgggcaatcacgcggccggcatcctcacgctgggcaagcggaggtccgggcccccgggcctccagggtcggctgcagcgcctcctgcaggccagcggcaaccacgccgcgggcatcctgaccatgggccgccgcgcaggcgcagagccagcgccgcgcccctgcctcgggcgccgctgttccgccccggccgccgcctccgtcgcgcccggaggacagtccgggatctgagtcgttcttcgggccctgtcctggcccaggcctctgccctctgcccacccagcgtcagcccccagaaaaaaggcaataaagacgagtctccatt

SEQ ID NO: 141820 - DNA, 1170 bp, Homo sapiens
  Payload ID: 7888
  Gene Symbol: HCRTR1
  Gene Name: hypocretin (orexin) receptor 1
  ENST ID: ENST00000373705
  CDS Start-End: 1-1170
atggagccctcagccaccccaggggcccagatgggggtcccccctggcagcagagagccgtcccctgtgcctccagactatgaagatgagtttctccgctatctgtggcgcgattatctgtacccaaaacagtatgagtgggtcctcatcgcagcctatgtggctgtgttcgtcgtggccctggtgggcaacacgctggtctgcctggccgtgtggcggaaccaccacatgaggacagtcaccaactacttcattgtcaacctgtccctggctgacgttctggtgactgctatctgcctgccggccagcctgctggtggacatcactgagtcctggctgttcggccatgccctctgcaaggtcatcccctatctacaggctgtgtccgtgtcagtggcagtgctaactctcagcttcatcgccctggaccgctggtatgccatctgccacccactattgttcaagagcacagcccggcgggcccgtggctccatcctgggcatctgggctgtgtcgctggccatcatggtgccccaggctgcagtcatggaatgcagcagtgtgctgcctgagctagccaaccgcacacggctcttctcagtctgtgatgaacgctgggcagatgacctctatcccaagatctaccacagttgcttctttattgtcacctacctggccccactgggcctcatggccatggcctatttccagatattccgcaagctctggggccgccagatccccggcaccacctcagcactggtgcggaactggaagcgcccctcagaccagctgggggacctggagcagggcctgagtggagagccccagccccgggcccgcgccttcctggctgaagtgaagcagatgcgtgcacggaggaagacagccaagatgctgatggtggtgctgctggtcttcgccctctgctacctgcccatcagcgtcctcaatgtccttaagagggtgttcgggatgttccgccaagccagtgaccgcgaagctgtctacgcctgcttcaccttctcccactggctggtgtacgccaacagcgctgccaaccccatcatctacaacttcctcagtgggtgtaaagagaagagtctagctctgtcctgcccatcgtgccccggccatgacccgcaccttgctgcagctctgtgtagctaa

SEQ ID NO: 141821 - DNA, 1642 bp, Homo sapiens
  Payload ID: 7888
  Gene Symbol: HCRTR1
  Gene Name: hypocretin (orexin) receptor 1
  Uniprot ID: O43613
  ENST ID: ENST00000373706
  CDS Start-End: 154-1431
cctcccttcaggaagtttgaggctgagacccgaaaagacctgggtgcaagcctccaggcaccctgaagggagtgggctgagggctggcccaagctccctcctctccctctgtagagcctaggatgcccctctgctgcagcggctcctgagctcatggagccctcagccaccccaggggcccagatgggggtcccccctggcagcagagagccgtcccctgtgcctccagactatgaagatgagtttctccgctatctgtggcgcgattatctgtacccaaaacagtatgagtgggtcctcatcgcagcctatgtggctgtgttcgtcgtggccctggtgggcaacacgctggtctgcctggccgtgtggcggaaccaccacatgaggacagtcaccaactacttcattgtcaacctgtccctggctgacgttctggtgactgctatctgcctgccggccagcctgctggtggacatcactgagtcctggctgttcggccatgccctctgcaaggtcatcccctatctacaggctgtgtccgtgtcagtggcagtgctaactctcagcttcatcgccctggaccgctggtatgccatctgccacccactattgttcaagagcacagcccggcgggcccgtggctccatcctgggcatctgggctgtgtcgctggccatcatggtgccccaggctgcagtcatggaatgcagcagtgtgctgcctgagctagccaaccgcacacggctcttctcagtctgtgatgaacgctgggcagatgacctctatcccaagatctaccacagttgcttctttattgtcacctacctggccccactgggcctcatggccatggcctatttccagatattccgcaagctctggggccgccagatccccggcaccacctcagcactggtgcggaactggaagcgcccctcagaccagctgggggacctggagcagggcctgagtggagagccccagccccgggcccgcgccttcctggctgaagtgaagcagatgcgtgcacggaggaagacagccaagatgctgatggtggtgctgctggtcttcgccctctgctacctgcccatcagcgtcctcaatgtccttaagagggtgttcgggatgttccgccaagccagtgaccgcgaagctgtctacgcctgcttcaccttctcccactggctggtgtacgccaacagcgctgccaaccccatcatctacaacttcctcagtggcaaattccgggagcagtttaaggctgccttctcctgctgcctgcctggcctgggtccctgcggctctctgaaggcccctagtccccgctcctctgccagccacaagtccttgtccttgcagagccgatgctccatctccaaaatctctgagcatgtggtgctcaccagcgtcaccacagtgctgccctgagcgagggctgccctggaggctccggctcgggggatctgcccctacccctcatggaaagacagctggatgtggtgaaaggctgtggcttcagtcctgggtttctgcctgtgtgactctggataagtcacttcctctgtctgagcttgtgtcccctaagcagggttgatgtgaggattaagcatgctgaagcaagtggaaagctccttgtaaa

SEQ ID NO: 141822 - DNA, 2003 bp, Homo sapiens
  Payload ID: 7888
  Gene Symbol: HCRTR1
  Gene Name: hypocretin (orexin) receptor 1
  Uniprot ID: O43613
  ENST ID: ENST00000403528
  CDS Start-End: 388-1665
agttgccgcggatcgtgctgagccccgcgagccgaggcagcgcagcctagggagggggctgccccggccccctcctgcagtcccggcccctagaggctcggccttcctcgcaggaaggcgaagtccccggtgccaggtccggggaccagcagccgagaacgcccgggtcccggagccaacaggtgcggggtgtgggggacccccaggcctgggatcccactccctcctttccttcctcccttcaggaagtttgaggctgagacccgaaaagacctgggtgcaagcctccaggcaccctgaagggagtgggctgagggctggcccaagctccctcctctccctctgtagagcctaggatgcccctctgctgcagcggctcctgagctcatggagccctcagccaccccaggggcccagatgggggtcccccctggcagcagagagccgtcccctgtgcctccagactatgaagatgagtttctccgctatctgtggcgcgattatctgtacccaaaacagtatgagtgggtcctcatcgcagcctatgtggctgtgttcgtcgtggccctggtgggcaacacgctggtctgcctggccgtgtggcggaaccaccacatgaggacagtcaccaactacttcattgtcaacctgtccctggctgacgttctggtgactgctatctgcctgccggccagcctgctggtggacatcactgagtcctggctgttcggccatgccctctgcaaggtcatcccctatctacaggctgtgtccgtgtcagtggcagtgctaactctcagcttcatcgccctggaccgctggtatgccatctgccacccactattgttcaagagcacagcccggcgggcccgtggctccatcctgggcatctgggctgtgtcgctggccatcatggtgccccaggctgcagtcatggaatgcagcagtgtgctgcctgagctagccaaccgcacacggctcttctcagtctgtgatgaacgctgggcagatgacctctatcccaagatctaccacagttgcttctttattgtcacctacctggccccactgggcctcatggccatggcctatttccagatattccgcaagctctggggccgccagatccccggcaccacctcagcactggtgcggaactggaagcgcccctcagaccagctgggggacctggagcagggcctgagtggagagccccagccccgggcccgcgccttcctggctgaagtgaagcagatgcgtgcacggaggaagacagccaagatgctgatggtggtgctgctggtcttcgccctctgctacctgcccatcagcgtcctcaatgtccttaagagggtgttcgggatgttccgccaagccagtgaccgcgaagctgtctacgcctgcttcaccttctcccactggctggtgtacgccaacagcgctgccaaccccatcatctacaacttcctcagtggcaaattccgggagcagtttaaggctgccttctcctgctgcctgcctggcctgggtccctgcggctctctgaaggcccctagtccccgctcctctgccagccacaagtccttgtccttgcagagccgatgctccatctccaaaatctctgagcatgtggtgctcaccagcgtcaccacagtgctgccctgagcgagggctgccctggaggctccggctcgggggatctgcccctacccctcatggaaagacagctggatgtggtgaaaggctgtggcttcagtcctgggtttctgcctgtgtgactctggataagtcacttcctctgtctgagcttgtgtcccctaagcagggttgatgtgaggattaagcatgctgaagcaagtggaaagctccttgtaaactgtgaagtgttgtggacatgattattgttgtacttctctcatttggccataccccacagtataatctgtccccatcctccttccagagcttggtcatcctcctaaagacccctttcctacccaatt

SEQ ID NO: 141823 - DNA, 1837 bp, Homo sapiens
  Payload ID: 7889
  Gene Symbol: HCRTR2
  Gene Name: hypocretin (orexin) receptor 2
  Uniprot ID: O43614
  ENST ID: ENST00000370862
  CDS Start-End: 337-1671
gactgagtgctggaatgaggagtaattgagcttcagctgagccggacgtagctttctcctcctggtgtcattgctgcagcctccagtgccgggtccctagttcctcagctgcctatcttcccggtgcaacatcgcctgtaaagacagcaaagccaccgcagaagttgcccggcagaagactccggaggcattggctcagtaacttttcacgtcattttctgctcgggagccccttctagcctctccgcgcagcctttcccaccgcaaatcaccagtgctcatggggcaggcggagaggagcttgcagcattgagcggaaccggacttgagcccgtgatgtccggcaccaaattggaggactcccccccttgtcgcaactggtcatctgcttcggagctgaatgaaactcaagagccctttttaaaccccaccgactatgacgacgaggaattcctgcggtacctgtggagggaatacctgcacccgaaagaatatgagtgggtcctgatcgccgggtacatcatcgtgttcgtcgtggctctcattgggaacgtcctggtttgtgtggcagtgtggaagaaccaccacatgaggacggtaaccaactacttcatagtcaatctttctctggctgatgtgctcgtgaccatcacctgccttccagccacactggtcgtggatatcactgagacctggttttttggacagtccctttgcaaagtgattccttatctacagaccgtgtcggtgtctgtgtctgtcctcacactgagctgtatcgccttggatcggtggtatgcaatctgtcaccctttgatgtttaagagcacagcaaagcgggcccgtaacagcattgtcatcatctggattgtctcctgcattataatgattcctcaggccatcgtcatggagtgcagcaccgtgttcccaggcttagccaataaaaccaccctctttacggtgtgtgatgagcgctggggtggtgaaatttatcccaagatgtaccacatctgtttctttctggtgacatacatggcaccactgtgtctcatggtgttggcttatctgcaaatatttcgcaaactctggtgtcgacagatccctggaacatcatctgtagttcagagaaaatggaagcccctgcagcctgtttcacagcctcgagggccaggacagccaacgaagtcccggatgagcgctgtggcggctgaaataaagcagatccgagccagaaggaaaacagcccggatgttgatgattgtgcttttggtatttgcaatttgctatctaccaattagcatcctcaatgtgctaaagagagtatttgggatgtttgcccatactgaagacagagagactgtgtatgcctggtttaccttttcacactggcttgtatatgccaatagtgctgcgaatccaattatttataattttctcagtggaaaatttcgagaggaatttaaagctgcgttttcttgctgttgccttggagttcaccatcgccaggaggatcggctcaccaggggacgaactagcacagagagccggaagtccttgaccactcaaatcagcaactttgataacatatcaaaactttctgagcaagttgtgctcactagcataagcacactcccagcagccaatggagcaggaccacttcaaaactggtagaatatttattcatatgacaaggatacctgagtaaaactatcctttttaaaatcactgggaacagaaattttattatcctatgatgtgaagctaaaattacttgtggatcttttttttttttaatctattgctctttggaaataaaaaaaaagtcagtttaaaatga

SEQ ID NO: 141824 - DNA, 1936 bp, Homo sapiens
  Payload ID: 7889
  Gene Symbol: HCRTR2
  Gene Name: hypocretin (orexin) receptor 2
  Uniprot ID: O43614
  ENST ID: ENST00000615358
  CDS Start-End: 464-1798
attccttttgactcactgaaacaaatcaagaggtgaatatattgaagtgagttatttttagtgaaggtggaatttgagcattcaagcttcagctctccctcagcgagggaggaggctgtgggctgcggactgagtgctggaatgaggagtaattgagcttcagctgagccggacgtagctttctcctcctggtgtcattgctgcagcctccagtgccgggtccctagttcctcagctgcctatcttcccggtgcaacatcgcctgtaaagacagcaaagccaccgcagaagttgcccggcagaagactccggaggcattggctcagtaacttttcacgtcattttctgctcgggagccccttctagcctctccgcgcagcctttcccaccgcaaatcaccagtgctcatggggcaggcggagaggagcttgcagcattgagcggaaccggacttgagcccgtgatgtccggcaccaaattggaggactcccccccttgtcgcaactggtcatctgcttcggagctgaatgaaactcaagagccctttttaaaccccaccgactatgacgacgaggaattcctgcggtacctgtggagggaatacctgcacccgaaagaatatgagtgggtcctgatcgccgggtacatcatcgtgttcgtcgtggctctcattgggaacgtcctggtttgtgtggcagtgtggaagaaccaccacatgaggacggtaaccaactacttcatagtcaatctttctctggctgatgtgctcgtgaccatcacctgccttccagccacactggtcgtggatatcactgagacctggttttttggacagtccctttgcaaagtgattccttatctacagaccgtgtcggtgtctgtgtctgtcctcacactgagctgtatcgccttggatcggtggtatgcaatctgtcaccctttgatgtttaagagcacagcaaagcgggcccgtaacagcattgtcatcatctggattgtctcctgcattataatgattcctcaggccatcgtcatggagtgcagcaccgtgttcccaggcttagccaataaaaccaccctctttacggtgtgtgatgagcgctggggtggtgaaatttatcccaagatgtaccacatctgtttctttctggtgacatacatggcaccactgtgtctcatggtgttggcttatctgcaaatatttcgcaaactctggtgtcgacagatccctggaacatcatctgtagttcagagaaaatggaagcccctgcagcctgtttcacagcctcgagggccaggacagccaacgaagtcccggatgagcgctgtggcggctgaaataaagcagatccgagccagaaggaaaacagcccggatgttgatgattgtgcttttggtatttgcaatttgctatctaccaattagcatcctcaatgtgctaaagagagtatttgggatgtttgcccatactgaagacagagagactgtgtatgcctggtttaccttttcacactggcttgtatatgccaatagtgctgcgaatccaattatttataattttctcagtggaaaatttcgagaggaatttaaagctgcgttttcttgctgttgccttggagttcaccatcgccaggaggatcggctcaccaggggacgaactagcacagagagccggaagtccttgaccactcaaatcagcaactttgataacatatcaaaactttctgagcaagttgtgctcactagcataagcacactcccagcagccaatggagcaggaccacttcaaaactggtagaatatttattcatatgacaaggatacctgagtaaaactatcctttttaaaatcactgggaacagaaattttattatcctatgatgtgaagctaaaattacttgtggatcttttttttttttaatctattgctctttgg

SEQ ID NO: 141825 - DNA, 1407 bp, Homo sapiens
  Payload ID: 7890
  Gene Symbol: HPRT1
  Gene Name: hypoxanthine phosphoribosyltransferase 1
  Uniprot ID: P00492
  ENST ID: ENST00000298556
  CDS Start-End: 160-816
ctgcttctcctcagcttcaggcggctgcgacgagccctcaggcgaacctctcggctttcccgcgcggcgccgcctcttgctgcgcctccgcctcctcctctgctccgccaccggcttcctcctcctgagcagtcagcccgcgcgccggccggctccgttatggcgacccgcagccctggcgtcgtgattagtgatgatgaaccaggttatgaccttgatttattttgcatacctaatcattatgctgaggatttggaaagggtgtttattcctcatggactaattatggacaggactgaacgtcttgctcgagatgtgatgaaggagatgggaggccatcacattgtagccctctgtgtgctcaaggggggctataaattctttgctgacctgctggattacatcaaagcactgaatagaaatagtgatagatccattcctatgactgtagattttatcagactgaagagctattgtaatgaccagtcaacaggggacataaaagtaattggtggagatgatctctcaactttaactggaaagaatgtcttgattgtggaagatataattgacactggcaaaacaatgcagactttgctttccttggtcaggcagtataatccaaagatggtcaaggtcgcaagcttgctggtgaaaaggaccccacgaagtgttggatataagccagactttgttggatttgaaattccagacaagtttgttgtaggatatgcccttgactataatgaatacttcagggatttgaatcatgtttgtgtcattagtgaaactggaaaagcaaaatacaaagcctaagatgagagttcaagttgagtttggaaacatctggagtcctattgacatcgccagtaaaattatcaatgttctagttctgtggccatctgcttagtagagctttttgcatgtatcttctaagaattttatctgttttgtactttagaaatgtcagttgctgcattcctaaactgtttatttgcactatgagcctatagactatcagttccctttgggcggattgttgtttaacttgtaaatgaaaaaattctcttaaaccacagcactattgagtgaaacattgaactcatatctgtaagaaataaagagaagatatattagttttttaattggtattttaatttttatatatgcaggaaagaatagaagtgattgaatattgttaattataccaccgtgtgttagaaaagtaagaagcagtcaattttcacatcaaagacagcatctaagaagttttgttctgtcctggaattattttagtagtgtttcagtaatgttgactgtattttccaacttgttcaaattattaccagtgaatctttgtcagcagttcccttttaaatgcaaatcaataaattcccaaaaatttaa

SEQ ID NO: 141826 - DNA, 3555 bp, Homo sapiens
  Payload ID: 7891
  Gene Symbol: HIF1A
  Gene Name: hypoxia inducible factor 1, alpha subunit (basic helix-loop-helix transcription factor)
  Uniprot ID: Q16665
  ENST ID: ENST00000323441
  CDS Start-End: 29-2236
gtgaagacatcgcggggaccgattcaccatggagggcgccggcggcgcgaacgacaagaaaaagataagttctgaacgtcgaaaagaaaagtctcgagatgcagccagatctcggcgaagtaaagaatctgaagttttttatgagcttgctcatcagttgccacttccacataatgtgagttcgcatcttgataaggcctctgtgatgaggcttaccatcagctatttgcgtgtgaggaaacttctggatgctggtgatttggatattgaagatgacatgaaagcacagatgaattgcttttatttgaaagccttggatggttttgttatggttctcacagatgatggtgacatgatttacatttctgataatgtgaacaaatacatgggattaactcagtttgaactaactggacacagtgtgtttgattttactcatccatgtgaccatgaggaaatgagagaaatgcttacacacagaaatggccttgtgaaaaagggtaaagaacaaaacacacagcgaagcttttttctcagaatgaagtgtaccctaactagccgaggaagaactatgaacataaagtctgcaacatggaaggtattgcactgcacaggccacattcacgtatatgataccaacagtaaccaacctcagtgtgggtataagaaaccacctatgacctgcttggtgctgatttgtgaacccattcctcacccatcaaatattgaaattcctttagatagcaagactttcctcagtcgacacagcctggatatgaaattttcttattgtgatgaaagaattaccgaattgatgggatatgagccagaagaacttttaggccgctcaatttatgaatattatcatgctttggactctgatcatctgaccaaaactcatcatgatatgtttactaaaggacaagtcaccacaggacagtacaggatgcttgccaaaagaggtggatatgtctgggttgaaactcaagcaactgtcatatataacaccaagaattctcaaccacagtgcattgtatgtgtgaattacgttgtgagtggtattattcagcacgacttgattttctcccttcaacaaacagaatgtgtccttaaaccggttgaatcttcagatatgaaaatgactcagctattcaccaaagttgaatcagaagatacaagtagcctctttgacaaacttaagaaggaacctgatgctttaactttgctggccccagccgctggagacacaatcatatctttagattttggcagcaacgacacagaaactgatgaccagcaacttgaggaagtaccattatataatgatgtaatgctcccctcacccaacgaaaaattacagaatataaatttggcaatgtctccattacccaccgctgaaacgccaaagccacttcgaagtagtgctgaccctgcactcaatcaagaagttgcattaaaattagaaccaaatccagagtcactggaactttcttttaccatgccccagattcaggatcagacacctagtccttccgatggaagcactagacaaagttcacctgagcctaatagtcccagtgaatattgtttttatgtggatagtgatatggtcaatgaattcaagttggaattggtagaaaaactttttgctgaagacacagaagcaaagaacccattttctactcaggacacagatttagacttggagatgttagctccctatatcccaatggatgatgacttccagttacgttccttcgatcagttgtcaccattagaaagcagttccgcaagccctgaaagcgcaagtcctcaaagcacagttacagtattccagcagactcaaatacaagaacctactgctaatgccaccactaccactgccaccactgatgaattaaaaacagtgacaaaagaccgtatggaagacattaaaatattgattgcatctccatctcctacccacatacataaagaaactactagtgccacatcatcaccatatagagatactcaaagtcggacagcctcaccaaacagagcaggaaaaggagtcatagaacagacagaaaaatctcatccaagaagccctaacgtgttatctgtcgctttgagtcaaagaactacagttcctgaggaagaactaaatccaaagatactagctttgcagaatgctcagagaaagcgaaaaatggaacatgatggttcactttttcaagcagtaggaattatttagcatgtagactgctggggcaatcaatggatgaaagtggattaccacagctgaccagttatgattgtgaagttaatgctcctatacaaggcagcagaaacctactgcagggtgaagaattactcagagctttggatcaagttaactgagctttttcttaatttcattcctttttttggacactggtggctcattacctaaagcagtctatttatattttctacatctaattttagaagcctggctacaatactgcacaaacttggttagttcaattttgatcccctttctacttaatttacattaatgctcttttttagtatgttctttaatgctggatcacagacagctcattttctcagttttttggtatttaaaccattgcattgcagtagcatcattttaaaaaatgcacctttttatttatttatttttggctagggagtttatccctttttcgaattatttttaagaagatgccaatataatttttgtaagaaggcagtaacctttcatcatgatcataggcagttgaaaaatttttacaccttttttttcacattttacataaataataatgctttgccagcagtacgtggtagccacaattgcacaatatattttcttaaaaaataccagcagttactcatggaatatattctgcgtttataaaactagtttttaagaagaaattttttttggcctatgaaattgttaaacctggaacatgacattgttaatcatataataatgattcttaaatgctgtatggtttattatttaaatgggtaaagccatttacataatatagaaagatatgcatatatctagaaggtatgtggcatttatttggataaaattctcaattcagagaaatcatctgatgtttctatagtcactttgccagctcaaaagaaaacaataccctatgtagttgtggaagtttatgctaatattgtgtaactgatattaaacctaaatgttctgcctaccctgttggtataaagatattttgagcagactgtaaacaagaaaaaaaaaatcatgcattcttagcaaaattgcctagtatgttaatttgctcaaaatacaatgtttgattttatgcactttgtcgctattaacatcctttttttcatgtagatttcaataattgagtaattttagaagcattattttaggaatatatagttgtcacagtaaatatcttgttttttctatgtacattgtacaaatttttcattccttttgctctttgtggttggatctaacactaactgtattgttttgttacatcaaataaacatcttctgtggaccagg

SEQ ID NO: 141827 - DNA, 3919 bp, Homo sapiens
  Payload ID: 7891
  Gene Symbol: HIF1A
  Gene Name: hypoxia inducible factor 1, alpha subunit (basic helix-loop-helix transcription factor)
  Uniprot ID: Q16665
  ENST ID: ENST00000337138
  CDS Start-End: 266-2746
gacaggaggatcaccctcttcgtcgcttcggccagtgtgtcgggctgggccctgacaagccacctgaggagaggctcggagccgggcccggaccccggcgattgccgcccgcttctctctagtctcacgaggggtttcccgcctcgcacccccacctctggacttgcctttccttctcttctccgcgtgtggagggagccagcgcttaggccggagcgagcctgggggccgcccgccgtgaagacatcgcggggaccgattcaccatggagggcgccggcggcgcgaacgacaagaaaaagataagttctgaacgtcgaaaagaaaagtctcgagatgcagccagatctcggcgaagtaaagaatctgaagttttttatgagcttgctcatcagttgccacttccacataatgtgagttcgcatcttgataaggcctctgtgatgaggcttaccatcagctatttgcgtgtgaggaaacttctggatgctggtgatttggatattgaagatgacatgaaagcacagatgaattgcttttatttgaaagccttggatggttttgttatggttctcacagatgatggtgacatgatttacatttctgataatgtgaacaaatacatgggattaactcagtttgaactaactggacacagtgtgtttgattttactcatccatgtgaccatgaggaaatgagagaaatgcttacacacagaaatggccttgtgaaaaagggtaaagaacaaaacacacagcgaagcttttttctcagaatgaagtgtaccctaactagccgaggaagaactatgaacataaagtctgcaacatggaaggtattgcactgcacaggccacattcacgtatatgataccaacagtaaccaacctcagtgtgggtataagaaaccacctatgacctgcttggtgctgatttgtgaacccattcctcacccatcaaatattgaaattcctttagatagcaagactttcctcagtcgacacagcctggatatgaaattttcttattgtgatgaaagaattaccgaattgatgggatatgagccagaagaacttttaggccgctcaatttatgaatattatcatgctttggactctgatcatctgaccaaaactcatcatgatatgtttactaaaggacaagtcaccacaggacagtacaggatgcttgccaaaagaggtggatatgtctgggttgaaactcaagcaactgtcatatataacaccaagaattctcaaccacagtgcattgtatgtgtgaattacgttgtgagtggtattattcagcacgacttgattttctcccttcaacaaacagaatgtgtccttaaaccggttgaatcttcagatatgaaaatgactcagctattcaccaaagttgaatcagaagatacaagtagcctctttgacaaacttaagaaggaacctgatgctttaactttgctggccccagccgctggagacacaatcatatctttagattttggcagcaacgacacagaaactgatgaccagcaacttgaggaagtaccattatataatgatgtaatgctcccctcacccaacgaaaaattacagaatataaatttggcaatgtctccattacccaccgctgaaacgccaaagccacttcgaagtagtgctgaccctgcactcaatcaagaagttgcattaaaattagaaccaaatccagagtcactggaactttcttttaccatgccccagattcaggatcagacacctagtccttccgatggaagcactagacaaagttcacctgagcctaatagtcccagtgaatattgtttttatgtggatagtgatatggtcaatgaattcaagttggaattggtagaaaaactttttgctgaagacacagaagcaaagaacccattttctactcaggacacagatttagacttggagatgttagctccctatatcccaatggatgatgacttccagttacgttccttcgatcagttgtcaccattagaaagcagttccgcaagccctgaaagcgcaagtcctcaaagcacagttacagtattccagcagactcaaatacaagaacctactgctaatgccaccactaccactgccaccactgatgaattaaaaacagtgacaaaagaccgtatggaagacattaaaatattgattgcatctccatctcctacccacatacataaagaaactactagtgccacatcatcaccatatagagatactcaaagtcggacagcctcaccaaacagagcaggaaaaggagtcatagaacagacagaaaaatctcatccaagaagccctaacgtgttatctgtcgctttgagtcaaagaactacagttcctgaggaagaactaaatccaaagatactagctttgcagaatgctcagagaaagcgaaaaatggaacatgatggttcactttttcaagcagtaggaattggaacattattacagcagccagacgatcatgcagctactacatcactttcttggaaacgtgtaaaaggatgcaaatctagtgaacagaatggaatggagcaaaagacaattattttaataccctctgatttagcatgtagactgctggggcaatcaatggatgaaagtggattaccacagctgaccagttatgattgtgaagttaatgctcctatacaaggcagcagaaacctactgcagggtgaagaattactcagagctttggatcaagttaactgagctttttcttaatttcattcctttttttggacactggtggctcattacctaaagcagtctatttatattttctacatctaattttagaagcctggctacaatactgcacaaacttggttagttcaattttgatcccctttctacttaatttacattaatgctcttttttagtatgttctttaatgctggatcacagacagctcattttctcagttttttggtatttaaaccattgcattgcagtagcatcattttaaaaaatgcacctttttatttatttatttttggctagggagtttatccctttttcgaattatttttaagaagatgccaatataatttttgtaagaaggcagtaacctttcatcatgatcataggcagttgaaaaatttttacaccttttttttcacattttacataaataataatgctttgccagcagtacgtggtagccacaattgcacaatatattttcttaaaaaataccagcagttactcatggaatatattctgcgtttataaaactagtttttaagaagaaattttttttggcctatgaaattgttaaacctggaacatgacattgttaatcatataataatgattcttaaatgctgtatggtttattatttaaatgggtaaagccatttacataatatagaaagatatgcatatatctagaaggtatgtggcatttatttggataaaattctcaattcagagaaatcatctgatgtttctatagtcactttgccagctcaaaagaaaacaataccctatgtagttgtggaagtttatgctaatattgtgtaactgatattaaacctaaatgttctgcctaccctgttggtataaagatattttgagcagactgtaaacaagaaaaaaaaaatcatgcattcttagcaaaattgcctagtatgttaatttgctcaaaatacaatgtttgattttatgcactttgtcgctattaacatcctttttttcatgtagatttcaataattgagtaattttagaagcattattttaggaatatatagttgtcacagtaaatatcttgttttttctatgtacattgtacaaatttttcattccttttgctctttgtggttggatctaacactaactgtattgttttgttacatcaaataaacatcttctgtggaccagg

SEQ ID NO: 141828 - DNA, 3922 bp, Homo sapiens
  Payload ID: 7891
  Gene Symbol: HIF1A
  Gene Name: hypoxia inducible factor 1, alpha subunit (basic helix-loop-helix transcription factor)
  ENST ID: ENST00000394997
  CDS Start-End: 266-2749
gacaggaggatcaccctcttcgtcgcttcggccagtgtgtcgggctgggccctgacaagccacctgaggagaggctcggagccgggcccggaccccggcgattgccgcccgcttctctctagtctcacgaggggtttcccgcctcgcacccccacctctggacttgcctttccttctcttctccgcgtgtggagggagccagcgcttaggccggagcgagcctgggggccgcccgccgtgaagacatcgcggggaccgattcaccatggagggcgccggcggcgcgaacgacaagaaaaataggataagttctgaacgtcgaaaagaaaagtctcgagatgcagccagatctcggcgaagtaaagaatctgaagttttttatgagcttgctcatcagttgccacttccacataatgtgagttcgcatcttgataaggcctctgtgatgaggcttaccatcagctatttgcgtgtgaggaaacttctggatgctggtgatttggatattgaagatgacatgaaagcacagatgaattgcttttatttgaaagccttggatggttttgttatggttctcacagatgatggtgacatgatttacatttctgataatgtgaacaaatacatgggattaactcagtttgaactaactggacacagtgtgtttgattttactcatccatgtgaccatgaggaaatgagagaaatgcttacacacagaaatggccttgtgaaaaagggtaaagaacaaaacacacagcgaagcttttttctcagaatgaagtgtaccctaactagccgaggaagaactatgaacataaagtctgcaacatggaaggtattgcactgcacaggccacattcacgtatatgataccaacagtaaccaacctcagtgtgggtataagaaaccacctatgacctgcttggtgctgatttgtgaacccattcctcacccatcaaatattgaaattcctttagatagcaagactttcctcagtcgacacagcctggatatgaaattttcttattgtgatgaaagaattaccgaattgatgggatatgagccagaagaacttttaggccgctcaatttatgaatattatcatgctttggactctgatcatctgaccaaaactcatcatgatatgtttactaaaggacaagtcaccacaggacagtacaggatgcttgccaaaagaggtggatatgtctgggttgaaactcaagcaactgtcatatataacaccaagaattctcaaccacagtgcattgtatgtgtgaattacgttgtgagtggtattattcagcacgacttgattttctcccttcaacaaacagaatgtgtccttaaaccggttgaatcttcagatatgaaaatgactcagctattcaccaaagttgaatcagaagatacaagtagcctctttgacaaacttaagaaggaacctgatgctttaactttgctggccccagccgctggagacacaatcatatctttagattttggcagcaacgacacagaaactgatgaccagcaacttgaggaagtaccattatataatgatgtaatgctcccctcacccaacgaaaaattacagaatataaatttggcaatgtctccattacccaccgctgaaacgccaaagccacttcgaagtagtgctgaccctgcactcaatcaagaagttgcattaaaattagaaccaaatccagagtcactggaactttcttttaccatgccccagattcaggatcagacacctagtccttccgatggaagcactagacaaagttcacctgagcctaatagtcccagtgaatattgtttttatgtggatagtgatatggtcaatgaattcaagttggaattggtagaaaaactttttgctgaagacacagaagcaaagaacccattttctactcaggacacagatttagacttggagatgttagctccctatatcccaatggatgatgacttccagttacgttccttcgatcagttgtcaccattagaaagcagttccgcaagccctgaaagcgcaagtcctcaaagcacagttacagtattccagcagactcaaatacaagaacctactgctaatgccaccactaccactgccaccactgatgaattaaaaacagtgacaaaagaccgtatggaagacattaaaatattgattgcatctccatctcctacccacatacataaagaaactactagtgccacatcatcaccatatagagatactcaaagtcggacagcctcaccaaacagagcaggaaaaggagtcatagaacagacagaaaaatctcatccaagaagccctaacgtgttatctgtcgctttgagtcaaagaactacagttcctgaggaagaactaaatccaaagatactagctttgcagaatgctcagagaaagcgaaaaatggaacatgatggttcactttttcaagcagtaggaattggaacattattacagcagccagacgatcatgcagctactacatcactttcttggaaacgtgtaaaaggatgcaaatctagtgaacagaatggaatggagcaaaagacaattattttaataccctctgatttagcatgtagactgctggggcaatcaatggatgaaagtggattaccacagctgaccagttatgattgtgaagttaatgctcctatacaaggcagcagaaacctactgcagggtgaagaattactcagagctttggatcaagttaactgagctttttcttaatttcattcctttttttggacactggtggctcattacctaaagcagtctatttatattttctacatctaattttagaagcctggctacaatactgcacaaacttggttagttcaattttgatcccctttctacttaatttacattaatgctcttttttagtatgttctttaatgctggatcacagacagctcattttctcagttttttggtatttaaaccattgcattgcagtagcatcattttaaaaaatgcacctttttatttatttatttttggctagggagtttatccctttttcgaattatttttaagaagatgccaatataatttttgtaagaaggcagtaacctttcatcatgatcataggcagttgaaaaatttttacaccttttttttcacattttacataaataataatgctttgccagcagtacgtggtagccacaattgcacaatatattttcttaaaaaataccagcagttactcatggaatatattctgcgtttataaaactagtttttaagaagaaattttttttggcctatgaaattgttaaacctggaacatgacattgttaatcatataataatgattcttaaatgctgtatggtttattatttaaatgggtaaagccatttacataatatagaaagatatgcatatatctagaaggtatgtggcatttatttggataaaattctcaattcagagaaatcatctgatgtttctatagtcactttgccagctcaaaagaaaacaataccctatgtagttgtggaagtttatgctaatattgtgtaactgatattaaacctaaatgttctgcctaccctgttggtataaagatattttgagcagactgtaaacaagaaaaaaaaaatcatgcattcttagcaaaattgcctagtatgttaatttgctcaaaatacaatgtttgattttatgcactttgtcgctattaacatcctttttttcatgtagatttcaataattgagtaattttagaagcattattttaggaatatatagttgtcacagtaaatatcttgttttttctatgtacattgtacaaatttttcattccttttgctctttgtggttggatctaacactaactgtattgttttgttacatcaaataaacatcttctgtggaccagg

SEQ ID NO: 141829 - DNA, 3956 bp, Homo sapiens
  Payload ID: 7891
  Gene Symbol: HIF1A
  Gene Name: hypoxia inducible factor 1, alpha subunit (basic helix-loop-helix transcription factor)
  Uniprot ID: Q16665
  ENST ID: ENST00000539097
  CDS Start-End: 230-2782
atttgaaaacttggcaaccttggattggatggattcatatttcttagtatagaagttcttgatataactgaaaaattaagttaaacacttaataagtggtggttactcagcacttttagatgctgtttataatagatgaccttttctaactaatttacagttttttgaaagataactgagaggttgagggacggagattttcttcaagcaattttttttttcattttaaatgagctcccaatgtcggagtttggaaaacaaatttgtctttttaaaagaaggtctaggaaactcaaaacctgaagaattggaagaaatcagaatagaaaatggtaggataagttctgaacgtcgaaaagaaaagtctcgagatgcagccagatctcggcgaagtaaagaatctgaagttttttatgagcttgctcatcagttgccacttccacataatgtgagttcgcatcttgataaggcctctgtgatgaggcttaccatcagctatttgcgtgtgaggaaacttctggatgctggtgatttggatattgaagatgacatgaaagcacagatgaattgcttttatttgaaagccttggatggttttgttatggttctcacagatgatggtgacatgatttacatttctgataatgtgaacaaatacatgggattaactcagtttgaactaactggacacagtgtgtttgattttactcatccatgtgaccatgaggaaatgagagaaatgcttacacacagaaatggccttgtgaaaaagggtaaagaacaaaacacacagcgaagcttttttctcagaatgaagtgtaccctaactagccgaggaagaactatgaacataaagtctgcaacatggaaggtattgcactgcacaggccacattcacgtatatgataccaacagtaaccaacctcagtgtgggtataagaaaccacctatgacctgcttggtgctgatttgtgaacccattcctcacccatcaaatattgaaattcctttagatagcaagactttcctcagtcgacacagcctggatatgaaattttcttattgtgatgaaagaattaccgaattgatgggatatgagccagaagaacttttaggccgctcaatttatgaatattatcatgctttggactctgatcatctgaccaaaactcatcatgatatgtttactaaaggacaagtcaccacaggacagtacaggatgcttgccaaaagaggtggatatgtctgggttgaaactcaagcaactgtcatatataacaccaagaattctcaaccacagtgcattgtatgtgtgaattacgttgtgagtggtattattcagcacgacttgattttctcccttcaacaaacagaatgtgtccttaaaccggttgaatcttcagatatgaaaatgactcagctattcaccaaagttgaatcagaagatacaagtagcctctttgacaaacttaagaaggaacctgatgctttaactttgctggccccagccgctggagacacaatcatatctttagattttggcagcaacgacacagaaactgatgaccagcaacttgaggaagtaccattatataatgatgtaatgctcccctcacccaacgaaaaattacagaatataaatttggcaatgtctccattacccaccgctgaaacgccaaagccacttcgaagtagtgctgaccctgcactcaatcaagaagttgcattaaaattagaaccaaatccagagtcactggaactttcttttaccatgccccagattcaggatcagacacctagtccttccgatggaagcactagacaaagttcacctgagcctaatagtcccagtgaatattgtttttatgtggatagtgatatggtcaatgaattcaagttggaattggtagaaaaactttttgctgaagacacagaagcaaagaacccattttctactcaggacacagatttagacttggagatgttagctccctatatcccaatggatgatgacttccagttacgttccttcgatcagttgtcaccattagaaagcagttccgcaagccctgaaagcgcaagtcctcaaagcacagttacagtattccagcagactcaaatacaagaacctactgctaatgccaccactaccactgccaccactgatgaattaaaaacagtgacaaaagaccgtatggaagacattaaaatattgattgcatctccatctcctacccacatacataaagaaactactagtgccacatcatcaccatatagagatactcaaagtcggacagcctcaccaaacagagcaggaaaaggagtcatagaacagacagaaaaatctcatccaagaagccctaacgtgttatctgtcgctttgagtcaaagaactacagttcctgaggaagaactaaatccaaagatactagctttgcagaatgctcagagaaagcgaaaaatggaacatgatggttcactttttcaagcagtaggaattggaacattattacagcagccagacgatcatgcagctactacatcactttcttggaaacgtgtaaaaggatgcaaatctagtgaacagaatggaatggagcaaaagacaattattttaataccctctgatttagcatgtagactgctggggcaatcaatggatgaaagtggattaccacagctgaccagttatgattgtgaagttaatgctcctatacaaggcagcagaaacctactgcagggtgaagaattactcagagctttggatcaagttaactgagctttttcttaatttcattcctttttttggacactggtggctcattacctaaagcagtctatttatattttctacatctaattttagaagcctggctacaatactgcacaaacttggttagttcaattttgatcccctttctacttaatttacattaatgctcttttttagtatgttctttaatgctggatcacagacagctcattttctcagttttttggtatttaaaccattgcattgcagtagcatcattttaaaaaatgcacctttttatttatttatttttggctagggagtttatccctttttcgaattatttttaagaagatgccaatataatttttgtaagaaggcagtaacctttcatcatgatcataggcagttgaaaaatttttacaccttttttttcacattttacataaataataatgctttgccagcagtacgtggtagccacaattgcacaatatattttcttaaaaaataccagcagttactcatggaatatattctgcgtttataaaactagtttttaagaagaaattttttttggcctatgaaattgttaaacctggaacatgacattgttaatcatataataatgattcttaaatgctgtatggtttattatttaaatgggtaaagccatttacataatatagaaagatatgcatatatctagaaggtatgtggcatttatttggataaaattctcaattcagagaaatcatctgatgtttctatagtcactttgccagctcaaaagaaaacaataccctatgtagttgtggaagtttatgctaatattgtgtaactgatattaaacctaaatgttctgcctaccctgttggtataaagatattttgagcagactgtaaacaagaaaaaaaaaatcatgcattcttagcaaaattgcctagtatgttaatttgctcaaaatacaatgtttgattttatgcactttgtcgctattaacatcctttttttcatgtagatttcaataattgagtaattttagaagcattattttaggaatatatagttgtcacagtaaatatcttgttttttctatgtacattgtacaaatttttcattccttttgctctttgtggttggatctaacactaactgtattgttttgttacatcaaataaacatcttctgtggaccaggc

SEQ ID NO: 141830 - DNA, 3468 bp, Homo sapiens
  Payload ID: 7891
  Gene Symbol: HIF1A
  Gene Name: hypoxia inducible factor 1, alpha subunit (basic helix-loop-helix transcription factor)
  ENST ID: ENST00000557538
  CDS Start-End: 479-2782
atttgaaaacttggcaaccttggattggatggattcatatttcttagtatagaagttcttgatataactgaaaaattaagttaaacacttaataagtggtggttactcagcacttttagatgctgtttataatagatgaccttttctaactaatttacagttttttgaaagataactgagaggttgagggacggagattttcttcaagcaattttttttttcattttaaatgagctcccaatgtcggagtttggaaaacaaatttgtctttttaaaagaaggtctaggaaactcaaaacctgaagaattggaagaaatcagaatagaaaatggtaggataagttctgaacgtcgaaaagaaaagtctcgagatgcagccagatctcggcgaagtaaagaatctgaagttttttatgagcttgctcatcagttgccacttccacataatgtgagttcgcatcttgataaggcctctgtgatgaggcttaccatcagctatttgcgtgtgaggaaacttctggatgctggtgatttggatattgaagatgacatgaaagcacagatgaattgcttttatttgaaagccttggatggttttgttatggttctcacagatgatggtgacatgatttacatttctgataatgtgaacaaatacatgggattaactcagtttgaactaactggacacagtgtgtttgattttactcatccatgtgaccatgaggaaatgagagaaatgcttacacacagaaatggccttgtgaaaaagggtaaagaacaaaacacacagcgaagcttttttctcagaatgaagtgtaccctaactagccgaggaagaactatgaacataaagtctgcaacatggaaggtattgcactgcacaggccacattcacgtatatgataccaacagtaaccaacctcagtgtgggtataagaaaccacctatgacctgcttggtgctgatttgtgaacccattcctcacccatcaaatattgaaattcctttagatagcaagactttcctcagtcgacacagcctggatatgaaattttcttattgtgatgaaagaattaccgaattgatgggatatgagccagaagaacttttaggccgctcaatttatgaatattatcatgctttggactctgatcatctgaccaaaactcatcatgatatgtttactaaaggacaagtcaccacaggacagtacaggatgcttgccaaaagaggtggatatgtctgggttgaaactcaagcaactgtcatatataacaccaagaattctcaaccacagtgcattgtatgtgtgaattacgttgtgagtggtattattcagcacgacttgattttctcccttcaacaaacagaatgtgtccttaaaccggttgaatcttcagatatgaaaatgactcagctattcaccaaagttgaatcagaagatacaagtagcctctttgacaaacttaagaaggaacctgatgctttaactttgctggccccagccgctggagacacaatcatatctttagattttggcagcaacgacacagaaactgatgaccagcaacttgaggaagtaccattatataatgatgtaatgctcccctcacccaacgaaaaattacagaatataaatttggcaatgtctccattacccaccgctgaaacgccaaagccacttcgaagtagtgctgaccctgcactcaatcaagaagttgcattaaaattagaaccaaatccagagtcactggaactttcttttaccatgccccagattcaggatcagacacctagtccttccgatggaagcactagacaaagttcacctgagcctaatagtcccagtgaatattgtttttatgtggatagtgatatggtcaatgaattcaagttggaattggtagaaaaactttttgctgaagacacagaagcaaagaacccattttctactcaggacacagatttagacttggagatgttagctccctatatcccaatggatgatgacttccagttacgttccttcgatcagttgtcaccattagaaagcagttccgcaagccctgaaagcgcaagtcctcaaagcacagttacagtattccagcagactcaaatacaagaacctactgctaatgccaccactaccactgccaccactgatgaattaaaaacagtgacaaaagaccgtatggaagacattaaaatattgattgcatctccatctcctacccacatacataaagaaactactagtgccacatcatcaccatatagagatactcaaagtcggacagcctcaccaaacagagcaggaaaaggagtcatagaacagacagaaaaatctcatccaagaagccctaacgtgttatctgtcgctttgagtcaaagaactacagttcctgaggaagaactaaatccaaagatactagctttgcagaatgctcagagaaagcgaaaaatggaacatgatggttcactttttcaagcagtaggaattggaacattattacagcagccagacgatcatgcagctactacatcactttcttggaaacgtgtaaaaggatgcaaatctagtgaacagaatggaatggagcaaaagacaattattttaataccctctgatttagcatgtagactgctggggcaatcaatggatgaaagtggattaccacagctgaccagttatgattgtgaagttaatgctcctatacaaggcagcagaaacctactgcagggtgaagaattactcagagctttggatcaagttaactgagctttttcttaatttcattcctttttttggacactggtggctcattacctaaagcagtctatttatattttctacatctaattttagaagcctggctacaatactgcacaaacttggttagttcaattttgatcccctttctacttaatttacattaatgctcttttttagtatgttctttaatgctggatcacagacagctcattttctcagttttttggtatttaaaccattgcattgcagtagcatcattttaaaaaatgcacctttttatttatttatttttggctagggagtttatccctttttcgaattatttttaagaagatgccaatataatttttgtaagaaggcagtaacctttcatcatgatcataggcagttgaaaaatttttacaccttttttttcacattttacataaataataatgctttgccagcagtacgtggtagccacaattgcacaatatattttcttaaaaaataccagcagttactcatggaatatattctgcgtttataaaactagtttttaagaagaaattttttttggcctatgaaattgttaaacctggaacatgacattgttaatcatataataatgattcttaaatgctgtatggtttattatttaaatgggtaaagccatttacataatatagaaagatatgcatatatctagaagg

SEQ ID NO: 141831 - DNA, 13011 bp, Homo sapiens
  Payload ID: 7892
  Gene Symbol: HIF1AN
  Gene Name: hypoxia inducible factor 1, alpha subunit inhibitor
  Uniprot ID: Q9NWT6
  ENST ID: ENST00000299163
  CDS Start-End: 101-1150
atggtttccgttgggtgtgtggtttttttgtttttttttttttggggtccggaataggcggagcttccggttccggtgggggccgtccctggcggcggagatggcggcgacagcggcggaggctgtggcctctggctctggagagccccgggaggaggctggagccctcggccccgcctgggatgaatcccagttgcgcagttatagcttcccgactaggcccattccgcgtctgagtcagagcgacccccgggcagaggagcttattgagaatgaggagcctgtggtgctgaccgacacaaatcttgtgtatcctgccctgaaatgggaccttgaatacctgcaagagaatattggcaatggagacttctctgtgtacagtgccagcacccacaagttcttgtactatgatgagaagaagatggccaatttccagaactttaagccgaggtccaacagggaagaaatgaaatttcatgagttcgttgagaaactgcaggatatacagcagcgaggaggggaagagaggttgtatctgcagcaaacgctcaatgacactgtgggcaggaagattgtcatggacttcttaggttttaactggaactggattaataagcaacagggaaagcgtggctgggggcagcttacctctaacctgctgctcattggcatggaaggaaatgtgacacctgctcactatgatgagcagcagaacttttttgctcagataaaaggttacaaacgatgcatcttattccctccggatcagttcgagtgcctctacccataccctgttcatcacccatgtgacagacagagccaggtggactttgacaatcccgactacgagaggttccctaatttccaaaatgtggttggttacgaaacagtggttggccctggtgatgttctttacatcccaatgtactggtggcatcacatagagtcattactaaatggggggattaccatcactgtgaacttctggtataagggggctcccacccctaagagaattgaatatcctctcaaagctcatcagaaagtggccataatgagaaacattgagaagatgcttggagaggccttggggaacccacaagaggtggggcccttgttgaacacaatgatcaagggccgatacaactagcctgccaggggtcaaggcctcctgccaggtgactgctatcccgtccacaccgcttcattgatgaggacaggagactccaagcgctagtattgcacgctgcacttaatggactggactcttgccatggcccaggagtcaggtgtttggagcgaggcagggcagttggcactccactcctatttggagggacttcatacccttgcctcttgtgccccagcaccttctctctctgccccccgcctaaagtcctgcattcagtgtgtggagtcccagcttttggttgtcatcatgtctgtgtgtatgttagtctgtcaacttcggaatgtgtgcgtgtgtgtgcatgcacacgcatgtatgtatctgttccctgttccttctgggtcaggctgtcacttccggctctcagccctatctcctgcaacctcagtgcctcagcctgagagagagatgagatgctcttggactccccactgcatctgggctgcagggccagagctagtctgaccattaggtcagtctgcctcctgacagtttttgcgtagtcaagctctaggcggtatgggaatggctaccgggactctaatggggtgaaagagaggggaggcttgcctttgagagcctatatagccttcctgtgagagaggattagatagggttccaactgggcctacaagctcaagccatacataaaaggaccttgggacataagaaccaatgattgtgcataagttctaaattagagacacatatagtttctctctttcagcaccagctcttgcccctatgctgggtaccaagggagttctcctagctgtggcttctctaggttctaggggtgcaagcctctgtgtgtttgtttgtgtgtgtctgtgtgtgcgtatccacactaggggtgcaagcctctgggtgtgtgtgtgtgtgtgcgtgcgtgtgtgtgtgtgtgtccgtgtgtgtgtgtgtgtgtgtccacactggccagcctccctacttaccaaggttctccactgcttaccttttccagtgggacagtacagtgtgagcccccgggaagtactgcctgacctatcctaagcttttacacttggattttagccatcatatgttggccaggtctcactgcagcctgcccgaggctaactggctagagcctccaggccctatgatgctccctgcccaggccatatcctttattcctgctgagcttcctggctgaatagatgaaatggggtcaagcccaggcagctcattcactacctgtgatccacctcagggcacgggcaaacacataggcttgcgtcttaaagccagctcctctgccagaccccgttgtaatgtgccacaacaccctcaatagtcagggcaactggtggagcatggaagtcgaatttccttttctgttaggagctactcctgggaacccctctcagggctgcagcttacaggtgggcagctgtgattgcacaacttgaagggccatcattcacatctattcagtgggagtggggtccctgggattgggcagtgtggtggccctgtgtctcctcacctctgctcctgtcttcatcaccttctctctggaagggaagaggagttggaaggtctctggttttcttttctttttttttttttttgccaaaggtttacttccagcatctgagctctggctctcacccctgaagctcagttatagtgcactgatgaactgagaggatgcgtgtggatgtgtgtgcatgcctgagtgcgttttttggggaggggtgtttatttttagtaccccattctggggttctctgatgcagtgtggatgtgaagatatggtaccttctcaagtgtagctctttcaaatatagtcaatgctgggaaatgtgattgcagtgatctctatctctccacttcttttgggaaagaggagcacaggagcggaggaaaaacttggccacagtcacacttggaaagatagtagattattttcgttctcctcagcaggtctgctgtattcctcgctcagcgctcaaagatgtgggtgatgtgtcaaggaggcatgcactcagctggtccttgctgagttatttgctgacacaggtctcactaaggtggctgaggggtgggagggagaaggctaatcttggaaccttcacaggattggccttgatccttgggtaacacaagagtgattcctgatttttagacacctaatatgtgcctagtgcttttctctttgttcctcactatcctgcaaggtaggtattctcacttacagatgaataaatgggctcagagagattaggtgattagtgacaatcagttgtaacttagcactgttaggctgcaaaccccttgctccttcctttccaccaaactatgttgattttccttccttacctccctccttgtaccacaggttctgtcctcaagatatcaccccactgggcagtatctgaaggcagacccagcccaagatggtgcagaatatacagctcagggtgaaagttcttctgggctcctgctaacaaagtcttggaaaaactgcctgggaagccatattatgaattagtgctagaagaagctgtggggggaactgagttctgtgtctaattgcattacttatgtgtccttgaataggacccataactcctcccggcatgcttttgcatctatagaactgaagctgtagttctagatggcactaagggtcttggttcatattcagctgctgcttccccccaaggaaaagatgaggtttttccccttcgattaccttttgagggatgtttaggctcaaattctgcttgccacagaggaaacatttctgctgtagttgtttacctccatcctagctggcagtgtgggacacacacatacagcaagtgaaggtgggggtttgggcctgtatagaggtcagctacgctgcaggctcatctattcacaccagcaggtacagagaaaactagtgttttgtaaagtcaaatatttgttgggggttggagttctggggttggaggaggggctgttctgggcatcagttgagcagatgcccaggatgcctgggggagaccagcttcccctacaaatcagagctctaaattacaaggtttttaccaacgtgaacagttgggggaagtcgtctgctctcatttgcgtaatggtttctgtcactggtgattagacacaggatgaaggaaaagaaatttgacaattaggaatgagcgatcattaatctgaatctgttaggagacagagaggggaaggatccttatcagtgggccagcccagtatggggagacactccctccctctgcccccagagactcctgggctacatcctctttcagtattgccacaagtgggcagagcttgtatttcttaacaaagattagggacccagttgccagcctgagatggatataggaacagacatctttgggcatgagccaacaaagatagaaatagatgagtgtcaggtacaagctataaggcaaagaataacagtggaaaagttttgacatgtgtttgccatttgtggaaaatgtttttgtaatagtcaacacccctcatagcccacctgtgacaagtacttgttacattccagcactgtagggcgtgaggaaaatctggtccttatcaaatcccaggagcttctgcttagttggggaagaaattacatgaagcaaccagaggttataaggccacacttgtatatcgtgcaccctgtgtggacaagattagggactgttgagagaggaggaaaccagtagagagcaaagctctacccaggctccttgtaagcctctgggctcccccgagagggcctcgctactctacgcttcctagcaacgttgatgtccccacaaccccacatcagtgcagctgtggctgtgtggaggggctctgaggcctctgaggccagatgtgtaaacagtgctgaggttcagtaataggatgagtcttcaggtgtggagcagcccaccttggctcttcccatgtctctgtgttacttctcatattctgctgtcctttcaaacttcaaggacagtattaatttatactagtatttcttcctcagttttgtgacttgaatgcagtgagtgccttagaggatccaaggatgaaggaatgcgggttggtggttctctctttcagaatgggaacttcccaaaaatggggctgcgtctcgcctctcagtaggttccctacctctgggtcttccacccttcaaaatctggtacagaatttagcaggggctgcagggaatgaccctcagggaccagtttcacccagatggggtagatgatgaggtatacctagaagtagctcagggctccagagtctggcctttcagctggtgtcttactcccctttgagaccttcagctgcttgtcttccactgcctgcatacttctctgatgtcttctcaaactgttggctctaaagggatgttccagcctccctctccagagctgcctgcagtttcccttattcagctgtctcctgcctagtctctccagcggcctccttaccaagaccctttttcctaaacagttgtccttccctcagaaactccatggctgcaagtgtgaatagacttgtctttaggatccctctctctggtcatccctgatcatcttagggccgtctcccttttctgatttttgacagctctgtttattttgcccatggctagtcctcttgttttgtgtctgctgtgtgttcttgcccttccattgtcagttctgtacatcctggttcagcttgtctcactgtggtagccccttctgcttgtcttcagccatcttggtttaatcctcataggtcatggatgaatggagccttgctgagcactttgagggcatttctgttgggcacaacctcagaaacgggaagtcttgaggcctgggggcgtgtggtcagtgaggcctccagaggtgggttaggggtgggcacctacaagggccagttgaggggagaggtgcagggattgctgaggagactttgtgagaatgatgtcaggcccgggaagctggtgtggaagaactgagctgtcagaaggagataccaatatcccctttgcagggtggtgatgggcatcaaacatgacgtggaacatgtccccttcatggagggtttccatctaaatgcatctgtgtgccttagggatcagtagttcaggggtggtggacttttttgagtgtctcctaatttctctgaggtgtctttggctctgtgtcaccaaatgtgcctgacctctgcatcccagtggttgctgaaagggaaacagtatattgcgtagtcagatgtcaggagtagagatcttaatgagaaaggccctggcagctggagagatgagaggacctagtggtcagcttatacccagactatctctccactcctccaagagtttgagtcccatagctgatgaaagaatttacatatgggctcccccctgctttcccactgaaaatctattctcatattttgggaaggagcatatgtcctttaactttcaatggtaaacaatctaggatagtgtttaaaggcatggattttggagtcacatatagttggtttgaatttctagcttcactacttaccagctgggtttgaccttggttgatttacttaacctctctgagcctcagtttcctcaactataataacatgggtggagggaggcatgttgaaaatatctacctcagggttgttggaataactgaaacaatgtttgtaaagctttagcacagtgcctggcaagcacttaataaatggctgtggtggtggtggttatatttattatgtgatttattcagaaacttggtttcagtgatctctaaacagatttccagtggttctttctctctcaagaaaagcatagggaaaaacgagaaacaccttagataaaccatattgagttgagggtagacagaagagtctagtacctaaactcaccctagaggaagagaaacaggaagtgtcttatgcctcttctgcctgggcagccagactttactgctgtactaccagcccagggccttgggtgagaaggtttcaggtctgagctccccttgcactgtgtgagaggccgtggagccgaatgagtccttattatacctggagaagctgttgtctcctcacaccatgaaatgtaatagcagtcaaatcaggcccctcttgattcaattttagtccatgcctttccatgtatttaaattatataagtgttggccaggtgtggtggctcacacctgtaatcccagcacttcgggaggctgaggcaggaggatcacttgagcccaggagttcgaaccaaccttgggcagcatagtgagaccccttctcttaataattttttttgaaaataattttttaaaaattacaaatatggaccagacacctgggaggattacctcacgcctgtaatcccagcactttgggaggctgaggtgggtggatcacctgaggtcaggagtttgagactatcctggccaacatggtgaaaccctgtctctactaaaaatacaaaaattagccagatgtggtggtgggtacctgtaatcccagctactcgggaggctgagacaggagaatcacttgaacctgggaggcggaggttgcagtgagctgagatcacgtcattgcactccagcctgggtgactacagtgagactccctctcaaaaaaaaaaaaaaaaaattatgagtatgttaagattgttctaggggagaagggcaatcaaaattcagaaaaatatgagtgggatgttaatagctaccatttgttgaacacttctgttccaggcactgtattagttcgtccccatgtggtgctctcagatcagtaggggagacaggcaggcagttagaattatggtgtatagaggagaagcattgcactatgtccagttttttatggtaggcttcctgcagaaagtgataagtccaagctgatatgtggaagatgaataattaaccagaggttgggggatttcccccttagcttctctttcttccagtccagcagtccaaaacaaacactgcttcccaatgcctaagggttttgtcgtaccttactccagggaatgggtgagacagtagatcccaagaagaaaaccctttggttagtcacagaaatctgaaagtcttggttgctggctcagatttgtcctggagtggacgtagattggacttgcttatttgtagccctccaccgttctcatttgtgttctggcctctggagccaccctgccagaccctacttggaagaaatgttgaatcaagctactcagacttcagcctgagatgtattatggctggctggaattctcagccctttccacatcatgatcccattaatctcttgggtctatccccacgcccagccacctctcctcctcactataagccaagtctccctgcagttctctataaatactcagatcctcttgcctcagaccctggtccctagctttgtgggtgaagaagatacctctttagcttgtgccaacccatccctctgggctacaggccattctgtagtcaccttgcagtcacgtctttccttctagataactggctctgggccttggaaaccttctctttggctctagctaattttgctgttttattccgtttacttaaaacctattcacttggtcattgaggtcagaactatcaggaaagctgtgctccttaacccatcatctaagctaagcttgggccaggtttttattacctcttgaatatatatagtgcaatatagtgtagtggttgagagtggagtctgcatacctggatctgccattctgcatgactttgggcaaatggacaaactgcccgaaacttgacttgtttatatgtatggggaagacatcatttacattgtcagggtaaggcttagcagaatgaccggtccatagcaagggctcagtctttctgtgtctctcagtctttacctctcttccccatctagctttctgtctaagttcctgtttctagtctcagggcatatctagttgtcagctcctgagcagagcagaggtataagtgtcaactcatgcttgtgttaccagttcctacccctgtcagtaacctctgatgcttacaaggatactatcacctatgccatcagtggggaatgaccttccaaaaatatttttaacaatactaaaaatacctgaaacatactgggtgaaaataagacattggagctgctgctccccaaggagataaaaggacagttcctaaagaggcattgaaggtttgtatgagccagcagcacagtcagaaggcaagaaggagaccctgggatgtgcacaaggatgcaggagacgagattgtcacagaggctgtcatgctagtaagagtcagaggttactgatgggtagagattgtcagagtctgccttgctagtctagaggtaggaccatggatttaagaacgttgcctccaagtttttgaattgtgaatttttgatcatatttgaacaaaaccccacctacagtctgcatggtcattgttctcacaagggtttgtgtgatgcactgacaagaacagaggctttggaggtgactcctgggtttgaatcaccatttgccactagctaattctaaccttaggtaagtcagtgtctctgggtctcaacctcttcctctgtgaggggtaggaaatagcacataacttgtagcattgttataagggctcgtgataatgtttttaaaacacctggctcaagcactcaggaaaatgttttattatgaagaccaagtgtctctgaaaagtgtttccttagtgtctggagagactacagcagcaaggcttttctgatcctactctgactctcaagataatggtgcttgaagtgaaatcacagaagagatgactggggcaggaaaagcaagatggaaaagataaagttgtggaagggactgaaagtccatgaagtgctgggctggggacagaaagggtttaatagggcagggtcttgaggaacaggaacagagaccttggttctgggttgccatctgattcccagaagagtaaaggaaatggggcaggaggatgtctgtggaggacacagtgtggctgagtggagagaacacaagcttctggccagtgaacctaagtgagaatgtcagtggactttgcacaggctgggtgcctttgggggtgttcatctcgctatgcttcggtcccctcatttaaaaaaattggttaataatatgatgacctgccaatgtgtgtggaaatactatgtaaactgagcactatataaatgctggttgttgagatattgggagtgggggtttcgggagattttgtttgtttgtttttttgagatggagttttcgctcttgttgcccaggctggagtgcagtggcgtgatcttggctcactgcaacctccacctcctccaggttcaagcaattctgcctcagcctcccgagtagctgggactcaggcgtgcgccaccatgcctggctaattttgtatttttagtagagatggggtttctccatgttggtcaggctggtctcgaactcccgacctcaggtgatctgcctgccttggcctcccaaagtgctgggattacaggtgcgagctaccacacctggccctggatttcttaataggtcctcttatgtggctattgagaatgaatgagacaactcattaactaactaagttaattcagaacttagtgcctagtaagtgctcagtaaatgttagtttcttttcctccatttcttcttaggaagcatcgtttacccagcataaacaggaggactcaactgtgcatgtcttagtgtgaacaagtaacatcagatttcccttttctgaggagagatcagttctgtaagagggagcatgagtgtgaatggggaagaatcatggagaagggagcaggactccacagtactggagatggagtagggacctctgggaatcgttggcatgggggtgtggtgcagaaagggtgatgctaagaggtgagagtctcaagaaagaagatgggtgttctagaggggaaagctaaacgatgataggcaatgaggagcggaggacaagaccctgaactaagggtgaggaggccagcattctgtcaggagaaccttaggaattgtgaccagaagtcaaagttgttacagcaatcctgcattcaaccaggtttcatctgaaaaacttaagagttgctaggcacagtcgtgcacacttgtaatcccaacactttgggaggcttgagtcaggaggaagcttgaggccaggagtttgagatcagcctaggcagcatagtgacaccccatctcttgaaaaaacaaacactcttaagagcagtggttcacctagaaataaaaagcagaaatcatcaagatgagaagacattttgtgttttgacagccaaggaaatttgccactgagacaaggtatctgacagcctagatgggattctagacttctgtgagaaagtgcagttaggccctgaatagcgtcaaactcagggatgtgagctgactgactgcctttttatgtaatggaggccatgtgatagggctttatgaggccacaaatagcactttctgggtcctttcacagtctagtcagtggcccaaccaacatatctggttgttctgcaatctcagtcatctgagaagataacctccaaaatacatgcagtggcatcaggtgtttccttggtaggtgtgcatcttttaatgatggaggacttaggatgaagaacaggtgtgtttaaaaacatcaaacccccacatcattactatttgctgtaaggatctatgcagtttgtattttaagtccttgacatatggaagagcatttgtgagagtaacaggtttgctttgtaatgccaactaaaaagtgtgtatttatactcgaattttaagttgaaattttgctaagtttcttttttttttttttgagacggagtctcactctgttgcccaggctggagtacagtggtacaatcattgctaagtctttctgtagttttagaacatttagaacaacttaagatttcctgtatttataaacttaatttattggaaatataagtacttgatcaggttttgtcttggtcagataaattaagtacttaaggaaatcaaatacattaatcatataaatgccatttaagtgtttaaaggagtttagttaaatgtaagttggatcaaacattaaacttttttgttttataagcaaaataataagatttgttagcagaacttaaaagcttagaaaagagaggattttggatatgtaactttgaagaggtgaatagtttgctcttttctgagacagggcattgcttttcgacgcaggctggagtgcagtggggcaagcatggctcactgcagcctcaacctcctggactcaagtgatcctcctgcctcagcctcccatgtagctgggatcacaggcacatgccaccacacctggctaattttttattttttgtagagacaggggcctcacttcattgcccaggcggatctcgaacacctgggctcaagcagtcctgcctcagcctcccaaagttctgggattacaggcataagccactgtgcctggccttgaatatattttttaaccaaagtaatttatgaatataaattgtttctatataacccaaagtcactctcattgacattaagaaactcagagagtgggttctaaatgtaatattaccacacacccaagtcacttagcctctacaagtaccacgtaactagcagccgttaaaagatggccaccgctagtccagtcggccacagacatggttttgtttggccaatacaagtttttgaaagttttaaaaaattgacaacattaaagatcagaaacttgacctaaaaa

SEQ ID NO: 141832 - DNA, 708 bp, Homo sapiens
  Payload ID: 7892
  Gene Symbol: HIF1AN
  Gene Name: hypoxia inducible factor 1, alpha subunit inhibitor
  ENST ID: ENST00000526476
  CDS Start-End: 45-152
ggcggagcttccggttccggtgggggccgtccctggcggcggagatggcggcgacagcggcggaggctgtggcctctggctctggagagccccgggaggaggctggagccctcggccccgcctgggatgaatcccagagcctgtggtgctgaccgacacaaatcttgtgtatcctgccctgaaatgggaccttgaatacctgcaagagaatattggcaatggagacttctctgtgtacagtgccagcacccacaagttcttgtactatgatgagaagaagatggccaatttccagaactttaagccgaggtccaacagggaagaaatgaaatttcatgagttcgttgagaaactgcaggatatacagcagcgaggaggggaagagaggttgtatctgcagcaaacgctcaatgacactgtgggcaggaagattgtcatggacttcttaggttttaactggaactggattaataagcaacagggaaagcgtggctgggggcagcttacctctaacctgctgctcattggcatggaaggaaatgtgacacctgctcactatgatgagcagcagaacttttttgctcagataaaaggttacaaacgatgcatcttattccctccggatcagttcgagtgcctctacccataccctgttcatcacccatgtgacagacagagccaggtggactttgacaatcccgactacga

SEQ ID NO: 141833 - DNA, 1042 bp, Homo sapiens
  Payload ID: 7892
  Gene Symbol: HIF1AN
  Gene Name: hypoxia inducible factor 1, alpha subunit inhibitor
  ENST ID: ENST00000533589
  CDS Start-End: 470-1042
aaatgaaactcgacgctctggatagagccaaggaaggctcctgctattcgggggtcctcgagggagccattaaaacctcggcttcctcatttgaggaaacagcctgagccaaggagaaaattgaagtcctctcagctgcagctgctcacccacccccctcccacctccctccacagagaaaagcacccactccattgactctgaggggtcacgagaaggttcgggaaaaagggtcacagtcaagccacccaacccagccggccttctcccatcactacttgggtgcgagcataccctctctgtctcaccccatgccatcatccgggagcctgtggtgctgaccgacacaaatcttgtgtatcctgccctgaaatgggaccttgaatacctgcaagagaatattggcaatggagacttctctgtgtacagtgccagcacccacaagttcttgtactatgatgagaagaagatggccaatttccagaactttaagccgaggtccaacagggaagaaatgaaatttcatgagttcgttgagaaactgcaggatatacagcagcgaggaggggaagagaggttgtatctgcagcaaacgctcaatgacactgtgggcaggaagattgtcatggacttcttaggttttaactggaactggattaataagcaacagggaaagcgtggctgggggcagcttacctctaacctgctgctcattggcatggaaggaaatgtgacacctgctcactatgatgagcagcagaacttttttgctcagataaaaggttacaaacgatgcatcttattccctccggatcagttcgagtgcctctacccataccctgttcatcacccatgtgacagacagagccaggtggactttgacaatcccgactacgagaggttccctaatttccaaaatgtggttggttacgaaacagtggttggccctggtgatgttctttacatcccaatgtactggtggcatcacatagagtcattactaaatggggggattaccatcactgtgaacttctggtataag

SEQ ID NO: 141834 - DNA, 2250 bp, Homo sapiens
  Payload ID: 7893
  Gene Symbol: HIF3A
  Gene Name: hypoxia inducible factor 3, alpha subunit
  Uniprot ID: Q9Y2N7
  ENST ID: ENST00000244303
  CDS Start-End: 161-1963
ctttcctgtggagtcatctcaccgccgtgcgcacccactcgtaactcgcacccgggtcctggctgcaccgcatcccctcctgcaccccctggatggcccttcagccaacgggggcctgggcgatggtcgaccacggagctgcgcaaggaaaagtcccgggatgcggcccgcagccggcgcagccaggagaccgaggtgctgtaccagctggctcacacgctgcccttcgcccgcggcgtcagcgcccacctggacaaggcctctatcatgcgcctcaccatcagctacctgcgcatgcaccgcctctgcgccgcagctggagctcattggacacagcatctttgatttcatccacccctgtgaccaagaggagcttcaggacgccctgaccccccagcagaccctgtccaggaggaaggtggaggcccccacggagcggtgcttctccttgcgcatgaagagtacactcaccagccgcgggcgcaccctcaacctcaaggcggccacctggaaggtgctgaactgctctggacatatgagggcctacaagccacctgcgcagacttctccagctgggagccctgactcagagcccccgctgcagtgcctggtgctcatctgcgaagccatcccccacccaggcagcctggagcccccactgggccgaggggccttcctcagccgccacagcctggacatgaagttcacctactgtgacgacaggattgcagaagtggctggctatagtcccgatgacctgatcggctgttccgcctacgagtacatccacgcgctggactccgatgcggtcagcaagagcatccacaccttgctgagcaagggccaggcagtaacagggcagtatcgcttcctggcccggagtggtggctacctgtggacccagacccaggccacagtggtgtcagggggacggggcccccagtcggagagtatcgtctgtgtccattttttaatcagccaggtggaagagaccggagtggtgctgtccctggagcaaacggagcaacactctcgcagacccattcagcggggcgccccctctcagaaggacacccctaaccctggggacagccttgacacccctggcccccggatccttgccttcctgcacccgccttccctgagcgaggctgccctggccgctgacccccgccgtttctgcagccctgacctccgtcgcctcctgggacccatcctggatggggcttcagtagcagccactcccagcaccccgctggccacacggcacccccaaagtcctctttcggctgatctcccagatgaactacctgtgggcaccgagaatgtgcacagactcttcacctccgggaaagacactgaggcagtggagacagatttagatatagctcaggatgctgatgctctggatttggagatgctggccccctacatctccatggatgatgacttccagctcaacgccagcgagcagctacccagggcctaccacagacctctgggggctgtcccccggccccgtgctcggagcttccatggcctgtcacctccagcccttgagccctccctgctaccccgctgggggagtgacccccggctgagctgctccagcccttccagaggggacccctcagcatcctctcccatggctggggctcggaagaggaccctggcccagagctcagaggacgaggacgagggagtggagctgctgggagtgagacctcccaaaaggtcccccagcccagaacacgaaaactttctgctctttcctctcagcctgagtttccttctgacaggaggaccagccccagggagcctgcaggaccccagcaccccactcctgaacctgaatgagcccctgggcctgggcccctcactgctctctccgtactcagacgaggacactacccagcccgggggccccttccagccaagggcaggctcagcccaggctgactgagccggctcctctccccatctgccttctcctcccccagaaaggacctcaaccacactccacgccggcagccaacgcacaggatgggggcgccaggagaggggcccctctctcctctatgtaccccctgcccacctcgggcctacctcagccctcacccctctgcctgctcccaatctgggggctctctggggtggtctcagctcagtgacctctgggaggtggtccctggccccctcctccttctctcaggatttctcttggggttctcaatacttggttacctcatt

SEQ ID NO: 141835 - DNA, 2551 bp, Homo sapiens
  Payload ID: 7893
  Gene Symbol: HIF3A
  Gene Name: hypoxia inducible factor 3, alpha subunit
  Uniprot ID: Q9Y2N7
  ENST ID: ENST00000300862
  CDS Start-End: 70-2073
agataagtcagggaggggacagagcggccctaggcgcgccacagagaggagcgaggcgccagaggcaccatggactggcaagaccacaggtcgaccacggagctgcgcaaggaaaagtcccgggatgcggcccgcagccggcgcagccaggagaccgaggtgctgtaccagctggctcacacgctgcccttcgcccgcggcgtcagcgcccacctggacaaggcctctatcatgcgcctcaccatcagctacctgcgcatgcaccgcctctgcgccgcaggggagtggaaccaggtgggagcagggggagaaccactggatgcctgctacctgaaggccctggagggcttcgtcatggtgctcaccgccgagggagacatggcttacctgtcggagaatgtcagcaaacacctgggcctcagtcagctggagctcattggacacagcatctttgatttcatccacccctgtgaccaagaggagcttcaggacgccctgaccccccagcagaccctgtccaggaggaaggtggaggcccccacggagcggtgcttctccttgcgcatgaagagtacactcaccagccgcgggcgcaccctcaacctcaaggcggccacctggaaggtgctgaactgctctggacatatgagggcctacaagccacctgcgcagacttctccagctgggagccctgactcagagcccccgctgcagtgcctggtgctcatctgcgaagccatcccccacccaggcagcctggagcccccactgggccgaggggccttcctcagccgccacagcctggacatgaagttcacctactgtgacgacaggattgcagaagtggctggctatagtcccgatgacctgatcggctgttccgcctacgagtacatccacgcgctggactccgatgcggtcagcaagagcatccacaccttgctgagcaagggccaggcagtaacagggcagtatcgcttcctggcccggagtggtggctacctgtggacccagacccaggccacagtggtgtcagggggacggggcccccagtcggagagtatcgtctgtgtccattttttaatcagccaggtggaagagaccggagtggtgctgtccctggagcaaacggagcaacactctcgcagacccattcagcggggcgccccctctcagaaggacacccctaaccctggggacagccttgacacccctggcccccggatccttgccttcctgcacccgccttccctgagcgaggctgccctggccgctgacccccgccgtttctgcagccctgacctccgtcgcctcctgggacccatcctggatggggcttcagtagcagccactcccagcaccccgctggccacacggcacccccaaagtcctctttcggctgatctcccagatgaactacctgtgggcaccgagaatgtgcacagactcttcacctccgggaaagacactgaggcagtggagacagatttagatatagctcaggatgctgatgctctggatttggagatgctggccccctacatctccatggatgatgacttccagctcaacgccagcgagcagctacccagggcctaccacagacctctgggggctgtcccccggccccgtgctcggagcttccatggcctgtcacctccagcccttgagccctccctgctaccccgctgggggagtgacccccggctgagctgctccagcccttccagaggggacccctcagcatcctctcccatggctggggctcggaagaggaccctggcccagagctcagaggacgaggacgagggagtggagctgctgggagtgagacctcccaaaaggtcccccagcccagaacacgaaaactttctgctctttcctctcagcctgagtttccttctgacaggaggaccagccccagggagcctgcaggaccccagcaccccactcctgaacctgaatgagcccctgggcctgggcccctcactgctctctccgtactcagacgaggacactacccagcccgggggccccttccagccaagggcaggctcagcccaggctgactgagccggctcctctccccatctgccttctcctcccccagaaaggacctcaaccacactccacgccggcagccaacgcacaggatgggggcgccaggagaggggcccctctctcctctatgtaccccctgcccacctcgggcctacctcagccctcacccctctgcctgctcccaatctgggggctctctggggtggtctcagctcagtgacctctgggaggtggtccctggccccctcctccttctctcaggatttctcttggggttctcaatacttggttacctcattatccctttctctgcctctcttggctttattttggggaatcaggggtgaggagggttgggggggtcatatctgtgtttccaggttctggggagaacaatgatccacgggtcaacgtgatcacatttccttctatccttcttgtattattatttttatttttgtcaatttcatgatatggtttttaatcatga

SEQ ID NO: 141836 - DNA, 5852 bp, Homo sapiens
  Payload ID: 7893
  Gene Symbol: HIF3A
  Gene Name: hypoxia inducible factor 3, alpha subunit
  Uniprot ID: Q9Y2N7
  ENST ID: ENST00000377670
  CDS Start-End: 32-2041
ccgagggctccggagcggcgactggcgagccatggcgctggggctgcagcgcgcaaggtcgaccacggagctgcgcaaggaaaagtcccgggatgcggcccgcagccggcgcagccaggagaccgaggtgctgtaccagctggctcacacgctgcccttcgcccgcggcgtcagcgcccacctggacaaggcctctatcatgcgcctcaccatcagctacctgcgcatgcaccgcctctgcgccgcaggggagtggaaccaggtgggagcagggggagaaccactggatgcctgctacctgaaggccctggagggcttcgtcatggtgctcaccgccgagggagacatggcttacctgtcggagaatgtcagcaaacacctgggcctcagtcagctggagctcattggacacagcatctttgatttcatccacccctgtgaccaagaggagcttcaggacgccctgaccccccagcagaccctgtccaggaggaaggtggaggcccccacggagcggtgcttctccttgcgcatgaagagtacactcaccagccgcgggcgcaccctcaacctcaaggcggccacctggaaggtgctgaactgctctggacatatgagggcctacaagccacctgcgcagacttctccagctgggagccctgactcagagcccccgctgcagtgcctggtgctcatctgcgaagccatcccccacccaggcagcctggagcccccactgggccgaggggccttcctcagccgccacagcctggacatgaagttcacctactgtgacgacaggattgcagaagtggctggctatagtcccgatgacctgatcggctgttccgcctacgagtacatccacgcgctggactccgatgcggtcagcaagagcatccacaccttgctgagcaagggccaggcagtaacagggcagtatcgcttcctggcccggagtggtggctacctgtggacccagacccaggccacagtggtgtcagggggacggggcccccagtcggagagtatcgtctgtgtccattttttaatcagccaggtggaagagaccggagtggtgctgtccctggagcaaacggagcaacactctcgcagacccattcagcggggcgccccctctcagaaggacacccctaaccctggggacagccttgacacccctggcccccggatccttgccttcctgcacccgccttccctgagcgaggctgccctggccgctgacccccgccgtttctgcagccctgacctccgtcgcctcctgggacccatcctggatggggcttcagtagcagccactcccagcaccccgctggccacacggcacccccaaagtcctctttcggctgatctcccagatgaactacctgtgggcaccgagaatgtgcacagactcttcacctccgggaaagacactgaggcagtggagacagatttagatatagctcaggatgctgatgctctggatttggagatgctggccccctacatctccatggatgatgacttccagctcaacgccagcgagcagctacccagggcctaccacagacctctgggggctgtcccccggccccgtgctcggagcttccatggcctgtcacctccagcccttgagccctccctgctaccccgctgggggagtgacccccggctgagctgctccagcccttccagaggggacccctcagcatcctctcccatggctggggctcggaagaggaccctggcccagagctcagaggacgaggacgagggagtggagctgctgggagtgagacctcccaaaaggtcccccagcccagaacacgaaaactttctgctctttcctctcagcctgagtttccttctgacaggaggaccagccccagggagcctgcaggaccccagcaccccactcctgaacctgaatgagcccctgggcctgggcccctcactgctctctccgtactcagacgaggacactacccagcccgggggccccttccagccaagggcaggctcagcccaggctgactgagccggctcctctccccatctgccttctcctcccccagaaaggacctcaaccacactccacgccggcagccaacgcacaggatgggggcgccaggagaggggcccctctctcctctatgtaccccctgcccacctcgggcctacctcagccctcacccctctgcctgctcccaatctgggggctctctggggtggtctcagctcagtgacctctgggaggtggtccctggccccctcctccttctctcaggatttctcttggggttctcaatacttggttacctcattatccctttctctgcctctcttggctttattttggggaatcaggggtgaggagggttgggggggtcatatctgtgtttccaggttctggggagaacaatgatccacgggtcaacgtgatcacatttccttctatccttcttgtattattatttttatttttgtcaatttcatgatatggtttttaatcatgatgaattgcctggggtctgtaagaatgtgggactctgatcttccccctcttcaggtgtcagtgcggagaggctctgggccagacctcacccccagtgacttccgattgaggccaaagaccccaagctgcccgccagctctgactgccccttgcgctctgggcttcctgccgcccccagctttgcctggacactgacttcattcatggtcctcctacttcaggggcagcctcccagttcctctgcttccaaactatgcaacctccaacctgctccagttccagactgtataacctctgacctgcactggttctagaccacacaacctccaatgtggtctgctttagatcaccttcttcttcttccttcttcctcttcctcttcctcctgctcctcttcctcttcttcttcttttttttttttgacagagtcttgctctgtcacccaggctggagtgcagtggcgcgatttcagcttactgcagcctccgcgccctgggttcaagtgattctcctgcctcaacttcccaaatagccgggactacgggcatgtgccacattgcccggctaatttttgtatttttagtagagatggggtttcaccacgttgtccagtctggtctcgaactcctgacctcaagtgctccacctgcctcagccttccaaagtgctgggattacaggcgtgagccactgcacccggctagaactcactttctccaaatccctctgcttcgaatttcaccgtcttcagctctttctagttctgggcctcaccagcctctcattctgcctgttttcaaaccttacgatccccaaaaattgtctggttctgggcctctaactccctctggctctatagtctatgactaccagattcttttggttctagaattcactaacttcctctggttctagacctcttcctataaattaatccctcttgttttagatctcacaccctccaacgccctccggttccagatcttatattcagtgatttcctctggttctggaccccacaactccaagcttcctattggttccagttctcctgatcggtaatacatttggttccaaatccagacctcttaatctctctctttttttttttttttttttgagacagagtcccactctgtcacccaggctggagtacagtggctcaatctcggctcactgcagcctccacctcctgggttcaagcaattcttgggcctcagcctcccaaatagctgggattacaggcatgtgccaccacgcccagctaagttttatatttttagtagagacagtgtttcaccatgttggccaggctggtcttgaactcccgacctcaactgatccacccgcctcagcctcccaaagtgctgaaattacaggagtgagcctggccagacttcttaatttctaaatcacttttgttttagaccttatgaggctcagcttattcttctgcagttctctataaccaagactcattttctctcatcaaaaacaagtacagagagtttgatgtgtttatctcttttttcttcctcttcttttttttttttttcttttttgagatggagtctctctctgttgcccaggctggagtataatggtgccatctaggctcactgcaacctccgcctcctgattcaagtgattctcctgcctcagcctcctaaattggtgggattacaggagcccaccaccacatccggctacctttgtgtattttttagtagagacggggttttgccaagttggaggggctggtcttgaactcttgacctcagatgatccacccgcctcagcctcccaaagtgctgggattacaggcataagccaccgtgcccgaccctgtccttatcttataataaccagttcttctagaaccagacgatgctctagttctcctagattctgaacctcatgacctgtaccactcactagttccagactacacaacttctagaaggtgccacctccagggtcctgattcaagatctggtgatctgctgtttctctggttctagaactgacttacaagtgccttctgattctagacctcattccgtaagttcccttggctctagacttcatcatttccagctcctcctcactcaagatctgactccaaattaccctgggtctagaattcagccttcaaatatcttctgattttagactttgccttatacatttctctggttttagatcttaccaccctcaactccttctgattctagatcttatggttcccaaatctctctggttctagaactcagattttaggcttttgtttttccttttttttgttaaaaaaaaaaaaatagagacggggtttcaccatgttgcccaggctggtcgcgaactactgagctcaagcaattctccctccttggcctcaccaaagtgctgggactacaggcatgagccactgagcccagccaggctttttctaattctatgctttattctataaattcctctgcttctaagcctcacagcttccaactgcctttgatttcagatccaaattcctctgattctataattcagcctccaaatgcttctgattctggaatctagacttttccctaaagattcctctggttctgaatcttataacctcaactccctaattccagaccccagcctcctaaatctattctgggcttcccaccccactgaacttacccaattccttctttcagtcttaagttttcccattctaaacccctaccctctaggctgtgctgctcctggacttcatgcctctccattctcattgcctacaatctctgtgccccagaaccccctccacttcccaccccagccctccagacatgcacttaccttgactttaccccacatgtttggggcacctggggctccctcaccccttgggtggtttgcaatctgaagacttctccagccacacaggcacatgcacaggcacggtgctgtctgcatattgccaggtggggagagaagccaggacccctcagctgtctgccaccatctatgtgcctcccttaccccccagctttctttctacagatggtgctactcttggtctcccacaggaaaaggcctccccccttcttagccccatttaccccgtttgtggaaggcactgctcgctctgttttgtcagagagtggcctatccagattggtgctatgggggggtctgacccctccctcctccctctggaggtgatgtgggccctcaatggagggaattgtgctgggctagggaaaggggagggactagactggccacactggctctgaaactcaccaatctctatacaccataaagacctcaccttggtaggcaccaga

SEQ ID NO: 141837 - DNA, 539 bp, Homo sapiens
  Payload ID: 7893
  Gene Symbol: HIF3A
  Gene Name: hypoxia inducible factor 3, alpha subunit
  ENST ID: ENST00000526506
  CDS Start-End: 118-327
actcgcacccgggtcctggctgcaccgcatcccctcctgcaccccctggatggcccttcagccaacgggggcctgggcgatggtcgaccacggagctgcgcaaggaaaagtcccgggatgcggcccgcagccggcgcagccaggagaccgaggtgctgtaccagctggctcacacgctgcccttcgcccgcggcgtcagcgcccacctggacaaggcctctatcatgcgcctcaccatcagctacctgcgcatgcaccgcctctgcgccgcaggggagtggaaccaggtgggagcagggggagaaccactggatgcctgctacctgaaggccctggagggcttcgtcatggtgctcaccgccgagggagacatggcttacctgtcggagaatgtcagcaaacacctgggcctcagtcagctggagctcattggacacagcatctttgatttcatccacccctgtgaccaagaggagcttcaggacgccctgaccccccagcagagtcccaattgttgggatggagctggggaggcctga

SEQ ID NO: 141838 - DNA, 562 bp, Homo sapiens
  Payload ID: 7893
  Gene Symbol: HIF3A
  Gene Name: hypoxia inducible factor 3, alpha subunit
  ENST ID: ENST00000533789
  CDS Start-End: 32-277
ccgagggctccggagcggcgactggcgagccatggcgctggggctgcagcgcgcaaggtcgaccacggagctgcgcaaggaaaagtcccgggatgcggcccgcagccggcgcagccaggagaccgaggtgctgtaccagctggctcacacgctgcccttcgcccgcggcgtcagcgcccacctggacaaggcctctatcatgcgcctcaccatcagctacctgcgcatgcaccgcctctgcgccgcagctggagctcattggacacagcatctttgatttcatccacccctgtgaccaagaggagcttcaggacgccctgaccccccagcagaccctgtccaggaggaaggtggaggcccccacggagcggtgcttctccttgcgcatgaagagtacactcaccagccgcgggcgcaccctcaacctcaaggcggccacctggaaggtgctgaactgctctggacatatgagggcctacaagccacctgcgcagacttctccagctgggagccctgactcagagcccccgctgcagtgcctggtgctcatctgcgaagccat

SEQ ID NO: 141839 - DNA, 1709 bp, Homo sapiens
  Payload ID: 7893
  Gene Symbol: HIF3A
  Gene Name: hypoxia inducible factor 3, alpha subunit
  ENST ID: ENST00000472815
  CDS Start-End: 125-1477
actcgtaactcgcacccgggtcctggctgcaccgcatcccctcctgcaccccctggatggcccttcagccaacgggggcctgggcgatggtcgaccacggagctgcgcaaggaaaagtcccgggatgcggcccgcagccggcgcagccaggagaccgaggtgctgtaccagctggctcacacgctgcccttcgcccgcggcgtcagcgcccacctggacaaggcctctatcatgcgcctcaccatcagctacctgcgcatgcaccgcctctgcgccgcagctggagctcattggacacagcatctttgatttcatccacccctgtgaccaagaggagcttcaggacgccctgaccccccagcagaccctgtccaggaggaaggtggaggcccccacggagcggtgcttctccttgcgcatgaagagtacactcaccagccgcgggcgcaccctcaacctcaaggcggccacctggaaggtgctgaactgctctggacatatgagggcctacaagccacctgcgcagacttctccagctgggagccctgactcagagcccccgctgcagtgcctggtgctcatctgcgaagccatcccccacccaggcagcctggagcccccactgggccgaggggccttcctcagccgccacagcctggacatgaagttcacctactgtgacgacaggattgcagaagtggctggctatagtcccgatgacctgatcggctgttccgcctacgagtacatccacgcgctggactccgatgcggtcagcaagagcatccacaccttgctgagcaagggccaggcagtaacagggcagtatcgcttcctggcccggagtggtggctacctgtggacccagacccaggccacagtggtgtcagggggacggggcccccagtcggagagtatcgtctgtgtccattttttaatcagccaggtggaagagaccggagtggtgctgtccctggagcaaacggagcaacactctcgcagacccattcagcggggcgccccctctcagaaggacacccctaaccctggggacagccttgacacccctggcccccggatccttgccttcctgcacccgccttccctgagcgaggctgccctggccgctgacccccgccgtttctgcagccctgacctccgtcgcctcctgggacccatcctggatggggcttcagtagcagccactcccagcaccccgctggccacacggcacccccaaagtcctctttcggctgatctcccagatgaactacctgtgggcaccgagaatgtgcacagactcttcacctccgggaaagacactgaggcagtggagacagatttagatatagctcaggaccccagcaccccactcctgaacctgaatgagcccctgggttttcactttgtcacccagtctggagtgcagtggcacaaacacagctcaccgcagcctcgacctcctgggctcaagtgatcctcctacttcagctcccacaagtagctgggactgcagctatgtgccatcatgcctggctgatgtttatatgttttgtagagacgaggtttcaccatgttgcccaggctggtcttgaactcctgagttcaagcgatccacctgccttggcctcccaaagtgctgggattactggtatgaaccaccacgcccgacagtaaatatgttttgaatgaataaactctcataaatg

SEQ ID NO: 141840 - DNA, 544 bp, Homo sapiens
  Payload ID: 7893
  Gene Symbol: HIF3A
  Gene Name: hypoxia inducible factor 3, alpha subunit
  ENST ID: ENST00000531043
  CDS Start-End: 1-281
actcagagcccccgctgcagtgcctggtgctcatctgcgaagccatcccccacccaggcagcctggagcccccactgggccgaggggccttcctcagccgccacagcctggacatgaagttcacctactgtgacgacaggaatggtgactctggattcagcctgcttgagtgtcagtcttggctgtgtatccttagccaaatgacttcacctctctgtgccacaatttcctcacctatactgtggaatcataacagaacctgccttgtacagtcgttctgagcagctcagattgcagaagtggctggctatagtcccgatgacctgatcggctgttccgcctacgagtacatccacgcgctggactccgatgcggtcagcaagagcatccacaccttgctgagcaagggccaggcagtaacagggcagtatcgcttcctggcccggagtggtggctacctgtggacccagacccaggccacagtggtgtcagggggacggggcccccagtcggagagtatcgtctgtgtccattttttaatcag

SEQ ID NO: 141841 - DNA, 573 bp, Homo sapiens
  Payload ID: 7893
  Gene Symbol: HIF3A
  Gene Name: hypoxia inducible factor 3, alpha subunit
  ENST ID: ENST00000533145
  CDS Start-End: 129-573
acccactcgtaactcgcacccgggtcctggctgcaccgcatcccctcctgcaccccctggatggcccttcagccaacgggggcctgggcgatggtcgaccacggagctgcgcaaggaaaagtcccgggatgcggcccgcagccggcgcagccaggagaccgaggtgctgtaccagctggctcacacgctgcccttcgcccgcggcgtcagcgcccacctggacaaggcctctatcatgcgcctcaccatcagctacctgcgcatgcaccgcctctgcgccgcaggccactaggatgtacccccacttccttgggggtgcatgggagtggaaccaggtgggagcagggggagaaccactggatgcctgctacctgaaggccctggagggcttcgtcatggtgctcaccgccgagggagacatggcttacctgtcggagaatgtcagcaaacacctgggcctcagtcagctggagctcattggacacagcatctttgatttcatccacccctgtgaccaagaggagcttcaggacgccctgaccccccagcagaccctgtccaggaggaaggtgg

SEQ ID NO: 141842 - DNA, 1486 bp, Homo sapiens
  Payload ID: 7893
  Gene Symbol: HIF3A
  Gene Name: hypoxia inducible factor 3, alpha subunit
  ENST ID: ENST00000528563
  CDS Start-End: 157-366
cctgtggagtcatctcaccgccgtgcgcacccactcgtaactcgcacccgggtcctggctgcaccgcatcccctcctgcaccccctggatggcccttcagccaacgggggcctgggcgatggtcgaccacggagctgcgcaaggaaaagtcccgggatgcggcccgcagccggcgcagccaggagaccgaggtgctgtaccagctggctcacacgctgcccttcgcccgcggcgtcagcgcccacctggacaaggcctctatcatgcgcctcaccatcagctacctgcgcatgcaccgcctctgcgccgcaggggagtggaaccaggtgggagcagggggagaaccactggatgcctgctacctgaaggccctggagggcttcgtcatggtgctcaccgccgagggagacatggcttacctgtcggagaatgtcagcaaacacctgggcctcagtcagctggagctcattggacacagcatctttgatttcatccacccctgtgaccaagaggagcttcaggacgccctgaccccccagcagaccctgtccaggaggaaggtggaggcccccacggagcggtgcttctccttgcgcatgaagagtacactcaccagccgcgggcgcaccctcaacctcaaggcggccacctggaaggtgctgaactgctctggacatatgagggcctacaagccacctgcgcagacttctccagctgggagccctgactcagagcccccgctgcagtgcctggtgctcatctgcgaagccatcccccacccaggcagcctggagcccccactgggccgaggggccttcctcagccgccacagcctggacatgaagttcacctactgtgacgacaggattgcagaagtggctggctatagtcccgatgacctgatcggctgttccgcctacgagtacatccacgcgctggactccgatgcggtcagcaagagcatccacaccttgctgagcaagggccaggcagtaacagggcagtatcgcttcctggcccggagtggtggctacctgtggacccagacccaggccacagtggtgtcagggggacggggcccccagtcggagagtatcgtctgtgtccattttttaatcaggtggaagagaccggagtggtgctgtccctggagcaaacggagcaacactctcgcagacccattcagcggggcgccccctctcagaaggacacccctaaccctggggacagccttgacacccctggcccccggatccttgccttcctgcacccgccttccctgagcgaggctgccctggccgctgacccccgccgtttctgcagccctgacctccgtcgcctcctgggacccatcctggatggggcttcagtagcagccactcccagcaccccgctggccacacggcacccccaaagtcctctttcggctgatctcccagatgaactacctgtgggcaccgagaatgtgcacagactcttcacctcc

SEQ ID NO: 141843 - DNA, 576 bp, Homo sapiens
  Payload ID: 7893
  Gene Symbol: HIF3A
  Gene Name: hypoxia inducible factor 3, alpha subunit
  ENST ID: ENST00000600879
  CDS Start-End: 85-294
cttttctctttcccgagtcaccaccagtgaatgctgcccatgccctcaggtcgaccacggagctgcgcaaggaaaagtcccgggatgcggcccgcagccggcgcagccaggagaccgaggtgctgtaccagctggctcacacgctgcccttcgcccgcggcgtcagcgcccacctggacaaggcctctatcatgcgcctcaccatcagctacctgcgcatgcaccgcctctgcgccgcaggggagtggaaccaggtgggagcagggggagaaccactggatgcctgctacctgaaggccctggagggcttcgtcatggtgctcaccgccgagggagacatggcttacctgtcggagaatgtcagcaaacacctgggcctcagtcagctggagctcattggacacagcatctttgatttcatccacccctgtgaccaagaggagcttcaggacgccctgaccccccagcagaccctgtccaggaggaaggtggaggcccccacggagcggtgcttctccttgcgcatgaagagtacactcaccagccgcgggcgcaccctcaacctcaaggcggcca

SEQ ID NO: 141844 - DNA, 2101 bp, Homo sapiens
  Payload ID: 7893
  Gene Symbol: HIF3A
  Gene Name: hypoxia inducible factor 3, alpha subunit
  ENST ID: ENST00000600383
  CDS Start-End: 85-1869
cttttctctttcccgagtcaccaccagtgaatgctgcccatgccctcaggtcgaccacggagctgcgcaaggaaaagtcccgggatgcggcccgcagccggcgcagccaggagaccgaggtgctgtaccagctggctcacacgctgcccttcgcccgcggcgtcagcgcccacctggacaaggcctctatcatgcgcctcaccatcagctacctgcgcatgcaccgcctctgcgccgcagctggagctcattggacacagcatctttgatttcatccacccctgtgaccaagaggagcttcaggacgccctgaccccccagcagaccctgtccaggaggaaggtggaggcccccacggagcggtgcttctccttgcgcatgaagagtacactcaccagccgcgggcgcaccctcaacctcaaggcggccacctggaaggtgctgaactgctctggacatatgagggcctacaagccacctgcgcagacttctccagctgggagccctgactcagagcccccgctgcagtgcctggtgctcatctgcgaagccatcccccacccaggcagcctggagcccccactgggccgaggggccttcctcagccgccacagcctggacatgaagttcacctactgtgacgacaggattgcagaagtggctggctatagtcccgatgacctgatcggctgttccgcctacgagtacatccacgcgctggactccgatgcggtcagcaagagcatccacaccttgctgagcaagggccaggcagtaacagggcagtatcgcttcctggcccggagtggtggctacctgtggacccagacccaggccacagtggtgtcagggggacggggcccccagtcggagagtatcgtctgtgtccattttttaatcagccaggtggaagagaccggagtggtgctgtccctggagcaaacggagcaacactctcgcagacccattcagcggggcgccccctctcagaaggacacccctaaccctggggacagccttgacacccctggcccccggatccttgccttcctgcacccgccttccctgagcgaggctgccctggccgctgacccccgccgtttctgcagccctgacctccgtcgcctcctgggacccatcctggatggggcttcagtagcagccactcccagcaccccgctggccacacggcacccccaaagtcctctttcggctgatctcccagatgaactacctgtgggcaccgagaatgtgcacagactcttcacctccgggaaagacactgaggcagtggagacagatttagatatagctcaggatgctgatgctctggatttggagatgctggccccctacatctccatggatgatgacttccagctcaacgccagcgagcagctacccagggcctaccacagacctctgggggctgtcccccggccccgtgctcggagcttccatggcctgtcacctccagcccttgagccctccctgctaccccgctgggggagtgacccccggctgagctgctccagcccttccagaggggacccctcagcatcctctcccatggctggggctcggaagaggaccctggcccagagctcagaggacgaggacgagggagtggagctgctgggagtgagacctcccaaaaggtcccccagcccagaacacgaaaactttctgctctttcctctcagcctgagtttccttctgacaggaggaccagccccagggagcctgcaggaccccagcaccccactcctgaacctgaatgagcccctgggttttcactttgtcacccagtctggagtgcagtggcacaaacacagctcaccgcagcctcgacctcctgggctcaagtgatcctcctacttcagctcccacaagtagctgggactgcagctatgtgccatcatgcctggctgatgtttatatgttttgtagagacgaggtttcaccatgttgcccaggctggtcttgaactcctgagttcaagcgatccacctgccttggcctcccaaagtgctgggattactggtatgaaccaccacgcccgacagtaaatatgttttgaatgaataaactctcataaatg

SEQ ID NO: 141845 - DNA, 1349 bp, Homo sapiens
  Payload ID: 7894
  Gene Symbol: HILPDA
  Gene Name: hypoxia inducible lipid droplet-associated
  Uniprot ID: Q9Y5L2
  ENST ID: ENST00000257696
  CDS Start-End: 202-393
gacggcgcttttgtctccggtgagttttgtggcgggaagcttctgcgctggtgcttagtaaccgactttcctccggactcctgcacgacctgctcctacagccggcgatccactcccggctgttcccccggagggtccagaggcctttcagaaggagaaggcagctctgtttctctgcagaggagtagggtcctttcagccatgaagcatgtgttgaacctctacctgttaggtgtggtactgaccctactctccatcttcgttagagtgatggagtccctagagggcttactagagagcccatcgcctgggacctcctggaccaccagaagccaactagccaacacagagcccaccaagggccttccagaccatccatccagaagcatgtgataagacctccttccatactggccatattttggaacactgacctagacatgtccagatgggagtcccattcctagcagacaagctgagcaccgttgtaaccagagaactattactaggccttgaagaacctgtctaactggatgctcattgcctgggcaaggcctgtttaggccggttgcggtggctcatgcctgtaatcctagcactttgggaggctgaggtgggtggatcacctgaggtcaggagttcgagaccagcctcgccaacatggcgaaaccccatctctactaaaaatacaaaagttagctgggtgtggtggcagaggcctgtaatcccagctccttgggaggctgaggcgggagaattgcttgaacccggggacggaggttgcagtgagccgagatcgcactgctgtacccagcctgggccacagtgcaagactccatctcaaaaaaaaaagaaaagaaaaagcctgtttaatgcacaggtgtgagtggattgcttatggctatgagataggttgatctcgcccttaccccggggtctggtgtatgctgtgctttcctcagcagtatggctctgacatctcttagatgtcccaacttcagctgttgggagatggtgatattttcaaccctacttcctaaacatctgtctggggttcctttagtcttgaatgtcttatgctcaattatttggtgttgagcctctcttccacaagagctcctccatgtttggatagcagttgaagaggttgtgtgggtgggctgttgggagtgaggatggagtgttcagtgcccatttctcattttacattttaaagtcgttcctccaacatagtgtgtattggtctgaagggggtggtgggatgccaaagcctgctcaagttatggacattgtggccaccatgtggcttaaatgattttttctaactaataaagtggaatatatatttc

SEQ ID NO: 141846 - DNA, 785 bp, Homo sapiens
  Payload ID: 7894
  Gene Symbol: HILPDA
  Gene Name: hypoxia inducible lipid droplet-associated
  Uniprot ID: Q9Y5L2
  ENST ID: ENST00000435296
  CDS Start-End: 130-321
aaggggcggaggctgggcggcgttgctctgcgctctgcggctgacggcgcttttgtctccgggtccagaggcctttcagaaggagaaggcagctctgtttctctgcagaggagtagggtcctttcagccatgaagcatgtgttgaacctctacctgttaggtgtggtactgaccctactctccatcttcgttagagtgatggagtccctagagggcttactagagagcccatcgcctgggacctcctggaccaccagaagccaactagccaacacagagcccaccaagggccttccagaccatccatccagaagcatgtgataagacctccttccatactggccatattttggaacactgacctagacatgtccagatgggagtcccattcctagcagacaagctgagcaccgttgtaaccagagaactattactaggccttgaagaacctgtctaactggatgctcattgcctgggcaaggcctgtttaggccggttgcggtggctcatgcctgtaatcctagcactttgggaggctgaggtgggtggatcacctgaggtcaggagttcgagaccagcctcgccaacatggcgaaaccccatctctactaaaaatacaaaagttagctgggtgtggtggcagaggcctgtaatcccagctccttgggaggctgaggcgggagaattgcttgaacccggggacggaggttgcagtgagccgagatcgcactgctgtacccagcctgggccacagtgcaagactccatctcaaaaaaaaaagaaaa

SEQ ID NO: 141847 - DNA, 2023 bp, Homo sapiens
  Payload ID: 7895
  Gene Symbol: HYOU1
  Gene Name: hypoxia up-regulated 1
  ENST ID: ENST00000530473
  CDS Start-End: 54-2023
cgggccgggatccgtttccgggagtgggagccgccgccttcgtcaggggcactatggcagacaaagttaggaggcagaggccgaggaggcgagtctgttgggccttggtggctgtgctcttggcagacctgttggcactgagtgatacactggcagtgatgtctgtggacctgggcagtgagtccatgaaggtggccattgtcaaacctggagtgcccatggaaattgtcttgaataaggaatctcggaggaaaacaccggtgatcgtgaccctgaaagaaaatgaaagattctttggagacagtgcagcaagcatggcgattaagaatccaaaggctacgctacgttacttccagcacctcctggggaagcaggcagataacccccatgtagctctttaccaggcccgcttcccggagcacgagctgactttcgacccacagaggcagactgtgcactttcagatcagctcgcagctgcagttctcacctgaggaagtgttgggcatggttctcaattattctcgttctctagctgaagattttgcagagcagcccatcaaggatgcagtgatcaccgtgccagtcttcttcaaccaggccgagcgccgagctgtgctgcaggctgctcgtatggctggcctcaaagtgctgcagctcatcaatgacaacaccgccactgccctcagctatggtgtcttccgccggaaagatattaacaccactgcccagaatatcatgttctatgacatgggctcaggcagcaccgtatgcaccattgtgacctaccagatggtgaagactaaggaagctgggatgcagccacagctgcagatccggggagtaggatttgaccgtaccctggggggcctggagatggagctccggcttcgagaacgcctggctgggcttttcaatgagcagcgcaagggtcagagagcaaaggatgtgcgggagaacccgcgtgccatggccaagctgctgcgtgaggctaatcggctcaaaaccgtcctcagtgccaacgctgaccacatggcacagattgaaggcctgatggatgatgtggacttcaaggcaaaagtgactcgtgtggaatttgaggagttgtgtgcagacttgtttgagcgggtgcctgggcctgtacagcaggccctccagagtgccgaaatgagtctggatgagattgagcaggtgatcctggtgggtggggccactcgggtccccagagttcaggaggtgctgctgaaggccgtgggcaaggaggagctggggaagaacatcaatgcagatgaagcagccgccatgggggcagtgtaccaggcagctgcgctcagcaaagcctttaaagtgaagccatttgtcgtccgagatgcagtggtctaccccatcctggtggagttcacgagggaggtggaggaggagcctgggattcacagcctgaagcacaataaacgggtactcttctctcggatggggccctaccctcaacgcaaagtcatcacctttaaccgctacagccatgatttcaacttccacatcaactacggcgacctgggcttcctggggcctgaagatcttcgggtatttggctcccagaatctgaccacagtgaagctaaaaggggtgggtgacagcttcaagaagtatcctgactacgagtccaagggcatcaaggctcacttcaacctggatgagagtggcgtgctcagtctagacagggtggagtctgtatttgagacactggtagaggacagcgcagaagaggaatctactctcaccaaacttggcaacaccatttccagcctgtttggaggcggtaccacaccagatgccaaggagaatggtactgatactgtccaggaggaagaggagagccctgcagaggggagcaaggacgagcctggggagcaggtggagctcaaggaggaagctgaggccccagtggaggatggctctcagcccccaccccctgaacctaagggagatgcaacccctgagggagaaaaggccacagaaaaagaaaa

SEQ ID NO: 141848 - DNA, 2464 bp, Homo sapiens
  Payload ID: 7895
  Gene Symbol: HYOU1
  Gene Name: hypoxia up-regulated 1
  ENST ID: ENST00000543287
  CDS Start-End: 128-244
gtaacagtttgcaaaccgagaggagttgtgaagggcgcgggtggggggcgctgccggcctcgtgggtacgttcgtgccgcgtctgtcccagagctggggccgcaggagcggaggcaagaggggcactatggcagacaaagttaggaggcagaggccgaggaggcgagtctgttgggccttggtggctgtgctcttggcagacctgttggcactgagtgggaatctcggaggaaaacaccggtgatcgtgaccctgaaagaaaatgaaagattctttggagacagtgcagcaagcatggcgattaagaatccaaaggctacgctacgttacttccagcacctcctggggaagcaggcagataacccccatgtagctctttaccaggcccgcttcccggagcacgagctgactttcgacccacagaggcagactgtgcactttcagatcagctcgcagctgcagttctcacctgaggaagtgttgggcatggttctcaattattctcgttctctagctgaagattttgcagagcagcccatcaaggatgcagtgatcaccgtgccagtcttcttcaaccaggccgagcgccgagctgtgctgcaggctgctcgtatggctggcctcaaagtgctgcagctcatcaatgacaacaccgccactgccctcagctatggtgtcttccgccggaaagatattaacaccactgcccagaatatcatgttctatgacatgggctcaggcagcaccgtatgcaccattgtgacctaccagatggtgaagactaaggaagctgggatgcagccacagctgcagatccggggagtaggatttgaccgtaccctggggggcctggagatggagctccggcttcgagaacgcctggctgggcttttcaatgagcagcgcaagggtcagagagcaaaggatgtgcgggagaacccgcgtgccatggccaagctgctgcgtgaggctaatcggctcaaaaccgtcctcagtgccaacgctgaccacatggcacagattgaaggcctgatggatgatgtggacttcaaggcaaaagtgactcgtgtggaatttgaggagttgtgtgcagacttgtttgagcgggtgcctgggcctgtacagcaggccctccagagtgccgaaatgagtctggatgagattgagcaggtgatcctggtgggtggggccactcgggtccccagagttcaggaggtgctgctgaaggccgtgggcaaggaggagctggggaagaacatcaatgcagatgaagcagccgccatgggggcagtgtaccaggcagctgcgctcagcaaagcctttaaagtgaagccatttgtcgtccgagatgcagtggtctaccccatcctggtggagttcacgagggaggtggaggaggagcctgggattcacagcctgaagcacaataaacgggtactcttctctcggatggggccctaccctcaacgcaaagtcatcacctttaaccgctacagccatgatttcaacttccacatcaactacggcgacctgggcttcctggggcctgaagatcttcgggtatttggctcccagaatctgaccacagtgaagctaaaaggggtgggtgacagcttcaagaagtatcctgactacgagtccaagggcatcaaggctcacttcaacctggatgagagtggcgtgctcagtctagacagggtggagtctgtatttgagacactggtagaggacagcgcagaagaggaatctactctcaccaaacttggcaacaccatttccagcctgtttggaggcggtaccacaccagatgccaaggagaatggtactgatactgtccagatgctcttcctttgtccagctagattgccacagtccaagcaggccattgaccgtttccatacagcagtcacctgtatggaacccccatggggtcggcggtgccgagccaggcctgcctggaggctctgctcctgatcgttccctggggcgcctgtggtgtttcccaggaggaagaggagagccctgcagaggggagcaaggacgagcctggggagcaggtggagctcaaggaggaagctgaggccccagtggaggatggctctcagcccccaccccctgaacctaagggagatgcaacccctgagggagaaaaggccacagaaaaagaaaatggggacaagtctgaggcccagaaaccaagtgagaaggcagaggcagggcctgagggcgtcgctccagccccagagggagagaagaagcagaagcccgccaggaagcggcgaatggtagaggagatcggggtggagctggttgttctggacctgcctgacttgccagaggataagctggctcagtcggtgcagaaacttcaggacttgacactccgagacctggagaagcaggaacgggaaaaagctgccaacagcttggaagcattcatatttgagacccaggacaagctgta

SEQ ID NO: 141849 - DNA, 711 bp, Homo sapiens
  Payload ID: 7895
  Gene Symbol: HYOU1
  Gene Name: hypoxia up-regulated 1
  ENST ID: ENST00000534233
  CDS Start-End: 39-711
gcgcgggtggggggcgctgccggcctcgtgggggcactatggcagacaaagttaggaggcagaggccgaggaggcgagtctgttgggccttggtggctgtgctcttggcagacctgttggcactgagtgatacactggcagtgatgtctgtggacctgggcagtgagtccatgaaggtggccattgtcaaacctggagtgcccatggaaattgtcttgaataaggaatctcggaggaaaacaccggtgatcgtgaccctgaaagaaaatgaaagattctttggagacagtgcagcaagcatggcgattaagaatccaaaggctacgctacgttacttccagcacctcctggggaagcaggcagataacccccatgtagctctttaccaggcccgcttcccggagcacgagctgactttcgacccacagaggcagactgtgcactttcagatcagctcgcagctgcagttctcacctgaggaagtgttgggcatggttctcaattattctcgttctctagctgaagattttgcagagcagcccatcaaggatgcagtgatcaccgtgccagtcttcttcaaccaggccgagcgccgagctgtgctgcaggctgctcgtatggctggcctcaaagtgctgcagctcatcaatgacaacaccgccactgccctcagctatggtgtcttccgccggaaagatattaacaccactg

SEQ ID NO: 141850 - DNA, 862 bp, Homo sapiens
  Payload ID: 7895
  Gene Symbol: HYOU1
  Gene Name: hypoxia up-regulated 1
  ENST ID: ENST00000526656
  CDS Start-End: 228-862
aagaggtagcgggggtggatggaggtgcgggccggccacccctcctaggggagacagcgtgcgagctccgggggcgggtcgggagcgcaagggagggccgcgcggacgccgggcgctcggcctcgcaccggggggcacgcagctcggcccccggtctgtccccacttgctggggcgggccgggatccgtttccgggagtgggagccgccgccttcgtcaggggcactatggcagacaaagttaggaggcagaggccgaggaggcgagtctgttgggccttggtggctgtgctcttggcagacctgttggcactgagtgatacactggcagtgatgtctgtggacctgggcagtgagtccatgaaggtggccattgtcaaacctggagtgcccatggaaattgtcttgaataaggaatctcggaggaaaacaccggtgatcgtgaccctgaaagaaaatgaaagattctttggagacagtgcagcaagcatggcgattaagaatccaaaggctacgctacgttacttccagcacctcctggggaagcaggcagataacccccatgtagctctttaccaggcccgcttcccggagcacgagctgactttcgacccacagaggcagactgtgcactttcagatcagctcgcagctgcagttctcacctgaggaagtgttgggcatggttctcaattattctcgttctctagctgaagattttgcagagcagcccatcaaggatgcagtgatcaccgtgccagtcttcttcaaccaggccgagcgccgagctgtgctgcaggctgctcgtatggctggcctcaaagtgctgcagctcatcaatgacaacaccgccactgccctcag

SEQ ID NO: 141851 - DNA, 582 bp, Homo sapiens
  Payload ID: 7895
  Gene Symbol: HYOU1
  Gene Name: hypoxia up-regulated 1
  ENST ID: ENST00000532421
  CDS Start-End: 119-582
aacagtttgcaaaccgagaggagttgtgaagggcgcgggtggggggcgctgccggcctcgtgggtacgttcgtgccgcgtctgtcccagagctggggccgcaggagcggaggggcactatggcagacaaagttaggaggcagaggccgaggaggcgagtctgttgggccttggtggctgtgctcttggcagacctgttggcactgagtgatacactggcagtgatgtctgtggacctgggcagtgagtccatgaaggtggccattgtcaaacctggagtgcccatggaaattgtcttgaataaggaatctcggaggaaaacaccggtgatcgtgaccctgaaagaaaatgaaagattctttggagacagtgcagcaagcatggcgattaagaatccaaaggctacgctacgttacttccagcacctcctggggaagcaggcagataacccccatgtagctctttaccaggcccgcttcccggagcacgagctgactttcgacccacagaggcagactgtgcactttcagatcagctcgcagctgcagttctcacctgaggaagtgttgggcatggttctcaa

SEQ ID NO: 141852 - DNA, 629 bp, Homo sapiens
  Payload ID: 7895
  Gene Symbol: HYOU1
  Gene Name: hypoxia up-regulated 1
  ENST ID: ENST00000527038
  CDS Start-End: 183-629
ggtgcgcgagacgccgccgagaggttggtggctaatgtaacagtttgcaaaccgagaggagttgtgaagggcgcgggtggggggcgctgccggcctcgtgggtacgttcgtgccgcgtctgtcccagagctggggccgcaggagcggaggcaagaggtagcgggggtggatggaggggcactatggcagacaaagttaggaggcagaggccgaggaggcgagtctgttgggccttggtggctgtgctcttggcagacctgttggcactgagtgatacactggcagtgatgtctgtggacctgggcagtgagtccatgaaggtggccattgtcaaacctggagtgcccatggaaattgtcttgaataaggaatctcggaggaaaacaccggtgatcgtgaccctgaaagaaaatgaaagattctttggagacagtgcagcaagcatggcgattaagaatccaaaggctacgctacgttacttccagcacctcctggggaagcaggcagataacccccatgtagctctttaccaggcccgcttcccggagcacgagctgactttcgacccacagaggcagactgtgcactttcagatcagctcgcagctgcagttctcacctgaggaagtg

SEQ ID NO: 141853 - DNA, 550 bp, Homo sapiens
  Payload ID: 7895
  Gene Symbol: HYOU1
  Gene Name: hypoxia up-regulated 1
  ENST ID: ENST00000531968
  CDS Start-End: 58-174
gagcgcgcgccgcgtccggggccggctggtgcgcgagacgccgccgagaggggcactatggcagacaaagttaggaggcagaggccgaggaggcgagtctgttgggccttggtggctgtgctcttggcagacctgttggcactgagtgggaatctcggaggaaaacaccggtgatcgtgaccctgaaagaaaatgaaagattctttggagacagtgcagcaagcatggcgattaagaatccaaaggctacgctacgttacttccagcacctcctggggaagcaggcagataacccccatgtagctctttaccaggcccgcttcccggagcacgagctgactttcgacccacagaggcagactgtgcactttcagatcagctcgcagctgcagttctcacctgaggaagtgttgggcatggttctcaattattctcgttctctagctgaagattttgcagagcagcccatcaaggatgcagtgatcaccgtgccagtcttcttcaaccaggccgagcgccgagctgtgctgcaggctgctcgtatggctgg

SEQ ID NO: 141854 - DNA, 2162 bp, Homo sapiens
  Payload ID: 7895
  Gene Symbol: HYOU1
  Gene Name: hypoxia up-regulated 1
  ENST ID: ENST00000532519
  CDS Start-End: 126-2162
aacagtttgcaaaccgagaggagttgtgaagggcgcgggtggggggcgctgccggcctcgtgggtacgttcgtgccgcgtctgtcccagagctggggccgcaggagcggaggcaagaggggcactatggcagacaaagttaggaggcagaggccgaggaggcgagtctgttgggccttggtggctgtgctcttggcagacctgttggcactgagtgatacactggcagtgatgtctgtggacctgggcagtgagtccatgaaggtggccattgtcaaacctggagtgcccatggaaattgtcttgaataaggaatctcggaggaaaacaccggtgatcgtgaccctgaaagaaaatgaaagattctttggagacagtgcagcaagcatggcgattaagaatccaaaggctacgctacgttacttccagcacctcctggggaagcaggcagataacccccatgtagctctttaccaggcccgcttcccggagcacgagctgactttcgacccacagaggcagactgtgcactttcagatcagctcgcagctgcagttctcacctgaggaagtgttgggcatggttctcaattattctcgttctctagctgaagattttgcagagcagcccatcaaggatgcagtgatcaccgtgccagtcttcttcaaccaggccgagcgccgagctgtgctgcaggctgctcgtatggctggcctcaaagtgctgcagctcatcaatgacaacaccgccactgccctcagctatggtgtcttccgccggaaagatattaacaccactgcccagaatatcatgttctatgacatgggctcaggcagcaccgtatgcaccattgtgacctaccagatggtgaagactaaggaagctgggatgcagccacagctgcagatccggggagtaggatttgaccgtaccctggggggcctggagatggagctccggcttcgagaacgcctggctgggcttttcaatgagcagcgcaagggtcagagagcaaaggatgtgcgggagaacccgcgtgccatggccaagctgctgcgtgaggctaatcggctcaaaaccgtcctcagtgccaacgctgaccacatggcacagattgaaggcctgatggatgatgtggacttcaaggcaaaagtgactcgtgtggaatttgaggagttgtgtgcagacttgtttgagcgggtgcctgggcctgtacagcaggccctccagagtgccgaaatgagtctggatgagattgagcaggtgatcctggtgggtggggccactcgggtccccagagttcaggaggtgctgctgaaggccgtgggcaaggaggagctggggaagaacatcaatgcagatgaagcagccgccatgggggcagtgtaccaggcagctgcgctcagcaaagcctttaaagtgaagccatttgtcgtccgagatgcagtggtctaccccatcctggtggagttcacgagggaggtggaggaggagcctgggattcacagcctgaagcacaataaacgggtactcttctctcggatggggccctaccctcaacgcaaagtcatcacctttaaccgctacagccatgatttcaacttccacatcaactacggcgacctgggcttcctggggcctgaagatcttcgggtatttggctcccagaatctgaccacagtgaagctaaaaggggtgggtgacagcttcaagaagtatcctgactacgagtccaagggcatcaaggctcacttcaacctggatgagagtggcgtgctcagtctagacagggtggagtctgtatttgagacactggtagaggacagcgcagaagaggaatctactctcaccaaacttggcaacaccatttccagcctgtttggaggcggtaccacaccagatgccaaggagaatggtactgatactgtccaggaggaagaggagagccctgcagaggggagcaaggacgagcctggggagcaggtggagctcaaggaggaagctgaggccccagtggaggatggctctcagcccccaccccctgaacctaagggagatgcaacccctgagggagaaaaggccacagaaaaagaaaatggggacaagtctgaggcccagaagcctgttgtctgcagagcctcagttaccaggtttggtttctga

SEQ ID NO: 141855 - DNA, 552 bp, Homo sapiens
  Payload ID: 7895
  Gene Symbol: HYOU1
  Gene Name: hypoxia up-regulated 1
  ENST ID: ENST00000530467
  CDS Start-End: 245-552
gcaaaccgagaggagttgtgaagggcgcgggtggggggcgctgccggcctcgtgggtacgttcgtgccgcgtctgtcccagagctggggccgcaggagcggaggcaagagggatgtggcaaagccgaggacccatgctctttcacttgggcctttgtgtgggcgctgctgggatgattagagaatggtttgtacccatcaggagggagaaggggagaagtaggctgatctgccctgggggcactatggcagacaaagttaggaggcagaggccgaggaggcgagtctgttgggccttggtggctgtgctcttggcagacctgttggcactgagtgatacactggcagtgatgtctgtggacctgggcagtgagtccatgaaggtggccattgtcaaacctggagtgcccatggaaattgtcttgaataaggaatctcggaggaaaacaccggtgatcgtgaccctgaaagaaaatgaaagattctttggagacagtgcagcaagcatggcgattaagaatccaaaggctacgctacgttacttccagcacct

SEQ ID NO: 141856 - DNA, 4529 bp, Homo sapiens
  Payload ID: 7895
  Gene Symbol: HYOU1
  Gene Name: hypoxia up-regulated 1
  Uniprot ID: Q9Y4L1
  ENST ID: ENST00000617285
  CDS Start-End: 126-3125
aacagtttgcaaaccgagaggagttgtgaagggcgcgggtggggggcgctgccggcctcgtgggtacgttcgtgccgcgtctgtcccagagctggggccgcaggagcggaggcaagaggggcactatggcagacaaagttaggaggcagaggccgaggaggcgagtctgttgggccttggtggctgtgctcttggcagacctgttggcactgagtgatacactggcagtgatgtctgtggacctgggcagtgagtccatgaaggtggccattgtcaaacctggagtgcccatggaaattgtcttgaataaggaatctcggaggaaaacaccggtgatcgtgaccctgaaagaaaatgaaagattctttggagacagtgcagcaagcatggcgattaagaatccaaaggctacgctacgttacttccagcacctcctggggaagcaggcagataacccccatgtagctctttaccaggcccgcttcccggagcacgagctgactttcgacccacagaggcagactgtgcactttcagatcagctcgcagctgcagttctcacctgaggaagtgttgggcatggttctcaattattctcgttctctagctgaagattttgcagagcagcccatcaaggatgcagtgatcaccgtgccagtcttcttcaaccaggccgagcgccgagctgtgctgcaggctgctcgtatggctggcctcaaagtgctgcagctcatcaatgacaacaccgccactgccctcagctatggtgtcttccgccggaaagatattaacaccactgcccagaatatcatgttctatgacatgggctcaggcagcaccgtatgcaccattgtgacctaccagatggtgaagactaaggaagctgggatgcagccacagctgcagatccggggagtaggatttgaccgtaccctggggggcctggagatggagctccggcttcgagaacgcctggctgggcttttcaatgagcagcgcaagggtcagagagcaaaggatgtgcgggagaacccgcgtgccatggccaagctgctgcgtgaggctaatcggctcaaaaccgtcctcagtgccaacgctgaccacatggcacagattgaaggcctgatggatgatgtggacttcaaggcaaaagtgactcgtgtggaatttgaggagttgtgtgcagacttgtttgagcgggtgcctgggcctgtacagcaggccctccagagtgccgaaatgagtctggatgagattgagcaggtgatcctggtgggtggggccactcgggtccccagagttcaggaggtgctgctgaaggccgtgggcaaggaggagctggggaagaacatcaatgcagatgaagcagccgccatgggggcagtgtaccaggcagctgcgctcagcaaagcctttaaagtgaagccatttgtcgtccgagatgcagtggtctaccccatcctggtggagttcacgagggaggtggaggaggagcctgggattcacagcctgaagcacaataaacgggtactcttctctcggatggggccctaccctcaacgcaaagtcatcacctttaaccgctacagccatgatttcaacttccacatcaactacggcgacctgggcttcctggggcctgaagatcttcgggtatttggctcccagaatctgaccacagtgaagctaaaaggggtgggtgacagcttcaagaagtatcctgactacgagtccaagggcatcaaggctcacttcaacctggatgagagtggcgtgctcagtctagacagggtggagtctgtatttgagacactggtagaggacagcgcagaagaggaatctactctcaccaaacttggcaacaccatttccagcctgtttggaggcggtaccacaccagatgccaaggagaatggtactgatactgtccaggaggaagaggagagccctgcagaggggagcaaggacgagcctggggagcaggtggagctcaaggaggaagctgaggccccagtggaggatggctctcagcccccaccccctgaacctaagggagatgcaacccctgagggagaaaaggccacagaaaaagaaaatggggacaagtctgaggcccagaaaccaagtgagaaggcagaggcagggcctgagggcgtcgctccagccccagagggagagaagaagcagaagcccgccaggaagcggcgaatggtagaggagatcggggtggagctggttgttctggacctgcctgacttgccagaggataagctggctcagtcggtgcagaaacttcaggacttgacactccgagacctggagaagcaggaacgggaaaaagctgccaacagcttggaagcattcatatttgagacccaggacaagctgtaccagcccgagtaccaggaagtgtccacagaggagcagcgtgaggagatctctgggaagctcagcgccgcatccacctggctggaggatgagggtgttggagccaccacagtgatgttgaaggagaagctggctgagctgaggaagctgtgccaagggctgttttttcgggtagaggagcgcaagaagtggcccgaacggctgtctgccctcgataatctcctcaaccattccagcatgttcctcaagggggcccggctcatcccagagatggaccagatcttcactgaggtggagatgacaacgttagagaaagtcatcaatgagacctgggcctggaagaatgcaactctggccgagcaggctaagctgcccgccacagagaagcctgtgttgctctcaaaagacattgaagctaagatgatggccctggaccgagaggtgcagtatctgctcaataaggccaagtttaccaagccccggccccggcctaaggacaagaatgggacccgggcagagccacccctcaatgccagtgccagtgaccagggggagaaggtcatccctccagcaggccagactgaagatgcagagcccatttcagaacctgagaaagtagagactggatccgagccaggagacactgagcctttggagttaggaggtcctggagcagaacctgaacagaaagaacaatcgacaggacagaagcggcctttgaagaacgacgaactataacccccacctctgttttccccattcatctccacccccttcccccaccacttctatttatttaacatcgagggttgggggaggggttggtcctgccctcggctggagttcctttctcacccctgtgatttggaggtgtggagaaggggaagggagggacagctcactggttccttctgcagtacctctgtggttaaaaatggaaactgttctcctccccagccccactccctgttccctacccatataggccctaaatttgggaaaaatcactattaatttctgaatcctttgcctgtgggtaggaagagaatggctgccagtggctgatgggtcccggtgatgggaagggtatcaggttgctggggagtttccactcttctctggtgattgttccttccctcccttcctctcccaccatgcgatgagcatcctttcaggccagtgtctgcagagcctcagttaccaggtttggtttctgagtgcctatctgtgctctttcctccctctgcgggcttctcttgctctgagcctcccttccccattcccatccagctcctttccccctgggtttccttggcttcctgcagcaaattgggcagttctctgccccttgcctaaaagcctgtacctctggattggcggaagtaaatctggaaggattctcactcgtatttcccacccctagtggccagaggagggaggggcacagtgaagaagggagcccaccacctctccgaagaggaaagccacgtagagtggttggcatggggtgccagcatcgtgcaagctctgtcataatctgcatcttcccagcagcctggtaccccaggttcctgtaactccctgcctcctcctctcttctgctgttctgctcctcccagacagagcctttccctcaccccctgaccccctgggctgaccaaaatgtgctttctactgtgagtccctatcccaagatcctggggaaaggagagaccatggtgtgaatgtagagatgccacctccctctctctgaggcaggcctgtggatgaaggaggagggtcagggctggccttcctctgtgcatcactctgctaggttgggggcccccgacccaccatacctacgcctagggagcccgtcctccagtattccgtctgtagcaggagctagggctgctgcctcagctccaagacaagaatgaacctggctgtgtcagtcattttgtcttttccttttttttttttttttgccacattggcagagatgggacctaagggtcccacccctcaccccacccccacctcttctgtatgtttgaattctttcagtagctgttgatgctggttggacaggtttgagtcaaattgtactttgctccattgttaattgagaaactgtttcaataaaatattcttttctac

SEQ ID NO: 141857 - DNA, 3057 bp, Homo sapiens
  Payload ID: 7895
  Gene Symbol: HYOU1
  Gene Name: hypoxia up-regulated 1
  ENST ID: ENST00000614711
  CDS Start-End: 101-2134
gtgaagggcgcgggtggggggcgctgccggcctcgtgggtacgttcgtgccgcgtctgtcccagagctggggccgcaggagcggaggcaagaggggcactatggcagacaaagttaggaggcagaggccgaggaggcgagtctgttgggccttggtggctgtgctcttggcagacctgttggcactgagtgatacactggcagtgatgtctgtggacctgggcagtgagtccatgaaggtggccattgtcaaacctggagtgcccatggaaattgtcttgaataaggaatctcggaggaaaacaccggtgatcgtgaccctgaaagaaaatgaaagattctttggagacagtgcagcaagcatggcgattaagaatccaaaggctacgctacgttacttccagcacctcctggggaagcaggcagataacccccatgtagctctttaccaggcccgcttcccggagcacgagctgactttcgacccacagaggcagactgtgcactttcagatcagctcgcagctgcagttctcacctgaggaagtgttgggcatggttctcaattattctcgttctctagctgaagattttgcagagcagcccatcaaggatgcagtgatcaccgtgccagtcttcttcaaccaggccgagcgccgagctgtgctgcaggctgctcgtatggctggcctcaaagtgctgcagctcatcaatgacaacaccgccactgccctcagctatggtgtcttccgccggaaagatattaacaccactgcccagaatatcatgttctatgacatgggctcaggcagcaccgtatgcaccattgtgacctaccagatggtgaagactaaggaagctgggatgcagccacagctgcagatccggggagtaggatttgaccgtaccctggggggcctggagatggagctccggcttcgagaacgcctggctgggcttttcaatgagcagcgcaagggtcagagagcaaaggatgtgcgggagaacccgcgtgccatggccaagctgctgcgtgaggctaatcggctcaaaaccgtcctcagtgccaacgctgaccacatggcacagattgaaggcctgatggatgatgtggacttcaaggcaaaagtgactcgtgtggaatttgaggagttgtgtgcagacttgtttgagcgggtgcctgggcctgtacagcaggccctccagagtgccgaaatgagtctggatgagattgagcaggtgatcctggtgggtggggccactcgggtccccagagttcaggaggtgctgctgaaggccgtgggcaaggaggagctggggaagaacatcaatgcagatgaagcagccgccatgggggcagtgtaccaggcagctgcgctcagcaaagcctttaaagtgaagccatttgtcgtccgagatgcagtggtctaccccatcctggtggagttcacgagggaggtggaggaggagcctgggattcacagcctgaagcacaataaacgggtactcttctctcggatggggccctaccctcaacgcaaagtcatcacctttaaccgctacagccatgatttcaacttccacatcaactacggcgacctgggcttcctggggcctgaagatcttcgggtatttggctcccagaatctgaccacagtgaagctaaaaggggtgggtgacagcttcaagaagtatcctgactacgagtccaagggcatcaaggctcacttcaacctggatgagagtggcgtgctcagtctagacagggtggagtctgtatttgagacactggtagaggacagcgcagaagaggaatctactctcaccaaacttggcaacaccatttccagcctgtttggaggcggtaccacaccagatgccaaggagaatggtactgatactgtccaggaggaagaggagagccctgcagaggggagcaaggacgagcctggggagcaggtggagctcaaggaggaagctgaggccccagtggaggatggctctcagcccccaccccctgaacctaagggagatgcaacccctgagggagaaaaggccacagaaaaagaaaatggggacaagtctgaggcccaggccagtgtctgcagagcctcagttaccaggtttggtttctgagtgcctatctgtgctctttcctccctctgcgggcttctcttgctctgagcctcccttccccattcccatccagctcctttccccctgggtttccttggcttcctgcagcaaattgggcagttctctgccccttgcctaaaagcctgtacctctggattggcggaagtaaatctggaaggattctcactcgtatttcccacccctagtggccagaggagggaggggcacagtgaagaagggagcccaccacctctccgaagaggaaagccacgtagagtggttggcatggggtgccagcatcgtgcaagctctgtcataatctgcatcttcccagcagcctggtaccccaggttcctgtaactccctgcctcctcctctcttctgctgttctgctcctcccagacagagcctttccctcaccccctgaccccctgggctgaccaaaatgtgctttctactgtgagtccctatcccaagatcctggggaaaggagagaccatggtgtgaatgtagagatgccacctccctctctctgaggcaggcctgtggatgaaggaggagggtcagggctggccttcctctgtgcatcactctgctaggttgggggcccccgacccaccatacctacgcctagggagcccgtcctccagtattccgtctgtagcaggagctagggctgctgcctcagctccaagacaagaatgaacctggctgtgtcagtcattttgtcttttccttttttttttttttttgccacattggcagagatgggacctaagggtcccacccctcaccccacccccacctcttctgtatgtttgaattctttcagtagctgttgatgctggttggacaggtttgagtcaaattgtactttgctccattgttaattgagaaactgtttcaataaaatattcttttct

SEQ ID NO: 141858 - DNA, 1569 bp, Homo sapiens
  Payload ID: 7895
  Gene Symbol: HYOU1
  Gene Name: hypoxia up-regulated 1
  ENST ID: ENST00000614668
  CDS Start-End: 50-493
gccgcgtccggggccggctggtgcgcgagacgccgccgagaggggcactatggcagacaaagttaggaggcagaggccgaggaggcgagtctgttgggccttggtggctgtgctcttggcagacctgttggcactgagtgatacactggcagtgatgtctgtggacctgggcagtgagtccatgaaggtggccattgtcaaacctggagtgcccatggaaattgtcttgaataaggaatctcggaggaaaacaccggtgatcgtgaccctgaaagaaaatgaaagattctttggagacagtgcagcaagcatggcgattaagaatccaaaggctacgctacgttacttccagcacctcctggggaagcaggcagataacccccatgtagctctttaccaggcccgcttcccggagcacgagctgactttcgacccacagaggcagactgtgcactttcagatcagctcgcagctgcagttctcacccctgtgatttggaggtgtggagaaggggaagggagggacagctcactgtttccactcttctctggtgattgttccttccctcccttcctctcccaccatgcgatgagcatcctttcaggccagtgtctgcagagcctcagttaccaggtttggtttctgagtgcctatctgtgctctttcctccctctgcgggcttctcttgctctgagcctcccttccccattcccatccagctcctttccccctgggtttccttggcttcctgcagcaaattgggcagttctctgccccttgcctaaaagcctgtacctctggattggcggaagtaaatctggaaggattctcactcgtatttcccacccctagtggccagaggagggaggggcacagtgaagaagggagcccaccacctctccgaagaggaaagccacgtagagtggttggcatggggtgccagcatcgtgcaagctctgtcataatctgcatcttcccagcagcctggtaccccaggttcctgtaactccctgcctcctcctctcttctgctgttctgctcctcccagacagagcctttccctcaccccctgaccccctgggctgaccaaaatgtgctttctactgtgagtccctatcccaagatcctggggaaaggagagaccatggtgtgaatgtagagatgccacctccctctctctgaggcaggcctgtggatgaaggaggagggtcagggctggccttcctctgtgcatcactctgctaggttgggggcccccgacccaccatacctacgcctagggagcccgtcctccagtattccgtctgtagcaggagctagggctgctgcctcagctccaagacaagaatgaacctggctgtgtcagtcattttgtcttttccttttttttttttttttgccacattggcagagatgggacctaagggtcccacccctcaccccacccccacctcttctgtatgtttgaattctttcagtagctgttgatgctggttggacaggtttgagtcaaattgtactttgctccattgttaattgagaaactgtttcaataaaatattcttttct

SEQ ID NO: 141859 - DNA, 4360 bp, Homo sapiens
  Payload ID: 7895
  Gene Symbol: HYOU1
  Gene Name: hypoxia up-regulated 1
  ENST ID: ENST00000612687
  CDS Start-End: 146-2959
gagaggttggtggctaatgtaacagtttgcaaaccgagaggagttgtgaagggcgcgggtggggggcgctgccggcctcgtgggtacgttcgtgccgcgtctgtcccagagctggggccgcaggagcggaggcaagaggggcactatggcagacaaagttaggaggcagaggccgaggaggcgagtctgttgggccttggtggctgtgctcttggcagacctgttggcactgagtgatacactggcagtgatgtctgtggacctgggcagtgagtccatgaaggtggccattgtcaaacctggagtgcccatggaaattgtcttgaataaggaatctcggaggaaaacaccggtgatcgtgaccctgaaagaaaatgaaagattctttggagacagtgcagcaagcatggcgattaagaatccaaaggctacgctacgttacttccagcacctcctggggaagcaggcagataacccccatgtagctctttaccaggcccgcttcccggagcacgagctgactttcgacccacagaggcagactgtgcactttcagatcagctcgcagctgcagttctcacctgaggaagtgttgggcatggttctcaattattctcgttctctagctgaagattttgcagagcagcccatcaaggatgcagtgatcaccgtgccagtcttcttcaaccaggccgagcgccgagctgtgctgcaggctgctcgtatggctggcctcaaagtgctgcagctcatcaatgacaacaccgccactgccctcagctatggtgtcttccgccggaaagatattaacaccactgcccagaatatcatgttctatgacatgggctcaggcagcaccgtatgcaccattgtgacctaccagatggtgaagactaaggaagctgggatgcagccacagctgcagatccggggagtaggatttgaccgtaccctggggggcctggagatggagctccggcttcgagaacgcctggctgggcttttcaatgagcagcgcaagggtcagagagcaaaggatgtgcgggagaacccgcgtgccatggccaagctgctgcgtgaggctaatcggctcaaaaccgtcctcagtgccaacgctgaccacatggcacagattgaaggcctgatggatgatgtggacttcaaggcaaaagtgactcgtgtggaatttgaggagttgtgtgcagacttgtttgagcgggtgcctgggcctgtacagcaggccctccagagtgccgaaatgagtctggatgagattgagcaggtgatcctggtgggtggggccactcgggtccccagagttcaggaggtgctgctgaaggccgtgggcaaggaggagctggggaagaacatcaatgcagatgaagcagccgccatgggggcagtgtaccaggcagctgcgctcagcaaagcctttaaagtgaagccatttgtcgtccgagatgcagtggtctaccccatcctggtggagttcacgagggaggtggaggaggagcctgggattcacagcctgaagcacaataaacgggtactcttctctcggatggggccctaccctcaacgcaaagtcatcacctttaaccgctacagccatgatttcaacttccacatcaactacggcgacctgggcttcctggggcctgaagatcttcgggtatttggctcccagaatctgaccacagtgaagctaaaaggggtgggtgacagcttcaagaagtatcctgactacgagtccaagggcatcaaggctcacttcaacctggatgagagtggcgtgctcagtctagacagggtggagtctgtatttgagacactggtagaggacagcgcagaagaggaatctactctcaccaaacttggcaacaccatttccagcctgtttggaggcggtaccacaccagatgccaaggagaatggtactgatactgtccagaaaccaagtgagaaggcagaggcagggcctgagggcgtcgctccagccccagagggagagaagaagcagaagcccgccaggaagcggcgaatggtagaggagatcggggtggagctggttgttctggacctgcctgacttgccagaggataagctggctcagtcggtgcagaaacttcaggacttgacactccgagacctggagaagcaggaacgggaaaaagctgccaacagcttggaagcattcatatttgagacccaggacaagctgtaccagcccgagtaccaggaagtgtccacagaggagcagcgtgaggagatctctgggaagctcagcgccgcatccacctggctggaggatgagggtgttggagccaccacagtgatgttgaaggagaagctggctgagctgaggaagctgtgccaagggctgttttttcgggtagaggagcgcaagaagtggcccgaacggctgtctgccctcgataatctcctcaaccattccagcatgttcctcaagggggcccggctcatcccagagatggaccagatcttcactgaggtggagatgacaacgttagagaaagtcatcaatgagacctgggcctggaagaatgcaactctggccgagcaggctaagctgcccgccacagagaagcctgtgttgctctcaaaagacattgaagctaagatgatggccctggaccgagaggtgcagtatctgctcaataaggccaagtttaccaagccccggccccggcctaaggacaagaatgggacccgggcagagccacccctcaatgccagtgccagtgaccagggggagaaggtcatccctccagcaggccagactgaagatgcagagcccatttcagaacctgagaaagtagagactggatccgagccaggagacactgagcctttggagttaggaggtcctggagcagaacctgaacagaaagaacaatcgacaggacagaagcggcctttgaagaacgacgaactataacccccacctctgttttccccattcatctccacccccttcccccaccacttctatttatttaacatcgagggttgggggaggggttggtcctgccctcggctggagttcctttctcacccctgtgatttggaggtgtggagaaggggaagggagggacagctcactggttccttctgcagtacctctgtggttaaaaatggaaactgttctcctccccagccccactccctgttccctacccatataggccctaaatttgggaaaaatcactattaatttctgaatcctttgcctgtgggtaggaagagaatggctgccagtggctgatgggtcccggtgatgggaagggtatcaggttgctggggagtttccactcttctctggtgattgttccttccctcccttcctctcccaccatgcgatgagcatcctttcaggccagtgtctgcagagcctcagttaccaggtttggtttctgagtgcctatctgtgctctttcctccctctgcgggcttctcttgctctgagcctcccttccccattcccatccagctcctttccccctgggtttccttggcttcctgcagcaaattgggcagttctctgccccttgcctaaaagcctgtacctctggattggcggaagtaaatctggaaggattctcactcgtatttcccacccctagtggccagaggagggaggggcacagtgaagaagggagcccaccacctctccgaagaggaaagccacgtagagtggttggcatggggtgccagcatcgtgcaagctctgtcataatctgcatcttcccagcagcctggtaccccaggttcctgtaactccctgcctcctcctctcttctgctgttctgctcctcccagacagagcctttccctcaccccctgaccccctgggctgaccaaaatgtgctttctactgtgagtccctatcccaagatcctggggaaaggagagaccatggtgtgaatgtagagatgccacctccctctctctgaggcaggcctgtggatgaaggaggagggtcagggctggccttcctctgtgcatcactctgctaggttgggggcccccgacccaccatacctacgcctagggagcccgtcctccagtattccgtctgtagcaggagctagggctgctgcctcagctccaagacaagaatgaacctggctgtgtcagtcattttgtcttttccttttttttttttttttgccacattggcagagatgggacctaagggtcccacccctcaccccacccccacctcttctgtatgtttgaattctttcagtagctgttgatgctggttggacaggtttgagtcaaattgtactttgctccattgttaattgagaaactgtttcaataaaatattcttttc

SEQ ID NO: 141860 - DNA, 3358 bp, Homo sapiens
  Payload ID: 7895
  Gene Symbol: HYOU1
  Gene Name: hypoxia up-regulated 1
  ENST ID: ENST00000621959
  CDS Start-End: 263-3076
agtttgcaaaccgagaggagttgtgaagggcgcgggtggggggcgctgccggcctcgtgggtacgttcgtgccgcgtctgtcccagagctggggccgcaggagcggaggcaagagcttctctgtttagggatgtggcaaagccgaggacccatgctctttcacttgggcctttgtgtgggcgctgctgggatgattagagaatggtttgtacccatcaggagggagaaggggagaagtaggctgatctgccctgggggcactatggcagacaaagttaggaggcagaggccgaggaggcgagtctgttgggccttggtggctgtgctcttggcagacctgttggcactgagtgatacactggcagtgatgtctgtggacctgggcagtgagtccatgaaggtggccattgtcaaacctggagtgcccatggaaattgtcttgaataaggaatctcggaggaaaacaccggtgatcgtgaccctgaaagaaaatgaaagattctttggagacagtgcagcaagcatggcgattaagaatccaaaggctacgctacgttacttccagcacctcctggggaagcaggcagataacccccatgtagctctttaccaggcccgcttcccggagcacgagctgactttcgacccacagaggcagactgtgcactttcagatcagctcgcagctgcagttctcacctgaggaagtgttgggcatggttctcaattattctcgttctctagctgaagattttgcagagcagcccatcaaggatgcagtgatcaccgtgccagtcttcttcaaccaggccgagcgccgagctgtgctgcaggctgctcgtatggctggcctcaaagtgctgcagctcatcaatgacaacaccgccactgccctcagctatggtgtcttccgccggaaagatattaacaccactgcccagaatatcatgttctatgacatgggctcaggcagcaccgtatgcaccattgtgacctaccagatggtgaagactaaggaagctgggatgcagccacagctgcagatccggggagtaggatttgaccgtaccctggggggcctggagatggagctccggcttcgagaacgcctggctgggcttttcaatgagcagcgcaagggtcagagagcaaaggatgtgcgggagaacccgcgtgccatggccaagctgctgcgtgaggctaatcggctcaaaaccgtcctcagtgccaacgctgaccacatggcacagattgaaggcctgatggatgatgtggacttcaaggcaaaagtgactcgtgtggaatttgaggagttgtgtgcagacttgtttgagcgggtgcctgggcctgtacagcaggccctccagagtgccgaaatgagtctggatgagattgagcaggtgatcctggtgggtggggccactcgggtccccagagttcaggaggtgctgctgaaggccgtgggcaaggaggagctggggaagaacatcaatgcagatgaagcagccgccatgggggcagtgtaccaggcagctgcgctcagcaaagcctttaaagtgaagccatttgtcgtccgagatgcagtggtctaccccatcctggtggagttcacgagggaggtggaggaggagcctgggattcacagcctgaagcacaataaacgggtactcttctctcggatggggccctaccctcaacgcaaagtcatcacctttaaccgctacagccatgatttcaacttccacatcaactacggcgacctgggcttcctggggcctgaagatcttcgggtatttggctcccagaatctgaccacagtgaagctaaaaggggtgggtgacagcttcaagaagtatcctgactacgagtccaagggcatcaaggctcacttcaacctggatgagagtggcgtgctcagtctagacagggtggagtctgtatttgagacactggtagaggacagcgcagaagaggaatctactctcaccaaacttggcaacaccatttccagcctgtttggaggcggtaccacaccagatgccaaggagaatggtactgatactgtccagaaaccaagtgagaaggcagaggcagggcctgagggcgtcgctccagccccagagggagagaagaagcagaagcccgccaggaagcggcgaatggtagaggagatcggggtggagctggttgttctggacctgcctgacttgccagaggataagctggctcagtcggtgcagaaacttcaggacttgacactccgagacctggagaagcaggaacgggaaaaagctgccaacagcttggaagcattcatatttgagacccaggacaagctgtaccagcccgagtaccaggaagtgtccacagaggagcagcgtgaggagatctctgggaagctcagcgccgcatccacctggctggaggatgagggtgttggagccaccacagtgatgttgaaggagaagctggctgagctgaggaagctgtgccaagggctgttttttcgggtagaggagcgcaagaagtggcccgaacggctgtctgccctcgataatctcctcaaccattccagcatgttcctcaagggggcccggctcatcccagagatggaccagatcttcactgaggtggagatgacaacgttagagaaagtcatcaatgagacctgggcctggaagaatgcaactctggccgagcaggctaagctgcccgccacagagaagcctgtgttgctctcaaaagacattgaagctaagatgatggccctggaccgagaggtgcagtatctgctcaataaggccaagtttaccaagccccggccccggcctaaggacaagaatgggacccgggcagagccacccctcaatgccagtgccagtgaccagggggagaaggtcatccctccagcaggccagactgaagatgcagagcccatttcagaacctgagaaagtagagactggatccgagccaggagacactgagcctttggagttaggaggtcctggagcagaacctgaacagaaagaacaatcgacaggacagaagcggcctttgaagaacgacgaactataacccccacctctgttttccccattcatctccacccccttcccccaccacttctatttatttaacatcgagggttgggggaggggttggtcctgccctcggctggagttcctttctcacccctgtgatttggaggtgtggagaaggggaagggagggacagctcactggttccttctgcagtacctctgtggttaaaaatggaaactgttctcctccccagccccactccctgttccctacccatataggccctaaatttgggaaaaatcactattaatttctg

SEQ ID NO: 141861 - DNA, 491 bp, Homo sapiens
  Payload ID: 7895
  Gene Symbol: HYOU1
  Gene Name: hypoxia up-regulated 1
  ENST ID: ENST00000610597
  CDS Start-End: 216-491
aatgtaacagtttgcaaaccgagaggagttgtgaagggcgcgggtggggggcgctgccggcctcgtggcttctctgtttagggatgtggcaaagccgaggacccatgctctttcacttgggcctttgtgtgggcgctgctgggatgattagagaatggtttgtacccatcaggagggagaaggggagaagtaggctgatctgccctgggggcactatggcagacaaagttaggaggcagaggccgaggaggcgagtctgttgggccttggtggctgtgctcttggcagacctgttggcactgagtgatacactggcagtgatgtctgtggacctgggcagtgagtccatgaaggtggccattgtcaaacctggagtgcccatggaaattgtcttgaataaggaatctcggaggaaaacaccggtgatcgtgaccctgaaagaaaatgaaagattctttggagacagtgcagcaagcatggcgattaagaat

SEQ ID NO: 141862 - DNA, 4360 bp, Homo sapiens; identical to SEQ ID NO: 141859
  Payload ID: 7895
  Gene Symbol: HYOU1
  Gene Name: Hypoxia up-regulated 1
  ENST ID: ENST00000627731
  CDS Start-End: 146-2959

SEQ ID NO: 141863 - DNA, 2464 bp, Homo sapiens; identical to SEQ ID NO: 141848
  Payload ID: 7895
  Gene Symbol: HYOU1
  Gene Name: Hypoxia up-regulated 1
  ENST ID: ENST00000625612
  CDS Start-End: 128-244

SEQ ID NO: 141864 - DNA, 711 bp, Homo sapiens; identical to SEQ ID NO: 141849
  Payload ID: 7895
  Gene Symbol: HYOU1
  Gene Name: Hypoxia up-regulated 1
  ENST ID: ENST00000628974
  CDS Start-End: 39-711

SEQ ID NO: 141865 - DNA, 862 bp, Homo sapiens; identical to SEQ ID NO: 141850
  Payload ID: 7895
  Gene Symbol: HYOU1
  Gene Name: Hypoxia up-regulated 1
  ENST ID: ENST00000627494
  CDS Start-End: 228-862

SEQ ID NO: 141866 - DNA, 550 bp, Homo sapiens; identical to SEQ ID NO: 141853
  Payload ID: 7895
  Gene Symbol: HYOU1
  Gene Name: Hypoxia up-regulated 1
  ENST ID: ENST00000626576
  CDS Start-End: 58-174

SEQ ID NO: 141867 - DNA, 1569 bp, Homo sapiens; identical to SEQ ID NO: 141858
  Payload ID: 7895
  Gene Symbol: HYOU1
  Gene Name: Hypoxia up-regulated 1
  ENST ID: ENST00000629227
  CDS Start-End: 50-493

SEQ ID NO: 141868 - DNA, 491 bp, Homo sapiens; identical to SEQ ID NO: 141861
  Payload ID: 7895
  Gene Symbol: HYOU1
  Gene Name: Hypoxia up-regulated 1
  ENST ID: ENST00000626494
  CDS Start-End: 216-491

SEQ ID NO: 141869 - DNA, 552 bp, Homo sapiens; identical to SEQ ID NO: 141855
  Payload ID: 7895
  Gene Symbol: HYOU1
  Gene Name: Hypoxia up-regulated 1
  ENST ID: ENST00000629044
  CDS Start-End: 245-552

SEQ ID NO: 141870 - DNA, 3057 bp, Homo sapiens; identical to SEQ ID NO: 141857
  Payload ID: 7895
  Gene Symbol: HYOU1
  Gene Name: Hypoxia up-regulated 1
  ENST ID: ENST00000628429
  CDS Start-End: 101-2134

SEQ ID NO: 141871 - DNA, 582 bp, Homo sapiens; identical to SEQ ID NO: 141851
  Payload ID: 7895
  Gene Symbol: HYOU1
  Gene Name: Hypoxia up-regulated 1
  ENST ID: ENST00000628600
  CDS Start-End: 119-582

SEQ ID NO: 141872 - DNA, 4529 bp, Homo sapiens; identical to SEQ ID NO: 141856
  Payload ID: 7895
  Gene Symbol: HYOU1
  Gene Name: Hypoxia up-regulated 1
  ENST ID: ENST00000630669
  CDS Start-End: 126-3125

SEQ ID NO: 141873 - DNA, 3358 bp, Homo sapiens; identical to SEQ ID NO: 141860
  Payload ID: 7895
  Gene Symbol: HYOU1
  Gene Name: Hypoxia up-regulated 1
  ENST ID: ENST00000629353
  CDS Start-End: 263-3076

SEQ ID NO: 141874 - DNA, 2162 bp, Homo sapiens; identical to SEQ ID NO: 141854
  Payload ID: 7895
  Gene Symbol: HYOU1
  Gene Name: Hypoxia up-regulated 1
  ENST ID: ENST00000629679
  CDS Start-End: 126-2162

SEQ ID NO: 141875 - DNA, 629 bp, Homo sapiens; identical to SEQ ID NO: 141852
  Payload ID: 7895
  Gene Symbol: HYOU1
  Gene Name: Hypoxia up-regulated 1
  ENST ID: ENST00000628120
  CDS Start-End: 183-629

SEQ ID NO: 141876 - DNA, 2023 bp, Homo sapiens; identical to SEQ ID NO: 141847
  Payload ID: 7895
  Gene Symbol: HYOU1
  Gene Name: Hypoxia up-regulated 1
  ENST ID: ENST00000630070
  CDS Start-End: 54-2023

SEQ ID NO: 141877 - DNA, 7817 bp, Homo sapiens
  Payload ID: 7896
  Gene Symbol: IBA57
  Gene Name: IBA57 homolog, iron-sulfur cluster assembly
  Uniprot ID: Q5T440
  ENST ID: ENST00000366711
  CDS Start-End: 3-1073
agatggcgaccgcggcgctgcttcgaggcgccactccggggcgcggcggcccggtctggcgctggcggctgcgcgcggccccaaggtgccgcctggcccacagctcctgcagtcctggtggcgacccaacggccggagcggcctgggcctgcttccggctggacgggcgcaccctgctgcgcgtgcgtggccccgacgcggcgcccttcctgctagggctgctgaccaatgaactgccgcttccgagtcctgcggccgcgggggccccgcctgctgcgcgcgcgggctacgcccacttcctgaacgtgcagggccggacgctctatgacgtcatcttgtacgggctccaggaacactcggaggtgtctggcttccttctggagtgtgacagctcggtgcagggcgcgctgcagaagcacctcgcgctatacaggatccggcggaaggtcacggtggagccgcacccggagctgcgagtgtgggcggtgttgcccagttcccctgaggcctgcggggctgcatcgctgcaggagagggcaggggctgccgccatcctcatccgcgacccgcgaacagcacgcatggggtggcggctcctcacccaggatgaaggcccagccctggtgcccgggggccggctcggggacttgtgggattatcaccagcaccgatacctgcaaggcgttcctgagggggtccgagacttgcctcctggggtggccctgcccctggagtccaacctggccttcatgaacggcgtgagcttcaccaaaggctgctacattggccaggagctgacggcccgcacccaccacatgggcgtcatccgcaagcgcctcttccctgtccggttcttggacccccttcccaccagtggcatcacccctggtgccacggtgctgactgcctcaggacagactgtgggcaagttcagggctggccagggcaacgtggggctggccctgctgtggtcagagaagatcaagggtcctctgcacatcagagcctctgagggtgcccaggtggccttagccgcatctgtgccagactggtggcctacagtctccaagtagtccgaagccttggctggcgcaggctgatggggaggctggggcctggggcctttggcctctgtccagggtcttcccgtcccatctgtctgctgcgcctactgggtgggagccctggtttccatctgggaaagtcccccttgtaggtgccctgcctggccccacccatgctcaggggccccaggcacgtgggttgttttctccctggacttcctgtggccccagaggagcccaccgtgtgagtgctgggctccagatggcgccgggtcccaatcgtggctccacacagggttgtctgggaggacgggacggtgtctctggccagcactggcagcttccgggccttgtaccccactctgcctggcatgagcctcatggggggttggtccctgtgcctggaagcggggtggtgtccagggtctgcaggctggggctcgggctttgggagttgtttcactgtgcttgcttccagcatgtctcagggtggggctatgcgtggtctagaggggtctggggcattggatcaggtggcatgtgggtgtctacacatcgagaagcacacagggatgagccactaggtatcccatgctggaggcttgtggaaggctgtgcccatctcccatgtttccccacctctgttcctcctcagagccctccaggagcgtggggtgggggccagcgcagggctcaggagccagcagggcagagttctgcctgtgtgtgctgggttttggcatagcctgtgtttgcagtgagagtgacttgctgtcagtcacggggcacagcctcctgttcacccactggcttcccccttcccactgaagtgtgagctctatgtttcagggcatctattaaagagtgagccacaggcagccccttgggagctctggtttcatttgggggagagggaggtgggggcttagtttttgtgatctggctgactggaccccgggaacagcgctcctttgagaacgcccagacctaccagatgaagcacttggcatggctgcaggccagcaggggaggcctcagaggcccaggctgggcacgtgggtgccgagtctgcaaaggacagccccatggctgtgagctgtcggctgcagggcgcagggcctggggggcaggcgtttgggccaccaagctggacgttagggtggccacagagggccaagcaggcagggagcctgtgccgccatcctggggggccacaggtgctctctagaaatctgcagccatggcggttttggggtcaggggtctaaaggcagctctgagctgcagtgtagtttgtgatcacccaggaggagggtgtagagcggatggacgggaggaagcggctgcagctggagggaagagaggggccgtccagcctcacccgctgcagtcagctctcctatgggcaaggaaacagctaggtggccctgacccctgcggtcctgagagccggtggccttcagcccctcttggacaggtcatggtctggaagcgcccagcgcaggatggattccagaccagcatccctgcaaccttttcagccccactggctgctgctttaaactggcatggagacatttgatcagcttcccagccagttttctctccagctcagccaggagtgggtgcctgtggcctgtgtcaccaagagctggtgtctcctgcatgaggggcatgcacccctggaatgagggtctgtgcctcgagctcaaagtgtcccggctctgtcatctgcctgaagttgcctggcttttccagtggggcctccttgagtgctgcagcatctgggagcatcctagcctgtcccgtgggtgtggctgggtgagggctaggaggtgagccaggaaggaagcactccactccagagtgaggtgccgcctgagccatcctgtgccccctcagtgtcttcaggtctctgcaggtgtcaggatctcaaaatacttggttcagatcaaacacatttcgtgttcttctgtgtccttttttttttttttttttttttttgagatggagtcttgctctgttggccaggctggagctcagtggcacaatctctgctcactgcaacctctgcctcccaggttccagtgattttcctgcctcagcctcctgggtagctgggactacaggcacatgccccatgcccggctaatttttgtatttttagtagagatggggttttaccatgttggccaggatggtctcaattacaggcatgagccactgtgcccagcctcttctgtgtctttaaaaaggaaagtgtcagtcaacaaaagagcccctctgtcatacaaaccaaatcagttttcaccaaaatgtccttagtcctctcagaaaggcctggcctttaggaccttggaagcaggccctaaagcgcatcggcagggtcagagctttgtgttcaggaacactgggatctgctgagagctggtgtagccgctccaaaactgcacactgcttttcctgtctgctttagtttgtgttgtaaaaacataggaagttcgtgtgtgtgtgtgtgtgtgtgaattcaaggcataaggtgcagttgtgttatgtgggtatagtgcatggtggtgcagtctgggcttcttaccctcacacctcctgcctcccctcgttagagtcccccacatccgccttccactttctgagcccacattgcctgttgggcagctcctggttatgaggcaggacgtgtggtgtttgactgtctgtttctgagctgttttacttaacacagtgtatatggtgcatctttaggaaagcatgcttgtattttcctttcaaagccagatatgggcgggtgtggtggctcatgcctgtgatcccagcactttgggaggccgaggcaggaggattgcttgagcccaggagtttgagagcagcctgggcaacatatcaagactctgtctcttaaaaaaaaaaaaattagccaggcatggtggtccacacctgtggtcccacctattcgggaggctgaagtgcgaggatcacttgagcccaggaggttgaggctgcagtgagctgtgattgtgccactgcactccagcctgggcaacagagcaagaccctgtcttaaaacaaagaaagaataaaaaagaagagaagttgcagttggtagtatttccagagcccggcagacagtgtagaaactgtgagaaacccacctccaaatcaggccttagatagaaaacatcctaagaagtatacgttcattgtaaaatcattatcatcatcatcttctaatccccaaggagacaagctccctgttctgtgttcttgtatgaggcggtcagtcaagcgcagcccgagaggagaggcaggagcctgggagagcctctgctagacctttcctggcacttccccaggaaaggcaaggcagggcagatgtgcggctggccagctggagtgatttccatgggctccaagctgtaggagtggtccctggctgccagagtgctctggccagatagaggtgggctctggactggtgaggctgcattgcggaggcgcgcacacccagctgggcccttatctgtaaggactggctggcctgggaggggcagtctcccagccagaaggtggaatttttttttttttttgagataccaaaacatcctaaggtacaggaaagaaattgtcaacacacacacacagtaccataaacaaggcccagcagaaaggcagacagaagcacacacaccaatgttctgatcttagagtaagcagacacatcacatggaatgaggatgtttaatatatttaaagaaaacaatttatgcacaggaagcaagagactataaaaatgaccaagcagattttaaaaagagaacttgttgaaataaaaataaaatactctaaaaaatattccatgatgtgtttcctgaagaatcgggaactgtttgaagaaatgacccaaagtgcagcacagaaagacagagctggaaaatatgagatgggatgagacaagaagatggagagtttagtatgacatccgcaatttacgagtaattccagaaggaggggaaagagaatatggggtggaggcaagtattcagagaaatacggctgagaactttcccaaaccaacaggagcccctgctccttaggttcaggaaccagcagctcccaagcagcatagttaaaaagctctacccaaacagtcacgtcttggtgaaagtacagaatctcatgacaaagagatcttaaggcagaaaagaaagagattatctggaaagaagaaaataagtagttgattaaaagcaacagtggaagccagaaagatagtaaataatatcttcaaagtcctgggagaaaatagtgatagcctagaattgtgtacccagaaaatccgtctttcaagaatgaggggccaggcgcagtggctcacgtctgtattcccagcactttgggaggccaaggcaggtggatcacctgaggtcaggagttcaagaccagcctgatcaacatggtgaaaccctgtctctactaaaaatataaaaattagctgggtgtggtggcatattcctgtaatcccagctactcgggaggctgaggcaggagaatcacttgaacccaggaggcagaggttgcagtgagccaagattgtgccattgcactccagcctgggcaatagaatgagactctgtctcaaaaaaaaaaaaaaaaaaaaaaaaaaaaagagggctaaacgcattttcataccacgaaactgccctcactccggagtttgctgccagcagagcctagagcgtctaaggcatgtctgggcttctggcgagggatcctgtggggaagctggagatggaagaaggagtgaataggcaggaaggtggatttgtgggcatgtctaaaacaccacatctagaagcttctacttagaatgcctacttttggagtttataaaaaagatgccacatgttgagttgggagagaggtgcccaaacctacagtgttctaaagtccccctactggtcggaaggagggcacggacactgacttcagcatctgttacaaggcttatcagagttttcagataatctctaaaagaatggaaatatatcttccaaactatagagggaagaccatggaatttaaaagccagtccttcaaggagaaatgaacaaactcaaaatcgtagttgggagtgttttttttttttttgagacagagtctcactcttgcccaggctggagtggagtggcataaacacagctcactacagcctcaaccttctgggctcagatgattctcctgcctcagcctcctgagtagcaggaactacaggtgtgagtcatcacactcagctaattttttttttttttttttactttttgtagagatggggttctcactgcattgcccaggctggtcttgaatttctgggctcaggtgatcttcccacctcagcctcctgagtagctgggaccacaggtgcatgctaatttttaaaattttttgtttttaaatgctggtcttcaactcttgtccccaagtagctgggattggggcatgaggcactgtgctaacttcatgttgaaattgaattgccattctaacagtgttaagagatggggcctgtaagaggtgattaggctgtgagggctccactctccaagggcggagttaatgttatgaaagggtaagtccagcccgcttgtgcctctcttgccctccagtgttcaaagcaccatcttggaggtggaattcccaagtcggccagttcctggatcttggactgtccggtctccagaaccgtgagccaataaacctctgttccttgtaaatgagtcagcctcaggtattctcttgtagcagcacaaatggaggcagacacttccttcaccaatctcatgggaggcccactcctgtgagctgcctctagttccccaggccacagactccatcagggctcacctggagccgtccctgtctcacctggaagctctcccactcctctggccagcctgggcatctccacccaatatgagtgatggcgactgattcccttactttagcaagctgggaataaggaatgtttgcctgttcttattcaggggtctctgcatctccacacttgcacaggttgtgtgtacatacattttcctgtctttctggtaagcccctggggtggagctctgggccacagggcaggaaaactcagtgttgctaggaactgccagacattttcccggagtgagtgcagcatttacattcccaccagaagtgtgccaggttcttgtcatactgcgtcctcgccagcgcttggtgctgtcagtcttcttagtttccatttagagattcagtgtttaaattttgaacgtcttgggtgaacaccttggtttgagaaaagtaagaaaaagggtctgtctggctatgggccatggagacccagggcagtgctccacgtgccaaccctggggcagggagcccaagctaggactgtgactgtctgggctgtgggcatctgaccatctccagtgtccccgtctttgatttccctggcgatggtgctagcttagtttgtgcgcatcggcatttgtgggagaaatgaaggattaatacattttgttttatgtcagactctctcagtgagaagttctcagggacaataatagcagggggtcctgctgaagaaaaactgggagatggctgagctctggtccatctttcattgattcattcatttcttcattcattcaaccatgtattgaatgcttatagccaatgaaaataaagtacacagtatatttta

SEQ ID NO: 141878 - DNA, 511 bp, Homo sapiens
  Payload ID: 7897
  Gene Symbol: IDNK
  Gene Name: idnK, gluconokinase homolog (E. coli)
  ENST ID: ENST00000376417
  CDS Start-End: 5-277
ggttatggcggcgccgggcgcgctgctggtgatgggcgtgagcggctcggggaaatccaccgtgggcgccctgctggcatctgagctgggatggaaattctatgatgctgatgattatcacccggaggaaaatcgaaggaagatgggaaaaggcataccgctcaatgaccagagatgtagcctcgggacagcgtgtggttctagcctgttcagccctgaagaaaacgtacagagacatattaacacaaggaaaagatggtgtagctctgaagtgtgaggagtcgggaaaggaagcaaagcaggctgagatgcagctcctggtggtccatctgagcgggtcgtttgaggtcatctctggacgcttactcaaaagagagggacattttatgccccctgaattattgcagtcccagtttgagactctggagcccccagcagctccagaaaactttatccaaataagtgtggacaaaaatgtttcagagataattgctacaattatggaaaccct

SEQ ID NO: 141879 - DNA, 692 bp, Homo sapiens
  Payload ID: 7897
  Gene Symbol: IDNK
  Gene Name: idnK, gluconokinase homolog (E. coli)
  Uniprot ID: Q5T6J7
  ENST ID: ENST00000376419
  CDS Start-End: 5-568
ggttatggcggcgccgggcgcgctgctggtgatgggcgtgagcggctcggggaaatccaccgtgggcgccctgctggcatctgagctgggatggaaattctatgatgctgatgattatcacccggaggaaaatcgaaggaagatgggaaaaggcataccgctcaatgaccaggaccggattccatggctctgtaacttgcatgacattttactaagagatgtagcctcgggacagcgtgtggttctagcctgttcagccctgaagaaaacgtacagagacatattaacacaaggaaaagatggtgtagctctgaagtgtgaggagtcgggaaaggaagcaaagcaggctgagatgcagctcctggtggtccatctgagcgggtcgtttgaggtcatctctggacgcttactcaaaagagagggacattttatgccccctgaattattgcagtcccagtttgagactctggagcccccagcagctccagaaaactttatccaaataagtgtggacaaaaatgtttcagagataattgctacaattatggaaaccctaaaaatgaaatgacaatgattttgtatcagtggtccaaacagaactaagcataaatcattgtgccatcccaaacctcgttccagccgccttgcccatactagattctaaatgtttctaaaggcaaaccccaatgtgt

SEQ ID NO: 141880 - DNA, 629 bp, Homo sapiens
  Payload ID: 7897
  Gene Symbol: IDNK
  Gene Name: idnK, gluconokinase homolog (E. coli)
  ENST ID: ENST00000405990
  CDS Start-End: 7-186
tgggttatggcggcgccgggcgcgctgctggtgatgggcgtgagcggctcggggaactgggatggaaattctatgatgctgatgattatcacccggaggaaaatcgaaggaagatgggaaaaggcataccgctcaatgaccaggaccggattccatggctctgtaacttgcatgacattttactaagagatgtagcctcgggacagcgtgtggttctagcctgttcagccctgaagaaaacgtacagagacatattaacacaaggaaaagatggtgtagctctgaagtgtgaggagtcgggaaaggaagcaaagcaggctgagatgcagctcctggtggtccatctgagcgggtcgtttgaggtcatctctggacgcttactcaaaagagagggacattttatgccccctgaattattgcagtcccagtttgagactctggagcccccagcagctccagaaaactttatccaaataagtgtggacaaaaatgtttcagagataattgctacaattatggaaaccctaaaaatgaaatgacaatgattttgtatcagtggtccaaacagaactaagcataaatcattgtgccatcccaaacctcgttccagccgccttgcccatactaga

SEQ ID NO: 141881 - DNA, 1210 bp, Homo sapiens
  Payload ID: 7897
  Gene Symbol: IDNK
  Gene Name: idnK, gluconokinase homolog (E. coli)
  Uniprot ID: Q5T6J7
  ENST ID: ENST00000454393
  CDS Start-End: 436-861
gggcgcagaggggcacggccctcactgccccggccggggcgagagcggctccgcccctcgagcgccgggtaggccggggccggcggggcccggaaggcgacgggaaggagccgagcttgggttatggcggcgccgggcgcgctgctggtgatgggcgtgagcggctcggggaactaaggccagtctccagactccacggtcacgggcatcactgctttaggattacacagtgattggtgtttaaattcctgctaaggcagccatccctttcccagacatccttgcacagaaggaagctccacacattgggcagggcagtaacgggaacatctgtgtcctctccacagatccaccgtgggcgccctgctggcatctgagctgggatggaaattctatgatgctgatgattatcacccggaggaaaatcgaaggaagatgggaaaaggcataccgctcaatgaccaggaccggattccatggctctgtaacttgcatgacattttactaagagatgtagcctcgggacagcgtgtggttctagcctgttcagccctgaagaaaacgtacagagacatattaacacaaggaaaagatggtgtagctctgaagtgtgaggagtcgggaaaggaagcaaagcaggctgagatgcagctcctggtggtccatctgagcgggtcgtttgaggtcatctctggacgcttactcaaaagagagggacattttatgccccctgaattattgcagtcccagtttgagactctggagcccccagcagctccagaaaactttatccaaataagtgtggacaaaaatgtttcagagataattgctacaattatggaaaccctaaaaatgaaatgacaatgattttgtatcagtggtccaaacagaactaagcataaatcattgtgccatcccaaacctcgttccagccgccttgcccatactagattctaaatgtttctaaaggcaaaccccaatgtgtcaagacagacttgtttaggtgtaattttaggaattatgctggttcatcaggaagcagagggggagttttaaaagtcaagcttaaattgaagtttaaattcatctataaccaaatcaaatgatcagaggaaattctgtaatcaatgctggaaatcgttacattgtttagaacattcttgctcatgcctgtatttgcacaaataaatgaaacttcgctgtccttggc

SEQ ID NO: 141882 - DNA, 1623 bp, Homo sapiens
  Payload ID: 7897
  Gene Symbol: IDNK
  Gene Name: idnK, gluconokinase homolog (E. coli)
  ENST ID: ENST00000533522
  CDS Start-End: 124-444
gggcgcagaggggcacggccctcactgccccggccggggcgagagcggctccgcccctcgagcgccgggtaggccggggccggcggggcccggaaggcgacgggaaggagccgagcttgggttatggcggcgccgggcgcgctgctggtgatgggcactctcactctgtcgcccaggctggagtacagtggcgtgatctcggctcactgcaacctctgcctcctgagttcaagcgattgtcatgcctcagcctccggagtaactggggttacaggcgtgcaccaccacacccagctaagttttgtatttttagttgagacggggttttgccatgttggccgagctagtcccgaactcctggcctcaagtgatccgcctgcctcagcctcccaaagtgctgggattataggcgtgagccaagggctcaacctaacttggtcttaagtgtgatttctgctatgcacacttctggcttcaccagccatggagtttggccgggatggtctactcatccgtaggctgcatgtctccctgcgcagccttcaatagaatgaactaatgggaaaggtttcactgctctcgcaacctttggttacatccaggagcagatctcagtttggtacaactgtgtctaacacctctctgatagctttttagtgaaagaaagaggacctttgttaggcaacagtatccagctagaatttaatcacattgttctgttttcattatatacagcttttcaggtaccttctattcaagatccaccgtgggcgccctgctggcatctgagctgggatggaaattctatgatgctgatgattatcacccggaggaaaatcgaaggaagatgggaaaaggcataccgctcaatgaccaggaccggattccatggctctgtaacttgcatgacattttactaagagatgtagcctcgggacagcgtgtggttctagcctgttcagccctgaagaaaacgtacagagacatattaacacaaggaaaagatggtgtagctctgaagtgtgaggagtcgggaaaggaagcaaagcaggctgagatgcagctcctggtggtccatctgagcgggtcgtttgaggtcatctctggacgcttactcaaaagagagggacattttatgccccctgaattattgcagtcccagtttgagactctggagcccccagcagctccagaaaactttatccaaataagtgtggacaaaaatgtttcagagataattgctacaattatggaaaccctaaaaatgaaatgacaatgattttgtatcagtggtccaaacagaactaagcataaatcattgtgccatcccaaacctcgttccagccgccttgcccatactagattctaaatgtttctaaaggcaaaccccaatgtgtcaagacagacttgtttaggtgtaattttaggaattatgctggttcatcaggaagcagagggggagttttaaaagtcaagcttaaattgaagtttaaattcatctataaccaaatcaaatgatcagaggaaattctgtaatcaatgctggaaatcgttacattgtttagaacattcttgctcatgcctgtatttgcacaaataaatgaaacttcgctgtccttggca

SEQ ID NO: 141883 - DNA, 607 bp, Homo sapiens
  Payload ID: 7897
  Gene Symbol: IDNK
  Gene Name: idnK, gluconokinase homolog (E. coli)
  ENST ID: ENST00000530832
  CDS Start-End: 338-607
gacgggaaggagccgagcttgggttatggcggcgccgggcgcgctgctggtgatgggcgtgagcggctcggggaactaaggccagtctccagactccacggtcacgggcatcactgctttaggattacacagtgattggtgtttaaattcctgctaaggcagccatccctttcccagacatccttgcacagaaggaagctccacacattgggcagggcagtaacgggaacatctgtgtcctctccacagatccaccgtgggcgccctgctggcatctgagctgggatggaaattctatgatgctgatgattatcacccggaggaaaatcgaaggaagatgggaaaaggcataccgctcaatgaccaggaccggattccatggctctgtaacttgcatgacattttactaagagatgtagcctcgggacagcgtgtggttctagcctgttcagccctgaagaaaacgtacagagacatattaacacaaggaaaagatggtgtagctctgaagtgtgaggagtcgggaaaggaagcaaagcaggctgagatgcagctcctggtggtccatctgagcgggtcgtttgaggtcatctctggacgcttactc

SEQ ID NO: 141884 - DNA, 7619 bp, Homo sapiens
  Payload ID: 7898
  Gene Symbol: IDS
  Gene Name: iduronate 2-sulfatase
  Uniprot ID: P22304
  ENST ID: ENST00000340855
  CDS Start-End: 211-1863
gccccggaggggagggacgcagggaagagtcgcacggacgcactcgcgctgcggccagcgcccgggcctgcgggcccgggcggcggctgtgttgcgcagtcttcatgggttcccgacgaggaggtctctgtggctgcggcggcggctgctaactgcgccacctgctgcagcctgtccccgccgctctgaagcggccgcgtcgaagccgaaatgccgccaccccggaccggccgaggccttctctggctgggtctggttctgagctccgtctgcgtcgccctcggatccgaaacgcaggccaactcgaccacagatgctctgaacgttcttctcatcatcgtggatgacctgcgcccctccctgggctgttatggggataagctggtgaggtccccaaatattgaccaactggcatcccacagcctcctcttccagaatgcctttgcgcagcaagcagtgtgcgccccgagccgcgtttctttcctcactggcaggagacctgacaccacccgcctgtacgacttcaactcctactggagggtgcacgctggaaacttctccaccatcccccagtacttcaaggagaatggctatgtgaccatgtcggtgggaaaagtctttcaccctgggatatcttctaaccataccgatgattctccgtatagctggtcttttccaccttatcatccttcctctgagaagtatgaaaacactaagacatgtcgagggccagatggagaactccatgccaacctgctttgccctgtggatgtgctggatgttcccgagggcaccttgcctgacaaacagagcactgagcaagccatacagttgttggaaaagatgaaaacgtcagccagtcctttcttcctggccgttgggtatcataagccacacatccccttcagataccccaaggaatttcagaagttgtatcccttggagaacatcaccctggcccccgatcccgaggtccctgatggcctaccccctgtggcctacaacccctggatggacatcaggcaacgggaagacgtccaagccttaaacatcagtgtgccgtatggtccaattcctgtggactttcagcggaaaatccgccagagctactttgcctctgtgtcatatttggatacacaggtcggccgcctcttgagtgctttggacgatcttcagctggccaacagcaccatcattgcatttacctcggatcatgggtgggctctaggtgaacatggagaatgggccaaatacagcaattttgatgttgctacccatgttcccctgatattctatgttcctggaaggacggcttcacttccggaggcaggcgagaagcttttcccttacctcgacccttttgattccgcctcacagttgatggagccaggcaggcaatccatggaccttgtggaacttgtgtctctttttcccacgctggctggacttgcaggactgcaggttccacctcgctgccccgttccttcatttcacgttgagctgtgcagagaaggcaagaaccttctgaagcattttcgattccgtgacttggaagaggatccgtacctccctggtaatccccgtgaactgattgcctatagccagtatccccggccttcagacatccctcagtggaattctgacaagccgagtttaaaagatataaagatcatgggctattccatacgcaccatagactataggtatactgtgtgggttggcttcaatcctgatgaatttctagctaacttttctgacatccatgcaggggaactgtattttgtggattctgacccattgcaggatcacaatatgtataatgattcccaaggtggagatcttttccagttgttgatgccttgagttttgccaaccatggatggcaaatgtgatgtgctcccttccagctggtgagaggaggagttagagctggtcgttttgtgattacccataatattggaagcagcctgagggctagttaatccaaacatgcatcaacaatttggcctgagaatatgtaacagccaaaccttttcgtttagtctttattaaaatttataattggtaattggaccagttttttttttaatttccctctttttaaaacagttacggcttatttactgaataaatacaaagcaaacaaactcaagttatgtcatacctttggatacgaagaccatacataataaccaaacataacattatacacaaagaatactttcattatttgtggaatttagtgcatttcaaaaagtaatcatatatcaaactaggcaccacactaagttcctgattattttgtttataatttaataatatatcttatgagccctatatattcaaaatattatgttaacatgtaatccatgtttctttttcaaatctaaagttaaaaaaaaatagcagaagccagtgtcttaaagtctatcttttgtttctaagaccatgggatttcataatctcaagataaaatatgtatgaagtaattaatgtagaatttttacaccaaataataaataatgcttaataaactagagatatgagatgtgtaggaaatttggttaaacttttttcagatactttctggcccaaataataatttgttagcaaataatatgacccttgaactcaatggccatctattaaaagactgttgttcacactggaaaacatttaaagatgtgactatatccatgggtggattgaatcactcaaaatatattagtatccttctttagggatggttggttacagacatgtatttattcaggaggcagaaaatattccattttaattgcttattaaagaaaacattaaattctaaattattttgaggactgtgaagacttttcattagtgtaatattaggtcattgtcaatctcccagaatgtagttctatattctctaaatatgaaagtatccagaaaggccagtggtagtaaaaagcttagtgtatataatctcaaaagggatggaatatttacaactcatatttataacatgttgaatcttctcagttatcagtagtcatcagaagtgtcaatagctttctaaataaatattaaatatctactgtcctgtagtgaaggagtaatttttagtaattttctctttacaaagtctccagtgtttccaggtaaatatttgtgaaacaaaatacagcaaactacattgttacttcagtgtattgttgccaaaaatgacaagatattatattaaaatcagtaaattttagacagattttaaaaattaattagcctacaatagaggttatatggtaacacggtgatcttctaagcagttaagtgactgactgttctggcaacaacgacttctccgtgactgaagggccctgttcatttcctgatcctgaagctcgtctctcttttgagcctccgcttgctttggtcgatggtttccctcagctttttctttgctgttcttcatcctcgttgttgctgtcatcatgttcactgtggcttttacaatacagcctgtaaattccttatgacatagttcagtgcatttggctttattgcctgctccacagttctttacctttacttggcttagagaaactgtatctttgttgcttcatataacctttccccaaccccactaagctggacataacttattagtggtcctcccgtcactttatttgtagaaatctctctttcacatgagcaggggttctttcatgtggtttagctgacagcagaactagtgattctagacattttgcatggccctcattcagtggctcacaaacatgagggagcatcagaactacttgaggggcttgttaaaacccagtgcgttagaagtcggatgcggtggctcacacctgtaatcccagcactttgggaggcccaggcaggcggatcacttgaggttaggagttcaagaccagcctggccaacatggtgaaaccccgtctctactaaaaatacaaaagttagccgggtgtggtggtgcatgcctgtaatcccagcttcttgggaggccaaggcacaagaatcgcttgaaccaggagacggaggtttcagtgaatgaagatcgtgccattgtattccagcctcggcaacacagcaggactgtgattttctttggagactcctagattttctgtggttttgaactgaatttgttggatgttggcaagtgcctcttatgagctgtttctttatcctgcatttgccccacaaagacttatctggaggtgagcaaagtatgtttggtagtgaggtcacaaaggcaatcagccccttcctccccactcccattgccatcttctcagtccttctccctttctttccaagtagtttacccacccctcctctttcctcccctgtccctaaaataatccacgtgtcttcctaaaatctctctttgatcctgtcctttgataacaccgtcagtgcctactactgggtctagacagacctctgttgagcagtcagagtcttccctgactccacaatgcccctttccttggctgaccagtatgactactggtccccacctttcccttgcctatccctacctccctcctactaggttgtcccatccctctcttcacccattcattcatgaccatttttcactaccaagctccccccctcccgaaggaggctgaggtttttgtgactctctagactctattgtgggatggaatgaacattgctaaagaatcttgtgttcgctttactttaaaaaggtatttttttcctaattataaaactgatgtgtcagttacggaaaaattagaaatgcagcacaaatacatgaatattttaccacaaaattgccatataatatcttgtcttttttgggggtgtgaattttttgcattgttctggtcatattctttatcatgtaatttatgttcttttttactaagtattatgtgtggttattatagattttcacaaagatatattgctggtaatatattttattgtgtagtcttataatttacttaaccttctttcaattgttagaaatttaggctatttccagattttcagtattgtaaataatgctgtgatgaccaattttgtgaataaaatgtttttatgtatttcagattattcccttaggatagtctctcagtgccaagttgtcaaaaacatctctattttgcttatcttcctgctctcttgctgccttagggggtagtaaactgaaacataaagtaaacatgcatacaaataaaaaacataaaacaaaaataagcaacctgatggtaataggtgaaagtggtaacctgttttaactttgaattcttgccgggcgcggtggctcacgcctgtaatcccagcactttgggaggctgaggcgggtggatcacgaggtcaggagttcaaaaccagcctggccaagatggtgaaatcccgtctctactaaaaatacaaaaattagccgggcgtggtggcgggcgcctgtaatcccagctacttgggaggctgaggcagagaattgcttgaacccaggaggcggaggttgcagtgagccaagatcgcgccactgcactccagcctgggtgacagagcgagactccgtctcaaataaaaaacaacaaaaaacaaaaaaaacttaaaattctttgcttgttagtgaccttgatcatggttctctttgtacgatagttgggcatctgtatttccacttgtgtgaatttgcctttaaattttggttatgggtttcaccttttaaaataatcaaacatatttatcttttcctgtgtgataggtttttttctgtatcttttcctgttaaacacacagacccctccccaatctggacattgaataaatattcattttcctttgcattgtttggggtttggttttatgcttactgtgtctctccaccccattatcagagtaatatatgctcattgcataaaatctggaacatgtgaaaactggagatgaaaagaagcccagcatttgagacatacccactgctgacatttgtatatttcctttcattcttttacctgcctaaagacatatatgcagatatggacatatttagctttacatacatgcagactaccacatataatctatatcttgtttttttgatctaacacaatgttagcttggttttttatgtcattgacagttcttgattaacagctgtaatggctgcacagccctgcttcattaatttttttttttggactgaaatgtatgtaccacgttccgcttatccattcatccaccagtgaccacttgggtcatttctaccttttggccattgcaataatgttgctgtcaacaaggatgtacaaatatctgttcgagtccctgctcttaattgttttgggtatacacccaacctacattaatctttaatcacttaagatgttggggtttgtgctgggaggtaaccaagtgactctggagcagcctcaccctagctacagagggaaactgactcttccctctctgcccaatcttttgccgcctgtcaggttcccaagctgtccataccttactgtgtgaagcgctttgggtataaactcccaaatagaggctcagccccttttcctttcccaagtccatcctgcaggttatagctcttcagaggaatctcttgaattctggcctgggatctgggattaaagtagaacccagggtgtcccttggggccttaggcatagcccgttgtggtggaacctgccatcagccccactgcactcagtggtcccctggtacttcaggacagtttctctcttctgcacatgagaacttcaagcagagaggactgtcagttgttgccttcacatcaccaatcgtttggccataatggccaagagccctcactgctcttgggtcttgcctttccacatgttactgaaagctcccgttggtgtccctgtccactaactcacctgatgggacagatgccactttcctctgagtgtctgataaaacacagtctgttgtggggagcccacgctcaagggttttctttgggatcagagtttcccggctattactccatgccctgcctgacatcactgtcatgtatggtgctaatcaccaaaggatgcccttgtttgattctggattctaggtgatagtccttatcctctgatgggggaagagtttgggtgggagagaacaaaccgacaagttggttccagatgaggtggctgggagccaaccctcaggtacttggctctgagtaatgtgacggcccaggcaagagggctcccactgccaatgaggaacaaaagctcaaggtctagtagtgtattcagcacatgctaggaaacaagagttgggacgtggacaaggagaggagcaaaggccaggggttaactgcttttggtttttcctctataaaagtcagggactatgatttatatgggtgagaaggtttggagtaggactgaagctgccatttacaaaccccttgccctaatttattgtagttttgggtgtgtttctgaaagaaccttttgcaggtgatttttattcagtactcattaacttacagcttttatgaattcacatcttctacactattgaaaaacataagtttgtattgtgttaagtgcagcatgagttattatatgaataaatcacattaaatttgc

SEQ ID NO: 141885 - DNA, 1399 bp, Homo sapiens
  Payload ID: 7898
  Gene Symbol: IDS
  Gene Name: iduronate 2-sulfatase
  Uniprot ID: P22304
  ENST ID: ENST00000370441
  CDS Start-End: 211-1242
gccccggaggggagggacgcagggaagagtcgcacggacgcactcgcgctgcggccagcgcccgggcctgcgggcccgggcggcggctgtgttgcgcagtcttcatgggttcccgacgaggaggtctctgtggctgcggcggcggctgctaactgcgccacctgctgcagcctgtccccgccgctctgaagcggccgcgtcgaagccgaaatgccgccaccccggaccggccgaggccttctctggctgggtctggttctgagctccgtctgcgtcgccctcggatccgaaacgcaggccaactcgaccacagatgctctgaacgttcttctcatcatcgtggatgacctgcgcccctccctgggctgttatggggataagctggtgaggtccccaaatattgaccaactggcatcccacagcctcctcttccagaatgcctttgcgcagcaagcagtgtgcgccccgagccgcgtttctttcctcactggcaggagacctgacaccacccgcctgtacgacttcaactcctactggagggtgcacgctggaaacttctccaccatcccccagtacttcaaggagaatggctatgtgaccatgtcggtgggaaaagtctttcaccctgggatatcttctaaccataccgatgattctccgtatagctggtcttttccaccttatcatccttcctctgagaagtatgaaaacactaagacatgtcgagggccagatggagaactccatgccaacctgctttgccctgtggatgtgctggatgttcccgagggcaccttgcctgacaaacagagcactgagcaagccatacagttgttggaaaagatgaaaacgtcagccagtcctttcttcctggccgttgggtatcataagccacacatccccttcagataccccaaggaatttcagaagttgtatcccttggagaacatcaccctggcccccgatcccgaggtccctgatggcctaccccctgtggcctacaacccctggatggacatcaggcaacgggaagacgtccaagccttaaacatcagtgtgccgtatggtccaattcctgtggactttcagcggaaaatccgccagagctactttgcctctgtgtcatatttggatacacaggtcggccgcctcttgagtgctttggacgatcttcagctggccaacagcaccatcattgcatttacctcggatcatggtttcctcatgaggacaaatacctgattttgaataaagcagcattcagttgaaataaccctttctgtggtaattccaagtgaatatttttcttctaggtgatgagtttctacttcctctggtttttacaacaggaaatgaaatggtatctaaaataaacaagctgtggtatgatgattattca

SEQ ID NO: 141886 - DNA, 1213 bp, Homo sapiens
  Payload ID: 7898
  Gene Symbol: IDS
  Gene Name: iduronate 2-sulfatase
  ENST ID: ENST00000428056
  CDS Start-End: 144-683
ctgcgggcccgggcggcggctgtgttgcgcagtcttcatgggttcccgacgaggaggtctctgtggctgcggcggcggctgctaactgcgccacctgctgcagcctgtccccgccgctctgaagcggccgcgtcgaagccgaaatgccgccaccccggaccggccgaggccttctctggctgggtctggttctgagctccgtctgcgtcgccctcggatccgaaacgcaggccaactcgaccacagatgctctgaacgttcttctcatcatcgtggatgacctgcgcccctccctgggctgttatggggataagctggtgaggtccccaaatattgaccaactggcatcccacagcctcctcttccagaatgcctttgcgcagcaagcagtgtgcgccccgagccgcgtttctttcctcactggcaggagacctgacaccacccgcctgtacgacttcaactcctactggagggtgcacgctggaaacttctccaccatcccccagtacttcaaggagaatggctatgtgaccatgtcggtgggaaaagtctttcaccctggtactgctccatgtccagagtctgggttctcttggtttgtggtgtctgaatccagcattcccatcctggggatggggctgtctttgcagagccctcttctggctgggcgagtccctcgctagtcagtgcttcctttctaaaaaactgacttgtcaacccagccacgttttcacccaaagtgaaaaagggtagaaagagctttgcttcctttcagaaaccactgagggtgtgctgttgggtctttcagctcctcgggtggtagggaggacacaggctggggaggtggcagtgttgggtggagtccagctcagggccccaccctctcccctgcagggtacctgtcagtaaacctaggggtggggtgaggacacctgagggcctcccgtgtggccagcattgctgttgctgacttattgcccaatgagggggctgtgcttaggtaggggctgctatccactctggaaattaagtcagaaagatgagtgtaatctggtacccaggatctatagggtcccagagacggacattccttacctcaaatgctgcctgataaactggctctctttaatgccaatatggggatagtgaaaagcaaacaaactttaaaactttttatttatagaagtaatgcatgagtatttgagaaaaaaaa

SEQ ID NO: 141887 - DNA, 1529 bp, Homo sapiens
  Payload ID: 7898
  Gene Symbol: IDS
  Gene Name: iduronate 2-sulfatase
  Uniprot ID: P22304
  ENST ID: ENST00000466323
  CDS Start-End: 211-1149
gccccggaggggagggacgcagggaagagtcgcacggacgcactcgcgctgcggccagcgcccgggcctgcgggcccgggcggcggctgtgttgcgcagtcttcatgggttcccgacgaggaggtctctgtggctgcggcggcggctgctaactgcgccacctgctgcagcctgtccccgccgctctgaagcggccgcgtcgaagccgaaatgccgccaccccggaccggccgaggccttctctggctgggtctggttctgagctccgtctgcgtcgccctcggatccgaaacgcaggccaactcgaccacagatgctctgaacgttcttctcatcatcgtggatgacctgcgcccctccctgggctgttatggggataagctggtgaggtccccaaatattgaccaactggcatcccacagcctcctcttccagaatgcctttgcgcagcaagcagtgtgcgccccgagccgcgtttctttcctcactggcaggagacctgacaccacccgcctgtacgacttcaactcctactggagggtgcacgctggaaacttctccaccatcccccagtacttcaaggagaatggctatgtgaccatgtcggtgggaaaagtctttcaccctgggatatcttctaaccataccgatgattctccgtatagctggtcttttccaccttatcatccttcctctgagaagtatgaaaacactaagacatgtcgagggccagatggagaactccatgccaacctgctttgccctgtggatgtgctggatgttcccgagggcaccttgcctgacaaacagagcactgagcaagccatacagttgttggaaaagatgaaaacgtcagccagtcctttcttcctggccgttgggtatcataagccacacatccccttcagataccccaaggaatttcagaagttgtatcccttggagaacatcaccctggcccccgatcccgaggtccctgatggcctaccccctgtggcctacaacccctggatggacatcaggcaacgggaagacgtccaagccttaaacatcagtgtgccgtatggtccaattcctgtggactttcaggaggaccaaagttccacaggtttcagactgaagacttcatctaccagaaagtataagtaggccagggctcagcataatcctgctggaaggctagatgtatatcttttctcttgactgcaagtgagaacggcggaaaatccgccagagctactttgcctctgtgtcatatttggatacacaggtcggccgcctcttgagtgctttggacgatcttcagctggccaacagcaccatcattgcatttacctcggatcatggtttcctcatgaggacaaatacctgattttgaataaagcagcattcagttgaaataaccctttctgtggtaattccaagtgaatatttttcttctaggtgatgagtttctacttcctctggtttttacaacaggaaatgaaatggtatctaaaataaacaagctgtggtatgatgattattca

SEQ ID NO: 141888 - DNA, 959 bp, Homo sapiens
  Payload ID: 7898
  Gene Symbol: IDS
  Gene Name: iduronate 2-sulfatase
  ENST ID: ENST00000464251
  CDS Start-End: 1-321
aggtccccaaatattgaccaactggcatcccacagcctcctcttccagaatgcctttgcgcagcaagcagtgtgcgccccgagccgcgtttctttcctcactggcaggagacctgacaccacccgcctgtacgacttcaactcctactggagggtgcacgctggaaacttctccaccatcccccagtacttcaaggagaatggctatgtgaccatgtcggtgggaaaagtctttcaccctgcccttgtgggaacacatttttcagctgaatctttgttctcaagacctttttctgttagcattgggcctgcttcaagatgacagtagccaccactgtgtgccagggatatcttctaaccataccgatgattctccgtatagctggtcttttccaccttatcatccttcctctgagaagtatgaaaacactaagacatgtcgagggccagatggagaactccatgccaacctgctttgccctgtggatgtgctggatgttcccgagggcaccttgcctgacaaacagagcactgagcaagccatacagttgttggaaaagatgaaaacgtcagccagtcctttcttcctggccgttgggtatcataagccacacatccccttcagataccccaaggaatttcagaagttgtatcccttggagaacatcaccctggcccccgatcccgaggtccctgatggcctaccccctgtggcctacaacccctggatggacatcaggcaacgggaagacgtccaagccttaaacatcagtgtgccgtatggtccaattcctgtggactttcagcggaaaatccgccagagctactttgcctctgtgtcatatttggatacacaggtcggccgcctcttgagtgctttggacgatcttcagctggccaacagcaccatcattgcatttacctcggatcatggtttcctcatgaggacaaatacctgat

SEQ ID NO: 141889 - DNA, 572 bp, Homo sapiens
  Payload ID: 7898
  Gene Symbol: IDS
  Gene Name: iduronate 2-sulfatase
  ENST ID: ENST00000521702
  CDS Start-End: 314-572
agcattttatcatgtttgttggcgcttgtatgtcgtcttttgagaagcgtctgttcatgtcctttgcctggtttttaatggggttgtttttagcttgttgattttagttccttgtagattctggatattagacatttttggatgcatactttccttgacctcatgaggacgcccttcccaggacaggggggacatctgctgcttcccaaatgccacatttcttcaaataaaaagcagaagacagcatgcagtacataaggaactcatgtcttgcctgtccccgccgctctgaagcggccgcgtcgaagccgaaatgccgccaccccggaccggccgaggccttctctggctgggtctggttctgagctccgtctgcgtcgccctcggatccgaaacgcaggccaactcgaccacagatgctctgaacgttcttctcatcatcgtggatgacctgcgcccctccctgggctgttatggggataagctggtgaggtccccaaatattgaccaactggcatcccacagcctcctcttccagaatgcctttgcgcagcaagcagtgtgcgccccga

SEQ ID NO: 141890 - DNA, 2163 bp, Homo sapiens
  Payload ID: 7899
  Gene Symbol: IDUA
  Gene Name: iduronidase, alpha-L-
  Uniprot ID: P35475
  ENST ID: ENST00000247933
  CDS Start-End: 89-2050
gtcacatggggtgcgcgcccagactccgacccggaggcggaaccggcagtgcagcccgaagccccgcagtccccgagcacgcgtggccatgcgtcccctgcgcccccgcgccgcgctgctggcgctcctggcctcgctcctggccgcgcccccggtggccccggccgaggccccgcacctggtgcatgtggacgcggcccgcgcgctgtggcccctgcggcgcttctggaggagcacaggcttctgccccccgctgccacacagccaggctgaccagtacgtcctcagctgggaccagcagctcaacctcgcctatgtgggcgccgtccctcaccgcggcatcaagcaggtccggacccactggctgctggagcttgtcaccaccagggggtccactggacggggcctgagctacaacttcacccacctggacgggtacctggaccttctcagggagaaccagctcctcccagggtttgagctgatgggcagcgcctcgggccacttcactgactttgaggacaagcagcaggtgtttgagtggaaggacttggtctccagcctggccaggagatacatcggtaggtacggactggcgcatgtttccaagtggaacttcgagacgtggaatgagccagaccaccacgactttgacaacgtctccatgaccatgcaaggcttcctgaactactacgatgcctgctcggagggtctgcgcgccgccagccccgccctgcggctgggaggccccggcgactccttccacaccccaccgcgatccccgctgagctggggcctcctgcgccactgccacgacggtaccaacttcttcactggggaggcgggcgtgcggctggactacatctccctccacaggaagggtgcgcgcagctccatctccatcctggagcaggagaaggtcgtcgcgcagcagatccggcagctcttccccaagttcgcggacacccccatttacaacgacgaggcggacccgctggtgggctggtccctgccacagccgtggagggcggacgtgacctacgcggccatggtggtgaaggtcatcgcgcagcatcagaacctgctactggccaacaccacctccgccttcccctacgcgctcctgagcaacgacaatgccttcctgagctaccacccgcaccccttcgcgcagcgcacgctcaccgcgcgcttccaggtcaacaacacccgcccgccgcacgtgcagctgttgcgcaagccggtgctcacggccatggggctgctggcgctgctggatgaggagcagctctgggccgaagtgtcgcaggccgggaccgtcctggacagcaaccacacggtgggcgtcctggccagcgcccaccgcccccagggcccggccgacgcctggcgcgccgcggtgctgatctacgcgagcgacgacacccgcgcccaccccaaccgcagcgtcgcggtgaccctgcggctgcgcggggtgccccccggcccgggcctggtctacgtcacgcgctacctggacaacgggctctgcagccccgacggcgagtggcggcgcctgggccggcccgtcttccccacggcagagcagttccggcgcatgcgcgcggctgaggacccggtggccgcggcgccccgccccttacccgccggcggccgcctgaccctgcgccccgcgctgcggctgccgtcgcttttgctggtgcacgtgtgtgcgcgccccgagaagccgcccgggcaggtcacgcggctccgcgccctgcccctgacccaagggcagctggttctggtctggtcggatgaacacgtgggctccaagtgcctgtggacatacgagatccagttctctcaggacggtaaggcgtacaccccggtcagcaggaagccatcgaccttcaacctctttgtgttcagcccagacacaggtgctgtctctggctcctaccgagttcgagccctggactactgggcccgaccaggccccttctcggaccctgtgccgtacctggaggtccctgtgccaagagggcccccatccccgggcaatccatgagcctgtgctgagccccagtgggttgcacctccaccggcagtcagcgagctggggctgcactgtgcccatgctgccctcccatcaccccctttgcaatatatttttatatttta

SEQ ID NO: 141891 - DNA, 714 bp, Homo sapiens
  Payload ID: 7899
  Gene Symbol: IDUA
  Gene Name: iduronidase, alpha-L-
  ENST ID: ENST00000502910
  CDS Start-End: 42-714
agtgcagcccgaagccccgcagtccccgagcacgcgtggccatgcgtcccctgcgcccccgcgccgcgctgctggcgctcctggcctcgctcctggccgcgcccccggtggccccggccgaggccccgcacctggtgcatgtggacgcggcccgcgcgctgtggcccctgcggcgcttctggaggagcacaggcttctgggggtccactggacggggcctgagctacaacttcacccacctggacgggtacctggaccttctcagggagaaccagctcctcccagggtttgagctgatgggcagcgcctcgggccacttcactgactttgaggacaagcagcaggtgtttgagtggaaggacttggtctccagcctggccaggagatacatcggtaggtacggactggcgcatgtttccaagtggaacttcgagacgtggaatgagccagaccaccacgactttgacaacgtctccatgaccatgcaaggcttcctgaactactacgatgcctgctcggagggtctgcgcgccgccagccccgccctgcggctgggaggccccggcgactccttccacaccccaccgcgatccccgctgagctggggcctcctgcgccactgccacgacggtaccaacttcttcactggggaggcgggcgtgcggctggactacatctccctccacaggaagggtgcgcgcagctccatctcca

SEQ ID NO: 141892 - DNA, 697 bp, Homo sapiens
  Payload ID: 7899
  Gene Symbol: IDUA
  Gene Name: iduronidase, alpha-L-
  ENST ID: ENST00000514192
  CDS Start-End: 1-697
ctcgcccacccagggccggggattggtgctgggccttctcctggcagcgcgggccccagccccctgcccggtatggatggacgctgggccctgctggatccagaatccatcgtgagggggtccactggacggggcctgagctacaacttcacccacctggacgggtacctggaccttctcagggagaaccagctcctcccagggtttgagctgatgggcagcgcctcgggccacttcactgactttgaggacaagcagcaggtgtttgagtggaaggacttggtctccagcctggccaggagatacatcggtaggtacggactggcgcatgtttccaagtggaacttcgagacgtggaatgagccagaccaccacgactttgacaacgtctccatgaccatgcaaggcttcctgaactactacgatgcctgctcggagggtctgcgcgccgccagccccgccctgcggctgggaggccccggcgactccttccacaccccaccgcgatccccgctgagctggggcctcctgcgccactgccacgacggtaccaacttcttcactggggaggcgggcgtgcggctggactacatctccctccacaggaagggtgcgcgcagctccatctccatcctggagcaggagaaggtcgtcgcgcagcagatccggcagctcttccccaagttcgcggacaccc

SEQ ID NO: 141893 - DNA, 796 bp, Homo sapiens
  Payload ID: 7899
  Gene Symbol: IDUA
  Gene Name: iduronidase, alpha-L-
  ENST ID: ENST00000509948
  CDS Start-End: 268-796
cgcgggccccagccccctgcccggtatggatggacgctgggccctgctggatccagaatccatcgtgaggtgagatgggattacgacaccaagcccatgccatggggtgtgctgaggccagcagtgctgaggggcggcgtggcggcaccctgtccaggctcagctccggcctattggctctgcggttcctggctgaaaaccaccctgtagcctcctgaagctcacctccccaacggggcaggaacaggctgggctgccaccacgcacatgtgcctaccgtcagaatgtcacagtcactggacacaggtgcaggcaagcctgagtccagctgctccgtgtccacctccctggctccccagggggtccactggacggggcctgagctacaacttcacccacctggacgggtacctggaccttctcagggagaaccagctcctcccagggtttgagctgatgggcagcgcctcgggccacttcactgactttgaggacaagcagcaggtgtttgagtggaaggacttggtctccagcctggccaggagatacatcggtaggtacggactggcgcatgtttccaagtggaacttcgagacgtggaatgagccagaccaccacgactttgacaacgtctccatgaccatgcaaggcttcctgaactactacgatgcctgctcggagggtctgcgcgccgccagccccgccctgcggctgggaggccccggcgactccttccacaccccaccgcgatccccgctgagctggggcctcctgcgccactgccacgacggtacca

SEQ ID NO: 141894 - DNA, 586 bp, Homo sapiens
  Payload ID: 7899
  Gene Symbol: IDUA
  Gene Name: iduronidase, alpha-L-
  ENST ID: ENST00000504568
  CDS Start-End: 1-586
gcgtcccctgcgcccccgcgccgcgctgctggcgctcctggcctcgctcctggccgcgcccccggtggccccggccgaggccccgcacctggtgcatgtggacgcggcccgcgcgctgtggcccctgcggcgcttctggaggagcacaggcttctgccccccgctgccacacagccaggctgaccagtacgtcctcagctgggaccagcagctcaacctcgcctatgtgggcgccgtccctcaccgcggcatcaagcagggggtccactggacggggcctgagctacaacttcacccacctggacgggtacctggaccttctcagggagaaccagctcctcccagggtttgagctgatgggcagcgcctcgggccacttcactgactttgaggacaagcagcaggtgtttgagtggaaggacttggtctccagcctggccaggagatacatcggtaggtacggactggcgcatgtttccaagtggaacttcgagacgtggaatgagccagaccaccacgactttgacaacgtctccatgaccatgcaaggcttcctgaactactacgatgcctgctcggagggtct

SEQ ID NO: 141895 - DNA, 2130 bp, Homo sapiens
  Payload ID: 7899
  Gene Symbol: IDUA
  Gene Name: iduronidase, alpha-L-
  ENST ID: ENST00000514224
  CDS Start-End: 453-2018
agcccatctgcaagtgcagtggcagggcggcccccttctcccttgaggacgcctgtcccctcgtaatgcaggcctcgtgggaattcagcccatctgcaagtgcagtggcagggcggcccccttctcccttgaggacgcctgtcccctcgtaatgcaggcctcgtgggaattcagcccatctgcaagtgcagtggcagggcggcccccttctcccttgaggacgcctgtcccctcggaatgcaggcctcgtgggaattcagccccatctgcaagtgcagtggcagggcggcccccttctcccttgacgacgcctgtcccctcggaatgcaggcctcgtgggaattcagccccatcgggggtccactggacggggcctgagctacaacttcacccacctggacgggtacctggaccttctcagggagaaccagctcctcccagggtttgagctgatgggcagcgcctcgggccacttcactgactttgaggacaagcagcaggtgtttgagtggaaggacttggtctccagcctggccaggagatacatcggtaggtacggactggcgcatgtttccaagtggaacttcgagacgtggaatgagccagaccaccacgactttgacaacgtctccatgaccatgcaaggcttcctgaactactacgatgcctgctcggagggtctgcgcgccgccagccccgccctgcggctgggaggccccggcgactccttccacaccccaccgcgatccccgctgagctggggcctcctgcgccactgccacgacggtaccaacttcttcactggggaggcgggcgtgcggctggactacatctccctccacaggaagggtgcgcgcagctccatctccatcctggagcaggagaaggtcgtcgcgcagcagatccggcagctcttccccaagttcgcggacacccccatttacaacgacgaggcggacccgctggtgggctggtccctgccacagccgtggagggcggacgtgacctacgcggccatggtggtgaaggtcatcgcgcagcatcagaacctgctactggccaacaccacctccgccttcccctacgcgctcctgagcaacgacaatgccttcctgagctaccacccgcaccccttcgcgcagcgcacgctcaccgcgcgcttccaggtcaacaacacccgcccgccgcacgtgcagctgttgcgcaagccggtgctcacggccatggggctgctggcgctgctggatgaggagcagctctgggccgaagtgtcgcaggccgggaccgtcctggacagcaaccacacggtgggcgtcctggccagcgcccaccgcccccagggcccggccgacgcctggcgcgccgcggtgctgatctacgcgagcgacgacacccgcgcccaccccaaccgcagcgtcgcggtgaccctgcggctgcgcggggtgccccccggcccgggcctggtctacgtcacgcgctacctggacaacgggctctgcagccccgacggcgagtggcggcgcctgggccggcccgtcttccccacggcagagcagttccggcgcatgcgcgcggctgaggacccggtggccgcggcgccccgccccttacccgccggcggccgcctgaccctgcgccccgcgctgcggctgccgtcgcttttgctggtgcacgtgtgtgcgcgccccgagaagccgcccgggcaggtcacgcggctccgcgccctgcccctgacccaagggcagctggttctggtctggtcggatgaacacgtgggctccaagtgcctgtggacatacgagatccagttctctcaggacggtaaggcgtacaccccggtcagcaggaagccatcgaccttcaacctctttgtgttcagcccagacacaggtgctgtctctggctcctaccgagttcgagccctggactactgggcccgaccaggccccttctcggaccctgtgccgtacctggaggtccctgtgccaagagggcccccatccccgggcaatccatgagcctgtgctgagccccagtgggttgcacctccaccggcagtcagcgagctggggctgcactgtgcccatgctgccctcccatcaccccctttgcaatatatttttatatttt

SEQ ID NO: 141896 - DNA, 3458 bp, Homo sapiens
  Payload ID: 7900
  Gene Symbol: IGIP
  Gene Name: IgA-inducing protein
  Uniprot ID: A6NJ69
  ENST ID: ENST00000333305
  CDS Start-End: 2543-2704
gggaaagatttttgagtctacaactgacaaaatgtcttcttcaaattaaaaaaaattgagaagcagcactttaagtctaactctacaccattttattgcatgtattagttttattaatgatttttggtgcatgcctttgggcttattcaaaagtgtacaataggaaagtatatttcctttcttagaaaggagatgttttctactttgcaacatgtgattacaaaaatcttcctctgtgggaagattaaccatgtattgaactactgaaaagtatatatttttagatatacagaaggaatctacatggagcagcattcagacctatatagaagtcatagcattctgtataggaccaaaaaggaaataacattaaacacttaaacagacgttgttgggtagaaatacctttagatcttgcatttacttccaaaaagaaaaaatgccacagaagtttgctgaaaacttttgtcgtttgaattttctctgtcagtgtatttagcccaaatacaacagctttgggttagcacacacataagaatcaaaaaaacaaagctcactaaataaatcagtctggtttgccaatccagcttgactgaaataagtaaaccaatcacttgcaacatgaaaaactgtccaactcctctaaggttctgacaaaataaccttggctgatgtgggaagactcccactttgattactgacctgacagtgaagattcatgcttgacatgatttcagacttgacaatgtctgtttaaggagctatggtacagtttgctaattcaatcccagatacctgttgattacctgtgagatctagagtccaaagtagccagcagccatatccctgagtgctctgtgcccatcagatatcttaaagtaagcagggttgggacaggtcacagcttggatgattgacctcaggtgccgtagacagccccagattcaagaattgtatctgctttcttggcagtcgtcactgaactaatgtcccatactgtgttacttactgtagatgctctcttttagaggaggcccagagcacacatcctaatcgctagcggtactcagagagggggtgctaactctgatgccctggccaaattccagtttagggatgtgggtcttcttcttgtcattctaattggaaatgtgcatcacttcccatttttcttactgatctcagtgcaaactacactagtctgtttctttgccctggtctcaagtctctaagacgctggtgtgtattatgtgggctaagttcatgtgttatcctaaggcacaagagttgaggaatgggtgagcttggtgtcagagcactgtgtggttggagggtggactcttgtgatgctgtggggatgaaattggccctcttttagcataagttggggagtgtgcactggctggaggcttccagaggcttccagccatgaggtgtgagctgaaaccaatttttcctctttccttatagcatgttgagaaaatctgttgggttttcagcagtcagggaaggccggagttctgctttaatctgggtaactgaggctaatatgagcaagactttggttaattaactgggttctcagatgccacagactccgtgagaagtcaccattattttcaatggttgtgatagaatttcccccagtagccattattttaagattatattgcagagttgctttattttgagctttttgtgtatacacaatcccaaactggaagaaattttaaaaaaaggaatcctgctgtgaaaggtatatattactctagatttttcttactgtaaatattgtaagattgtaatactgtcgatattttattaaccaacaaatgttaatctatgtgaaatcagacttattttaaatgtgcttcttatttactgtgtgtggtccctgttgctgacagtattaagttatattctgatgtaagattaactttattaaagaatgtaaacattaatgtttccttatgggaaaacaaataaagtataaagaagacaattcttttcattgaaatatactgtgtatttacacttgctagacccagcaccacttataaatttagtacactgttcagaattttagttaacacagctgacatggttgtgctctgtttgaaagtctaagaataggtattgttggaatatacagtttgtatttgtctgctgtgaatcataatcttgaaatttctaatcaagtttgtaaaatttttatagtgaaacattttaatgacaatttaaaaatttatcttctctaaagaatggtcaaaacaatatcctttcagaaatagaattgttctttaatatctttccaaaatgactttggttaaatggaccagatgtatattagttaaaatttaggactaagttgttgatattctttgagtttacaagttaatccttattggagatgtgccaatatacagttagaatatcattaatttgcactgtttggggaccccatttaagaatgctgaattttgccaactaagaagtaagcaaatgcaatttaaaaagtaaatttgagcattctgtattaaatatgtgcagttattatcacatgaagaaacgcagtgtgtcgggctgtaatattaccatatttgctgtcatgttctcccatctcagtgctgggaaatcaccatgtggaaaccaagcaaacgtgttgtgcatcagccggcttgagtttgttcaatatcaaagctgaaaactagcgaggtctgctgtactgcttattgaagtattgtgattattttaggcattgattcttacaaaatatatactgtaacagtatactttgtacagatttaaattttatttgaaaaaatgaaataaagtaggcaaaaaaataaagatgtttatttttcatgtgactgtataatcagatcagtcttttgtttcagtgctttttgggggaaggggtctggttgcgatcttggattttttttttttttgataggtggaaactttttaggactcagtagcaggtatacttatgcttatgaattggctgcaagcattaagtgtgctctcatactagagaactctatcttctattttattttaaggtaggtttgcttatttttaaaaatgttatgtgaatggcctccctatcctggcatactgggtcatttaaaaaattctctggtggtatgacagtgaacctagccatcatgttgaagagaagggaaaccttttcccaaagatcatgctccattctcatggaaggttttttgttttctgtcagttacaataaaaaaaatgtaattatcatggatacatactagttatacatacttatggggtacatgtaacattttgaaacaagcgtacaatgtactgattaaatcaggatgattggggtatccatcacctgaagtatgtataatttcttcgttttaggaacattctaattccactcttagttatttgaaatatataataaattatttttaatagtt

SEQ ID NO: 141897 - DNA, 769 bp, Homo sapiens
  Payload ID: 7901
  Gene Symbol: IGFL1
  Gene Name: IGF-like family member 1
  Uniprot ID: Q6UW32
  ENST ID: ENST00000437936
  CDS Start-End: 24-356
ctccactgcaaccacccagagccatggctccccgaggctgcatcgtagctgtctttgccattttctgcatctccaggctcctctgctcacacggagccccagtggcccccatgactccttacctgatgctgtgccagccacacaagagatgtggggacaagttctacgaccccctgcagcactgttgctatgatgatgccgtcgtgcccttggccaggacccagacgtgtggaaactgcaccttcagagtctgctttgagcagtgctgcccctggaccttcatggtgaagctgataaaccagaactgcgactcagcccggacctcggatgacaggctttgtcgcagtgtcagctaatggaacatcaggggaacgatgactcctggattctccttcctgggtgggcctggagaaagaggctggtgttacctgagatctgggatgctgagtggctgtttgggggccagagaaacacacactcaactgcccacttcattctgtgacctgtctgaggcccaccctgcagctgccctgaggaggcccacaggtccccttctagaattctggacagcatgagatgcgtgtgctgatgggggcccagggactctgaaccctcctgatgacccctatggccaacatcaacccggcaccaccccaaggctggctggggaacccttcacccttctgtgagattttccatcatctcaagttctcttctatccaggagcaaagcacaggatcataataaatttatgtactttataaatgaa

SEQ ID NO: 141898 - DNA, 607 bp, Homo sapiens
  Payload ID: 7902
  Gene Symbol: IGFL2
  Gene Name: IGF-like family member 2
  Uniprot ID: Q6UWQ7
  ENST ID: ENST00000377693
  CDS Start-End: 37-396
gcactgctgctgtcccatcagctgctctgaagctccatggtgcccagaatcttcgctcctgcttatgtgtcagtctgtctcctcctcttgtgtccaagggaagtcatcgctcccgctggctcagaaccatggctgtgccagccggcacccaggtgtggagacaagatctacaaccccttggagcagtgctgttacaatgacgccatcgtgtccctgagcgagacccgccaatgtggtcccccctgcaccttctggccctgctttgagctctgctgtcttgattcctttggcctcacaaacgattttgttgtgaagctgaaggttcagggtgtgaattcccagtgccactcatctcccatctccagtaaatgtgaaagcagaagacgttttccctgagaagacatagaaagaaaatcaactttcactaaggcatctcagaaacataggctaaggtaatatgtgtaccagtagagaagcctgaggaatttacaaaatgatgcagctccaagccattgtatggcccatgtgggagactgatgggacatggagaatgacagtagattatcaggaaataaataaagtggtttttccaatgtacacacctgta

SEQ ID NO: 141899 - DNA, 885 bp, Homo sapiens
  Payload ID: 7902
  Gene Symbol: IGFL2
  Gene Name: IGF-like family member 2
  Uniprot ID: Q6UWQ7
  ENST ID: ENST00000434646
  CDS Start-End: 292-684
tttgggtttggacgggtgcgtttgtttctcatagtgcaggtctggagccggactgagatggggagtagagggaccccttgaaacttcagggtggatgaatatgaagtttcatcaccagctgtgatgtttgatattggactgtggttgtgccagttgacactcaggagtggagactagatctgcaatctgttgggactgtgatgaggggatcatcctgccctcgaaccagacccagccctgtagcccaggcactattgcctggagttcctgggctctcagcgccaggaaatcatgaggttcagtgtctcaggcatgaggaccgactaccccaggagtgtgctggctcctgcttatgtgtcagtctgtctcctcctcttgtgtccaagggaagtcatcgctcccgctggctcagaaccatggctgtgccagccggcacccaggtgtggagacaagatctacaaccccttggagcagtgctgttacaatgacgccatcgtgtccctgagcgagacccgccaatgtggtcccccctgcaccttctggccctgctttgagctctgctgtcttgattcctttggcctcacaaacgattttgttgtgaagctgaaggttcagggtgtgaattcccagtgccactcatctcccatctccagtaaatgtgaaagcagaagacgttttccctgagaagacatagaaagaaaatcaactttcactaaggcatctcagaaacataggctaaggtaatatgtgtaccagtagagaagcctgaggaatttacaaaatgatgcagctccaagccattgtatggcccatgtgggagactgatgggacatggagaatgacagtagattatcaggaaataaataaagtggtttttccaatgta

SEQ ID NO: 141900 - DNA, 455 bp, Homo sapiens
  Payload ID: 7902
  Gene Symbol: IGFL2
  Gene Name: IGF-like family member 2
  ENST ID: ENST00000601052
  CDS Start-End: 1-255
cagccggcacccaggtgtggagacaagatctacaaccccttggagcagtgctgttacaatgacgccatcgtgtccctgagcgagacccgccaatgtggtcccccctgcaccttctggccctgctttgagctctgctgtcttgattcctttggcctcacaaacgattttgttgtgaagctgaaggttcagggtgtgaattcccagtgccactcatctcccatctccagtaaatgtgaaagaagacgttttccctgagaagacatagaaagaaaatcaactttcactaaggcatctcagaaacataggctaaggtaatatgtgtaccagtagagaagcctgaggaatttacaaaatgatgcagctccaagccattgtatggcccatgtgggagactgatgggacatggagaatgacagtagattatcaggaaataaataaagtggtttttccaatgt

SEQ ID NO: 141901 - DNA, 662 bp, Homo sapiens
  Payload ID: 7903
  Gene Symbol: IGFL3
  Gene Name: IGF-like family member 3
  Uniprot ID: Q6UXB1
  ENST ID: ENST00000341415
  CDS Start-End: 26-403
attctcctagagcatctttggaagcatgaggccacgatgctgcatcttggctcttgtctgctggataacagtcttcctcctccagtgttcaaaaggaactacagacgctcctgttggctcaggactgtggctgtgccagccgacacccaggtgtgggaacaagatctacaacccttcagagcagtgctgttatgatgatgccatcttatccttaaaggagacccgccgctgtggctccacctgcaccttctggccctgctttgagctctgctgtcccgagtcttttggcccccagcagaagtttcttgtgaagttgagggttctgggtatgaagtctcagtgtcacttatctcccatctcccggagctgtaccaggaacaggaggcacgtcctgtacccataaaaaccccaggctccactggcagacggcagacaaggggagaagagacgaagcagctggacatcggagactacagttgaacttcggagagaagcaacttgacttcagagggatggctcaatgacatagctttggagaggagcccagctggggatggccagacttcaggggaagaatgccttcctgcttcatcccctttccagctccccttcccgctgagagccactttcatcggcaataaaatcccccacatttaccatct

SEQ ID NO: 141902 - DNA, 573 bp, Homo sapiens
  Payload ID: 7904
  Gene Symbol: IGFL4
  Gene Name: IGF-like family member 4
  Uniprot ID: Q6B9Z1
  ENST ID: ENST00000377697
  CDS Start-End: 55-429
tcactgacccatttccactgctgctccctcgtccgctgctctgaagcctaacccatggtgcccagaatttctgctgccatcttcatttttgaacttttgggttcaaactcagaaggagtcacagatcttagactgtggctatgccagccagcgcccaggtgcggggagtggacctacaaccccttggagcagtgctgtgatgacggtgtcatcctagacttgaaccagacccggctctgcggctccagctgcaccttctggccctgcttccagcactgctgcctggagtctttgggctctcagaaccagacagttgtgaggttcaaggtcccaggcatgaagccagattgcaagtcctcccctatcaccaggatctgtgcccaggaataccacccaaaaagccctgtgtcaagatctgacctcatctagactgttctggggtagcagagtcacagatcactctagaatctaatacttggtaattatactgcattgattttgttgttgttgtgacagagtttcactctgtcccccaggctggagtgcaaataagcaacttcagcaaagtctcag

SEQ ID NO: 141903 - DNA, 667 bp, Homo sapiens
  Payload ID: 7904
  Gene Symbol: IGFL4
  Gene Name: IGF-like family member 4
  ENST ID: ENST00000601672
  CDS Start-End: 507-599
aacttcgtggtggatgatgcctgtaactacccagatgaaatcaagacgcaacagccctcatcgagggatgctcagagtcaaggaaacttttcttttgagctactgacagcttaactcctgtgaacaaaatttggagcatatttgtttctctctgcctgatttctccaaaatttggaaactatttctctttttgcctaactcttcccaagaaaccactccttctgcacacctccctaaatggcgctgccatcttcatttttgaacttttgggttcaaactcagaaggagtcacagatcttagactgtggctatgccagccagcgcccaggtgcggggagtggacctacaaccccttggagcagtgctgtgatgacggtgtcatcctagacttgaaccagacccggctctgcggctccagctgcaccttctggccctgcttccagcactgctgcctggagtctttgggctctcagaaccagacagttgtgaggttcaaggtcccaggcatgaagccagattgcaagtcctcccctatcaccaggatctgtgcccaggaataccacccaaaaagccctgtgtcaagatctgacctcatctagactgttctggggtagcagagtcacagatcactctagaatctaatacttggtaattatactgcattgat

SEQ ID NO: 141904 - DNA, 1645 bp, Homo sapiens
  Payload ID: 7905
  Gene Symbol: IGFLR1
  Gene Name: IGF-like family receptor 1
  Uniprot ID: Q9H665
  ENST ID: ENST00000246532
  CDS Start-End: 99-1166
cacaacttcagctgaggaacttggcacggccagcttgggacccaggaccctaacgcagaggcgctgtgtttggaagtcccgctatcacggccccccagatggggcctggacgatgcctcctgacggccttgttgcttctggccctggcgccaccgccggaagcctcccagtactgcggccgccttgaatactggaacccagacaacaagtgctgcagcagctgcctgcaacgcttcgggccgcccccctgcccggactatgagttccgggaaaactgcggactcaatgaccacggcgatttcgtaacgcccccgttccgaaagtgttcttctgggcagtgcaaccccgacggcgcggagctatgtagcccctgcggcggcggagccgtgacccctactcccgccgcgggcgggggcagaaccccgtggcgctgcagagagaggccggtccctgccaaggggcactgccccctcacacctggaaacccaggcgcccctagctcccaggagcgcagctcaccagcaagttccattgcctggaggacccctgagcctgtccctcagcaggcctggccgaatttccttccgctcgtggtgctggtcctgctcctgaccttggcggtgatagcgatcctcctgtttattctgctctggcatctctgctggcccaaggagaaagccgacccctatccctatcctggcttggtctgcggagtccccaacacccacaccccttcctcctcgcatctgtcctccccaggcgccctggagacaggggacacatggaaggaggcctcactacttccactcctgagcagggaactgtccagtctggcgtcacaacccctgtctcgcctcctggatgagctggaggtgctggaagagctgattgtactgctggaccctgagcctgggccaggtgggggtatggcccatggcactactcgacacctggccgcaagatatgggctgcctgctgcctggtccacctttgcctattcgctgaggccgagtcgctcgccgctgcgggctctgattgagatggtggtggcaagggagccctctgcctccctgggccagcttggcacacacctcgcccagctagggcgggcagatgcattgcgggtgctgtccaagcttggctcatctggggtttgctgggcttaacacccaataaagaactttgctgactactaagcccagtatacaattagcactgaagtacttcttgaagtacaatcctaattgggcaaagacccaacagatagcctcactgctcttcgccctagaagggcctattccaacatacacacagggccacatgtgggagggctgaccccaggtgcctctgggccaccagaatcccctctgggaaacaaccctgctacagacagttgctgtgttgtgttgttctgaagccgtaacagaccccatgactgacttctaattctgaatgatggcctcacctacctgttgaggctgatgaacttccttgggtcatgatgggtgggtgtgtagaagtggggttcctacctgcccccacagcctacaaatgggaagaccacctctccaaacattgacagactttattgtgggggggttcccacctgggaccccacctcttaaataaaaaagtgcatagaaaa

SEQ ID NO: 141905 - DNA, 730 bp, Homo sapiens
  Payload ID: 7905
  Gene Symbol: IGFLR1
  Gene Name: IGF-like family receptor 1
  ENST ID: ENST00000588992
  CDS Start-End: 102-665
ggccacaacttcagctgaggaacttggcacggccagcttgggacccaggaccctaacgcagaggcgctgtgtttggaagtcccgctatcacggccccccagatggggcctggacgatgcctcctgacggccttgttgcttctggccctggcgccaccgccggaagcctcccagtactgcggccgccttgaatactggaacccagacaacaagtgctgcagcagctgcctgcaacgcttcgggccgcccccctgcccgggcgccctggagacaggggacacatggaaggaggcctcactacttccactcctgagcagggaactgtccagtctggcgtcacaacccctgtctcgcctcctggatgagctggaggtgctggaagagctgattgtactgctggaccctgagcctgggccaggtgggggtatggcccatggcactactcgacacctggccgcaagatatgggctgcctgctgcctggtccacctttgcctattcgctgaggccgagtcgctcgccgctgcgggctctgattgagatggtggtggcaagggagccctctgcctccctgggccagcttggcacacacctcgcccagctagggcgggcagatgcattgcgggtgctgtccaagcttggctcatctggggtttgctgggcttaacacccaataaagaactttgctgactactaagcccagtatacaattagcactgaagtacttcttga

SEQ ID NO: 141906 - DNA, 1195 bp, Homo sapiens
  Payload ID: 7905
  Gene Symbol: IGFLR1
  Gene Name: IGF-like family receptor 1
  Uniprot ID: Q9H665
  ENST ID: ENST00000592537
  CDS Start-End: 102-1169
aacttcagctgaggaacttggcacggccagcttgggacccaggaccctaacggtactgcagaggcgctgtgtttggaagtcccgctatcacggccccccagatggggcctggacgatgcctcctgacggccttgttgcttctggccctggcgccaccgccggaagcctcccagtactgcggccgccttgaatactggaacccagacaacaagtgctgcagcagctgcctgcaacgcttcgggccgcccccctgcccggactatgagttccgggaaaactgcggactcaatgaccacggcgatttcgtaacgcccccgttccgaaagtgttcttctgggcagtgcaaccccgacggcgcggagctatgtagcccctgcggcggcggagccgtgacccctactcccgccgcgggcgggggcagaaccccgtggcgctgcagagagaggccggtccctgccaaggggcactgccccctcacacctggaaacccaggcgcccctagctcccaggagcgcagctcaccagcaagttccattgcctggaggacccctgagcctgtccctcagcaggcctggccgaatttccttccgctcgtggtgctggtcctgctcctgaccttggcggtgatagcgatcctcctgtttattctgctctggcatctctgctggcccaaggagaaagccgacccctatccctatcctggcttggtctgcggagtccccaacacccacaccccttcctcctcgcatctgtcctccccaggcgccctggagacaggggacacatggaaggaggcctcactacttccactcctgagcagggaactgtccagtctggcgtcacaacccctgtctcgcctcctggatgagctggaggtgctggaagagctgattgtactgctggaccctgagcctgggccaggtgggggtatggcccatggcactactcgacacctggccgcaagatatgggctgcctgctgcctggtccacctttgcctattcgctgaggccgagtcgctcgccgctgcgggctctgattgagatggtggtggcaagggagccctctgcctccctgggccagcttggcacacacctcgcccagctagggcgggcagatgcattgcgggtgctgtccaagcttggctcatctggggtttgctgggcttaacacccaataaagaactttgctgacta

SEQ ID NO: 141907 - DNA, 782 bp, Homo sapiens
  Payload ID: 7905
  Gene Symbol: IGFLR1
  Gene Name: IGF-like family receptor 1
  Uniprot ID: Q9H665
  ENST ID: ENST00000592889
  CDS Start-End: 156-659
gttgggggatgagggctcgggggtagattcccggcttccgaagaggcgtgagaattctgttcccccacatcaccgcgtcctttcttctgcccgatttccccggaaagtgtagcagaggcgctgtgtttggaagtcccgctatcacggccccccagatggggcctggacgatgcctcctgacggccttgttgcttctggccctggcgccaccgccggaagcctcccagtactgcggccgccttgaatactggaacccagacaacaagtgctgcagcagctgcctgcaacgcttcgggccgcccccctgcccggaactgtccagtctggcgtcacaacccctgtctcgcctcctggatgagctggaggtgctggaagagctgattgtactgctggaccctgagcctgggccaggtgggggtatggcccatggcactactcgacacctggccgcaagatatgggctgcctgctgcctggtccacctttgcctattcgctgaggccgagtcgctcgccgctgcgggctctgattgagatggtggtggcaagggagccctctgcctccctgggccagcttggcacacacctcgcccagctagggcgggcagatgcattgcgggtgctgtccaagcttggctcatctggggtttgctgggcttaacacccaataaagaactttgctgactactaagcccagtatacaattagcactgaagtacttcttgaagtacaatcctaattgggcaaagacccaacagatagcctcactgctcttcgccctaga

SEQ ID NO: 141908 - DNA, 200 bp, Homo sapiens
  Payload ID: 7905
  Gene Symbol: IGFLR1
  Gene Name: IGF-like family receptor 1
  ENST ID: ENST00000586140
  CDS Start-End: 153-200
ctgtcttggcctcccaaagtgttgggattacaggcatgagccaccacacccagcccctgctttacttctaatgacggttctaattctccacaataaccctatgagacagcagaggcgctgtgtttggaagtcccgctatcacggccccccagatggggcctggacgatgcctcctgacggccttgttgcttctggccctg

SEQ ID NO: 141909 - DNA, 1148 bp, Homo sapiens
  Payload ID: 7905
  Gene Symbol: IGFLR1
  Gene Name: IGF-like family receptor 1
  ENST ID: ENST00000588018
  CDS Start-End: 60-458
acccaggaccctaacgcagaggcgctgtgtttggaagtcccgctatcacggccccccagatggggcctggacgatgcctcctgacggccttgttgcttctggccctggcgccaccgccggaagcctcccagtactgcggccgccttgaatactggaacccagacaacaagtgctgcagcagctgcctgcaacgcttcgggccgcccccctgcccggactatgagttccgggaaaactgcggactcaatgaccacggcgatttcgtaacgcccccgttccgaaagtgttcttctgggcagtgcaaccccgacggcgcggagctatgtagcccctgcggcggcggagccgtgacccctactcccgccgcgggcgggggcagaaccccgtggcgctgcagagaggccggtccctgccaaggggcactgccccctcacacctggaaacccaggcgcccctagctcccaggagcgcagctcaccagcaagttccattgcctggaggacccctgagcctgtccctcagcaggcctggccgaatttccttccgctcgtggtgctggtcctgctcctgaccttggcggtgatagcgatcctcctgtttattctgctctggcatctctgctggcccaaggagaaagccgacccctatccctatcctggcttggtctgcggagtccccaacacccacaccccttcctcctcgcatctgtcctccccaggcgccctggagacaggggacacatggaaggaggcctcactacttccactcctgagcagggaactgtccagtctggcgtcacaacccctgtctcgcctcctggatgagctggaggtgctggaagagctgattgtactgctggaccctgagcctgggccaggtgggggtatggcccatggcactactcgacacctggccgcaagatatgggctgcctgctgcctggtccacctttgcctattcgctgaggccgagtcgctcgccgctgcgggctctgattgagatggtggtggcaagggagccctctgcctccctgggccagcttggcacacacctcgcccagctagggcgggcagatgcattgcgggtgctgtccaagcttggctcatctggggtttgctgggcttaacacccaataaagaactttgctga

SEQ ID NO: 141910 - DNA, 581 bp, Homo sapiens
  Payload ID: 7905
  Gene Symbol: IGFLR1
  Gene Name: IGF-like family receptor 1
  ENST ID: ENST00000591277
  CDS Start-End: 168-581
ataaccggctcagttgggggatgagggctcgggggtagattcccggcttccgaagaggcgtgagaattctgttcccccacatcaccgcgtcctttcttctgcccgatttccccggaaagtgtagcagaggcgctgtgtttggaagtcccgctatcacggccccccagatggggcctggacgatgcctcctgacggccttgttgcttctggccctggcgccaccgccggaagcctcccagtactgcggccgccttgaatactggaacccagacaacaagtgctgcagcagctgcctgcaacgcttcgggccgcccccctgcccggactatgagttccgggaaaactgcggactcaatgaccacggcgatttcgtaacgcccccgttccgaaagtgttcttctgggcagtgcaaccccgacggcgcggagctatgtagcccctgcggcggcggagccgtgacccctactcccgccgcgggcgggggcagaaccccgtggcgctgcagagagaggccggtccctgccaaggggcactgccccctcacacctggaaacccaggcgcccctagctcccaggagcgc

SEQ ID NO: 141911 - DNA, 593 bp, Homo sapiens
  Payload ID: 7905
  Gene Symbol: IGFLR1
  Gene Name: IGF-like family receptor 1
  ENST ID: ENST00000592693
  CDS Start-End: 1-182
gcggccgccttgaatactggaacccagacaacaagtgctgcagcagctgcctgcaacgcttcgggccgcccccctgcccgggtgagaatccgagaccgagccttgcttgggcggagcttgcagaggccggtccctgccaaggggcactgccccctcacacctggaaacccaggcgcccctagctcccaggagcgcagctcaccagcaagttccattgcctggaggacccctgagcctgtccctcagcaggcctggccgaatttccttccgctcgtggtgctggtcctgctcctgaccttggcggtgatagcgatcctcctgtttattctgctctggcatctctgctggcccaaggagaaagccgacccctatccctatcctggcttggtctgcggagtccccaacacccacaccccttcctcctcgcatctgtcctccccaggcgccctggagacaggggacacatggaaggaggcctcactacttccactcctgagcagggaactgtccagtctggcgtcacaacccctgtctcgcctcctggatgagctggaggtgctggaagagctgattgtactgctggaccctgagcc

SEQ ID NO: 141912 - DNA, 329 bp, Homo sapiens
  Payload ID: 7905
  Gene Symbol: IGFLR1
  Gene Name: IGF-like family receptor 1
  ENST ID: ENST00000591748
  CDS Start-End: 1-224
aaaactgcggactcaatgaccacggcgatttcgtaacgcccccgttccgaaagtgttcttctgggcagtgcaaccccgacggcgcggagctatgtagcccctgcggcggcggagccgtgacccctactcccgccgcgggcgggggcagaaccccgtggcgctgcagagaggcgccctggagacaggggacacatggaaggaggcctcactacttccactcctgagcagggaactgtccagtctggcgtcacaacccctgtctcgcctcctggatgagctggaggtgctggaagagctgattgtactgctggaccctgagcctgggccag

SEQ ID NO: 141913 - DNA, 434 bp, Homo sapiens
  Payload ID: 7906
  Gene Symbol:
  Gene Name: IGHV2-70
  ENST ID: ENST00000390634
  CDS Start-End: 77-434
atctccaccagctccaccctcccctgggttcaaaagacgaggacagggcctcgctcagtgaatcctgctctccaccatggacatactttgttccacgctcctgctactgactgtcccgtcctgggtcttatcccaggtcaccttgaaggagtctggtcctgcgctggtgaaacccacacagaccctcacactgacctgcaccttctctgggttctcactcagcactagtggaatgcgtgtgagctggatccgtcagcccccagggaaggccctggagtggcttgcacgcattgattgggatgatgataaattctacagcacatctctgaagaccaggctcaccatctccaaggacacctccaaaaaccaggtggtccttacaatgaccaacatggaccctgtggacacagccacgtattactgtgcacggatac

SEQ ID NO: 141914 - DNA, 434 bp, Homo sapiens; identical to SEQ ID NO: 141913
  Payload ID: 7906
  Gene Symbol:
  Gene Name: IGHV2-70
  ENST ID: ENST00000632005
  CDS Start-End: 77-434

SEQ ID NO: 141915 - DNA, 2606 bp, Homo sapiens
  Payload ID: 7907
  Gene Symbol: IGLON5
  Gene Name: IgLON family member 5
  Uniprot ID: A6NGN9
  ENST ID: ENST00000270642
  CDS Start-End: 1-1011
atgcccccccctgcgcccggggcccggctccggcttctcgccgccgccgccctggccggcttggccgtcatcagccgagggctgctctcccagagcctggagttcaactctcctgccgacaactacacagtgtgtgaaggtgacaacgccaccctcagctgcttcatcgacgagcacgtgacccgcgtggcctggctgaaccgctccaacatcctgtatgccggcaatgaccgctggaccagcgacccgcgggtgcggctgctcatcaacacccccgaggagttctccatcctcatcaccgaggtggggctcggcgacgagggcctctacacctgctccttccagacccgccaccagccgtacaccactcaggtctacctcattgtccacgtccctgcccgcattgtgaacatctcgtcgcctgtgacggtgaatgaggggggcaatgtgaacctgctttgcctggccgtggggcggccagagcccacggtcacctggagacagctccgagacggcttcacctcggagggagagatcctggagatctctgacatccagcggggccaggccggggagtatgagtgcgtgactcacaacggggttaactcggcgcccgacagccgccgcgtgctggtcacagtcaactatcctccgaccatcacggacgtgaccagcgcccgcaccgcgctgggccgggccgccctcctgcgctgcgaagccatggcggttccccccgcggatttccagtggtacaaggatgacagactgctgagcagcggcacggccgaaggcctgaaggtgcagacggagcgcacccgctcgatgcttctctttgccaacgtgagcgcccggcattacggcaactatacgtgtcgcgccgccaaccgactgggagcgtccagcgcctccatgcggctcctgcgcccaggatccctggagaactcagccccgaggcccccagggctcctggccctcctctccgccctgggctggctgtggtggagaatgtaggcgcaacccagtggagctcacctccccctgcagggggcctcaggccaagagtgagagaaacgggggagcaagagccgtgggtctcgtgggggcagaagagctctcggccaccaaggaagaagagagaggagaagaggaggaggcagaggaagaaagatcttcagagaacccatcactgtgagggataacgcaaaattatgcatctttctacagccattctcgccacccgttcacgtttccgattgtgacccactcccgccaccccatacccctctctcttagctcaggctgtcaactggcttgtgtgggtgtgggtgtgtgagtgtgagcctgcatgcatgtgtaggtgtctgtgtctctgtttgtgtgtgtgtgggggggtgggctgggggaagggactcagccgtcctcccgcccccaaaacccccatgtccactgtccccaaccctattgcctctcacctctggctggaggtaggtatgaggctctgcagtggaagctgtgaagagaggcttaccaggctccctgcttccccaatatatgcacgcacactacccctccccctgtcgaaagggcaactcctggcaggttgggagtggggaggggcatcgcactcacctgtcaagctgtcattcagcctttgtgagtaagtgggggacctccatctaggctctgggcttccctgctgtcaaccaccagcttcctgtagccagaggccccatcgctggctcagtggcctgagaccttcccacttttcctgtccctccacaccctggattttctggccccctcctgggccaatcggtgcttccatccaactgtcagactggtggcaggagtcacctgtctgtttcagtgctttgccctacccttgccaccactccccttggccttgatttccccacctgcggcaccagccagctgcccttggggcctttgcagctggcccacaggtgtgagcttgctggtctatcacttcctggcctctccaccaactgtacctcccaaaggctacctgaccgccctcacagacactcagacgcaccacacacacatacacacacacagacacacacacacacacacacacacacaccagcgactgtgaccagcaatagccccctggctccagctgtccggtagctggtgactagctgtatttccccctgggtaggcatctggtgtcaggaagggacgctgagaggccgcagcctcagctctgactgtaggaacactccaccctggtacaccacaccacacaaagtgggggacagagaggcatcacacagacatcctgagcccagacaaagatgccatgtcaccaactccgactcccaggagaccctctatataaacacccaccccaaaccacaccacccagagtctggtggagaaaaggagagggcaaggcgcagtgactgtacctcagacgggggcatgggccccatcccacattgtcttccattcccagggtccaggggatggggtgggacaggggagggatgctagggagggggtggggggccctgggggccatgtgttccaattcatggggagtgttgagaccaccacaccaataaacgcctttttccaaa

SEQ ID NO: 141916 - DNA, 1962 bp, Homo sapiens
  Payload ID: 7908
  Gene Symbol: IK
  Gene Name: IK cytokine, down-regulator of HLA II
  Uniprot ID: Q13123
  ENST ID: ENST00000417647
  CDS Start-End: 140-1813
gggaaaaacaggaagcggaaaggctgcgaacgcaaagcagtgtgggttgattctgaggtgcactgtgggaaagagcttgtcgctgcggtgttgctgttggagactcgattgttggtgacagcgaaagaacgataacaaaatgccggagcgagatagtgagccgttctccaaccctttggcccccgatggccacgatgtggatgatcctcactccttccaccaatcaaaactcaccaatgaagacttcaggaaacttctcatgacccccagggctgcacctacctctgcaccaccttctaagtcacgtcaccatgagatgccaagggagtacaatgaggatgaagacccagctgcacgaaggaggaaaaagaaaagttattatgccaagctacgccaacaagaaattgagagagagagagagctagcagagaagtaccgggatcgtgccaaggaacggagagatggagtgaacaaagattatgaagaaaccgagcttatcagcaccacagctaactatagggctgttggccccactgctgaggcggacaaatcagctgcagagaagagaagacagttgatccaggagtccaaattcttgggtggtgacatggaacacacccatttggtgaaaggcttggattttgctctgcttcaaaaggtacgagctgagattgccagcaaagagaaagaggaagaggaactgatggaaaagccccagaaagaaaccaagaaagatgaggatcctgaaaataaaattgaatttaaaacacgtctgggccgcaatgtttaccgaatgctttttaagagcaaagcatatgagcggaatgagttgttcctgccgggccgcatggcctatgtggtagacctggatgatgagtatgctgacacagatatccccaccactcttatccgcagcaaggctgattgccccaccatggaggcccagaccacactgaccacaaatgacattgtcattagcaagctgacccagatcctttcatacctgaggcagggaacccgtaacaagaagcttaagaagaaggataaagggaagctggaagagaagaaacctcctgaggctgacatgaatatttttgaagacattggggattacgtaccctccacaaccaagacacctcgggacaaggagcgggagagatatcgggaacgggagcgtgatcgggaaagagacagagaccgtgaccgagagcgagagcgagaacgagatcgggaacgagagcgagagcgggaccgagagagagaagaggaaaagaagagacacagctactttgagaagccaaaagtagatgatgagcccatggacgttgacaaaggacctgggtctaccaaggagttgatcaagtccatcaatgaaaagtttgctgggtctgctggctgggaaggcacagaatcgctgaagaagccagaagacaaaaagcagctgggagatttctttggcatgtccaacagttatgcagagtgctacccagccacgatggatgacatggctgtggatagtgatgaggaggtggattatagcaaaatggaccagggtaacaagaaggggcccttaggccgttgggactttgatacccaggaagaatacagcgagtatatgaacaacaaagaagctttgcccaaggctgcattccagtatggtatcaaaatgtctgaagggcggaaaaccaggcgcttcaaggaaaccaatgacaaagcagagcttgatcgccagtggaagaagattagtgcaatcattgagaagaggaagaagatggaagctgatggggttgaagtcaaaagaccaaaatactaatcactagttacaaccagagatgctccacaaggatatgctccccactgttttctttctacaatttccaaaggttgcaagatgtttttttgtggatgaatataaaattttattgtgtaattacttggttccattaaaattggttaacttgc

SEQ ID NO: 141917 - DNA, 540 bp, Homo sapiens
  Payload ID: 7908
  Gene Symbol: IK
  Gene Name: IK cytokine, down-regulator of HLA II
  ENST ID: ENST00000503332
  CDS Start-End: 81-302
gcactgtgggaaagagcttgtcgctgcggtgttgctgttggagactcgattgttggtgacagcgaaagaacgataacaaaatgccggagcgagatagtgagccgttctccaaccctttggcccccgatggccacgatgtggatgatcctcactccttccaccagctggaatgcagtggtgcgatctcggctcaccacaacctccgcctcccgggttcaagcaattctcctgcctcagccttccgagtagctgggattacagatcaaaactcaccaatgaagacttcaggaaacttctcatgacccccagggctgcacctacctctgcaccaccttctaagtcacgtcaccatgagatgccaagggagtacaatgaggatgaagacccagctgcacgaaggaggaaaaagaaaagttattatgccaagctacgccaacaagaaattgagagagagagagagctagcagagaagtaccgggatcgtgccaaggaacggagagatggagtgaacaaagattatgaagaaaccgagcttatcag

SEQ ID NO: 141918 - DNA, 868 bp, Homo sapiens
  Payload ID: 7908
  Gene Symbol: IK
  Gene Name: IK cytokine, down-regulator of HLA II
  ENST ID: ENST00000508301
  CDS Start-End: 68-868
gagcttgtcgctgcggtgttgctgttggagactcgattgttggtgacagcgaaagaacgataacaaaatgccggagcgagatagtgagccgttctccaaccctttggcccccgatggccacgatgtggatgatcctcactccttccaccaatcaaaactcaccaatgaagacttcaggaaacttctcatgacccccagggctgcacctacctctgcaccaccttctaagtcacgtcaccatgagatgccaagggagtacaatgaggatgaagacccagctgcacgaaggaggaaaaagaaaagttattatgccaagctacgccaacaagaaattgagagagagagagagctagcagagaagtaccgggatcgtgccaaggaacggagagatggagtgaacaaagattatgaagaaaccgagcttatcagcaccacagctaactatagggctgttggccccactgctgaggcggacaaatcagctgcagagaagagaagacagttgatccaggagtccaaattcttgggtggtgacatggaacacacccatttggtgaaaggcttggattttgctctgcttcaaaaggtacgagctgagattgccagcaaagagaaagaggaagaggaactgatggaaaagccccagaaagaaaccaagaaagatgaggatcctgaaaataaaattgaatttaaaacacgtctgggccgcaatgtttaccgaatgctttttaagagcaaagcatatgagcggaatgagttgttcctgccgggccgcatggcctatgtggtagacctggatgatgagtatgctgacacagatatccccaccactcttatccgcagcaaggctgattgccccaccatggag

SEQ ID NO: 141919 - DNA, 489 bp, Homo sapiens
  Payload ID: 7908
  Gene Symbol: IK
  Gene Name: IK cytokine, down-regulator of HLA II
  ENST ID: ENST00000507593
  CDS Start-End: 68-489
gagcttgtcgctgcggtgttgctgttggagactcgattgttggtgacagcgaaagaacgataacaaaatgccggagcgagatagtgagccgttctccaaccctttggcccccgatggccacgatgtggatgatcctcactccttccaccaatcaaaactcaccaatgaagacttcaggaaacttctcatgacccccagggctgcacctacctctgcaccaccttctaagtcacgtcaccatgatgaatttctcgtctcttctaggatgccaagggagtacaatgaggatgaagacccagctgcacgaaggaggaaaaagaaaagttattatgccaagctacgccaacaagaaattgagagagagagagagctagcagagaagtaccgggatcgtgccaaggaacggagagatggagtgaacaaagattatgaagaaaccgagcttatcagcaccacagctaactatagggctgttggccccactgctga

SEQ ID NO: 141920 - DNA, 569 bp, Homo sapiens
  Payload ID: 7908
  Gene Symbol: IK
  Gene Name: IK cytokine, down-regulator of HLA II
  ENST ID: ENST00000513256
  CDS Start-End: 249-569
atacttatgttgcccggaatacaacgcatcatataaccctgcgaatataaatttcttcatggaaacaagatcaacagcaaggctaaagtccgagttctagtttctccacgggtttctgcacgaccttgggcggtcccttctcttctcaaacccttgttcccctaccggagccccagacccctggcgtcccgcactcaccgtagcgggcccagagcttgggctgcacatcggagcattcgcggattaggatgggtgagccgttctccaaccctttggcccccgatggccacgatgtggatgatcctcactccttccaccaatcaaaactcaccaatgaagacttcaggaaacttctcatgacccccagggctgcacctacctctgcaccaccttctaagtcacgtcaccatgagatgccaagggagtacaatgaggatgaagacccagctgcacgaaggaggaaaaagaaaagttattatgccaagctacgccaacaagaaattgagagagagagagagctagcagagaagtaccgggatcgtgccaaggaacggagagatggagtgaac

SEQ ID NO: 141921 - DNA, 690 bp, Homo sapiens
  Payload ID: 7908
  Gene Symbol: IK
  Gene Name: IK cytokine, down-regulator of HLA II
  ENST ID: ENST00000502899
  CDS Start-End: 54-690
gtgaggccgacagctccaaactccgtccccagtcctcactcctactccaagtgatgatgggcggcttttgtgagccgttctccaaccctttggcccccgatggccacgatgtggatgatcctcactccttccaccaatcaaaactcaccaatgaagacttcaggaaacttctcatgacccccagggctgcacctacctctgcaccaccttctaagtcacgtcaccatgagatgccaagggagtacaatgaggatgaagacccagctgcacgaaggaggaaaaagaaaagttattatgccaagctacgccaacaagaaattgagagagagagagagctagcagagaagtaccgggatcgtgccaaggaacggagagatggagtgaacaaagattatgaagaaaccgagcttatcagcaccacagctaactatagggctgttggccccactgctgaggcggacaaatcagctgcagagaagagaagacagttgatccaggagtccaaattcttgggtggtgacatggaacacacccatttggtgaaaggcttggattttgctctgcttcaaaaggtacgagctgagattgccagcaaagagaaagaggaagaggaactgatggaaaagccccagaaagaaaccaagaaagatgaggatcctgaaaataaaattgaatttaaaacacgtctgg

SEQ ID NO: 141922 - DNA, 1857 bp, Homo sapiens
  Payload ID: 7908
  Gene Symbol: IK
  Gene Name: IK cytokine, down-regulator of HLA II
  ENST ID: ENST00000620556
  CDS Start-End: 35-757
cgattgttggtgacagcgaaagaacgataacaaaatgccggagcgagatagtgagccgttctccaaccctttggcccccgatggccacgatgtggatgatcctcactccttccaccaatcaaaactcaccaatgaagacttcaggaaacttctcatgacccccagggctgcacctacctctgcaccaccttctaagtcacgtcaccatgagatgccaagggagtacaatgaggatgaagacccagctgcacgaaggaggaaaaagaaaagttattatgccaagctacgccaacaagaaattgagagagagagagagctagcagagaagtaccgggatcgtgccaaggaacggagagatggagtgaacaaagattatgaagaaaccgagcttatcagcaccacagctaactatagggctgttggccccactgctgaggcggacaaatcagctgcagagaagagaagacagttgatccaggagtccaaattcttgggtggtgacatggaacacacccatttggtgaaaggcttggattttgctctgcttcaaaaggtacgagctgagattgccagcaaagagaaagaggaagaggaactgatggaaaagccccagaaagaaaccaagaaagatgaggatcctgaaaataaaattgaatttaaaacacgtctgggccgcaatgtttaccgaatgctttttaagagcaaagcatatgagcggaatgagttgttcctgccgggccgcatggccatgtggtagacctggatgatgagtatgctgacacagatatccccaccactcttatccgcagcaaggctgattgccccaccatggaggcccagaccacactgaccacaaatgacattgtcattagcaagctgacccagatcctttcatacctgaggcagggaacccgtaacaagaagcttaagaagaaggataaagggaagctggaagagaagaaacctcctgaggctgacatgaatatttttgaagacattggggattacgtaccctccacaaccaagacacctcgggacaaggagcgggagagatatcgggaacgggagcgtgatcgggaaagagacagagaccgtgaccgagagcgagagcgagaacgagatcgggaacgagagcgagagcgggaccgagagagagaagaggaaaagaagagacacagctactttgagaagccaaaagtagatgatgagcccatggacgttgacaaaggacctgggtctaccaaggagttgatcaagtccatcaatgaaaagtttgctgggtctgctggctgggaaggcacagaatcgctgaagaagccagaagacaaaaagcagctgggagatttctttggcatgtccaacagttatgcagagtgctacccagccacgatggatgacatggctgtggatagtgatgaggaggtggattatagcaaaatggaccagggtaacaagaaggggcccttaggccgttgggactttgatacccaggaagaatacagcgagtatatgaacaacaaagaagctttgcccaaggctgcattccagtatggtatcaaaatgtctgaagggcggaaaaccaggcgcttcaaggaaaccaatgacaaagcagagcttgatcgccagtggaagaagattagtgcaatcattgagaagaggaagaagatggaagctgatggggttgaagtcaaaagaccaaaatactaatcactagttacaaccagagatgctccacaaggatatgctccccactgttttctttctacaatttccaaaggttgcaagatgtttttttgtggatgaatataaaattttattgtgtaattacttggttccattaaaattggttaacttgct

SEQ ID NO: 141923 - DNA, 737 bp, Homo sapiens
  Payload ID: 7908
  Gene Symbol: IK
  Gene Name: IK cytokine, down-regulator of HLA II
  ENST ID: ENST00000610522
  CDS Start-End: 37-525
gggaagctggaagagaagaaacctcctgaggctgacatgaatatttttgaagacattggggattacgtaccctccacaaccaagacacctcgggacaaggagcgggagagatatcgggaacgggagcgtgatcgggaaagagacagagaccgtgaccgagagcgagagcgagaacgagatcgggaacgagagcgagagcgggaccgagagagagaagaggaaaagaagagacacagctactttgagaagccaaaagtagatgatgagcccatggacgttgacaaaggacctgggtctaccaaggagttgatcaagtccatcaatgaaaagtttgctgggtctgctggctgggaaggcacagaatcgctgaagaagccagaagacaaaaagcagctgggagatttctttggcatgtccaacagttatgcagagtgctacccagccacgatggatgacatggctgtggatagtgatgaggaggtggattatagcaaaatggaccagggtaacaagaagggcccttaggccgttgggactttgatacccaggaagaatacagcgagtatatgaacaacaaagaagctttgcccaaggctgcattccagtatggtatcaaaatgtctgaagggcggaaaaccaggcgcttcaaggaaaccaatgacaaagcagagcttgatcgccagtggaagaagattagtgcaatcattgagaagaggaagaagatggaagctgatggg

SEQ ID NO: 141924 - DNA, 6189 bp, Homo sapiens
  Payload ID: 7909
  Gene Symbol: IKZF1
  Gene Name: IKAROS family zinc finger 1 (Ikaros)
  Uniprot ID: Q13422
  ENST ID: ENST00000331340
  CDS Start-End: 156-1715
cgcggcgcatcccagcctgggcgggacgctcggccgcggcgaggcgggcaagcctggcagggcagagggagccccggctccgaggttgctcttcgcacccgaggatcagtcttggccccaaagcgcgacgcacaaatccacataacctgaggaccatggatgctgatgagggtcaagacatgtcccaagtttcagggaaggaaagcccccctgtaagcgatactccagatgagggcgatgagcccatgccgatccccgaggacctctccaccacctcgggaggacagcaaagctccaagagtgacagagtcgtggccagtaatgttaaagtagagactcagagtgatgaagagaatgggcgtgcctgtgaaatgaatggggaagaatgtgcggaggatttacgaatgcttgatgcctcgggagagaaaatgaatggctcccacagggaccaaggcagctcggctttgtcgggagttggaggcattcgacttcctaacggaaaactaaagtgtgatatctgtgggatcatttgcatcgggcccaatgtgctcatggttcacaaaagaagccacactggagaacggcccttccagtgcaatcagtgcggggcctcattcacccagaagggcaacctgctccggcacatcaagctgcattccggggagaagcccttcaaatgccacctctgcaactacgcctgccgccggagggacgccctcactggccacctgaggacgcactccgttggtaaacctcacaaatgtggatattgtggccgaagctataaacagcgaagctctttagaggaacataaagagcgctgccacaactacttggaaagcatgggccttccgggcacactgtacccagtcattaaagaagaaactaatcacagtgaaatggcagaagacctgtgcaagataggatcagagagatctctcgtgctggacagactagcaagtaacgtcgccaaacgtaagagctctatgcctcagaaatttcttggggacaagggcctgtccgacacgccctacgacagcagcgccagctacgagaaggagaacgaaatgatgaagtcccacgtgatggaccaagccatcaacaacgccatcaactacctgggggccgagtccctgcgcccgctggtgcagacgcccccgggcggttccgaggtggtcccggtcatcagcccgatgtaccagctgcacaagccgctcgcggagggcaccccgcgctccaaccactcggcccaggacagcgccgtggagaacctgctgctgctctccaaggccaagttggtgccctcggagcgcgaggcgtccccgagcaacagctgccaagactccacggacaccgagagcaacaacgaggagcagcgcagcggtctcatctacctgaccaaccacatcgccccgcacgcgcgcaacgggctgtcgctcaaggaggagcaccgcgcctacgacctgctgcgcgccgcctccgagaactcgcaggacgcgctccgcgtggtcagcaccagcggggagcagatgaaggtgtacaagtgcgaacactgccgggtgctcttcctggatcacgtcatgtacaccatccacatgggctgccacggcttccgtgatccttttgagtgcaacatgtgcggctaccacagccaggaccggtacgagttctcgtcgcacataacgcgaggggagcaccgcttccacatgagctaaagccctcccgcgcccccaccccagaccccgagccaccccaggaaaagcacaaggactgccgccttctcgctcccgccagcagcatagactggactggaccagacaatgttgtgtttggatttgtaactgttttttgttttttgtttgagttggttgattggggtttgatttgcttttgaaaagatttttatttttagaggcagggctgcattgggagcatccagaactgctaccttcctagatgtttccccagaccgctggctgagattccctcacctgtcgcttcctagaatccccttctccaaacgattagtctaaattttcagagagaaatagataaaacacgccacagcctgggaaggagcgtgctctaccctgtgctaagcacggggttcgcgcaccaggtgtctttttccagtccccagaagcagagagcacagcccctgctgtgtgggtctgcaggtgagcagacaggacaggtgtgccgccacccaagtgccaagacacagcagggccaacaacctgtgcccaggccagcttcgagctacatgcatctagggcggagaggctgcacttgtgagagaaaatactatttcaagtcatattctgcgtaggaaaatgaattggttggggaaagtcgtgtctgtcagactgccctgggtggagggagacgccgggctagagcctttgggatcgtcctggattcactggctttgcggaggctgctcagatggcctgagcctcccgaggcttgctgccccgtaggaggagactgtcttcccgtgggcatatctggggagccctgttccccgctttttcactcccatacctttaatggcccccaaaatctgtcactacaatttaaacaccagtcccgaaatttggatcttctttctttttgaatctctcaaacggcaacattcctcagaaaccaaagctttatttcaaatctcttccttccctggctggttccatctagtaccagaggcctcttttcctgaagaaatccaatcctagccctcattttaattatgtacatctgtttgtagccacaagcctgaatttctcagtgttggtaagtttctttacctaccctcactatatattattctcgttttaaaacccataaaggagtgatttagaacagtcattaattttcaactcaatgaaatatgtgaagcccagcatctctgttgctaacacacagagctcacctgtttgaaaccaagctttcaaacatgttgaagctctttactgtaaaggcaagccagcatgtgtgtccacacatacataggatggctggctctgcacctgtaggatattggaatgcacagggcaattgagggactgagccagaccttcggagagtaatgccaccagatcccctaggaaagaggaggcaaatggcactgcaggtgagaaccccgcccatccgtgctatgacatggaggcactgaagcccgaggaaggtgtgtggagattctaatcccaacaagcaagggtctccttcaagattaatgctatcaatcattaaggtcattactctcaaccacctaggcaatgaagaatataccatttcaaatatttacagtacttgtcttcaccaacactgtcccaaggtgaaatgaagcaacagagaggaaattgtacataagtacctcagcatttaatccaaacaggggttcttagtctcagcactatgacattttgggctgactacttatttgttaggcgggagctctcctgtgcattgtaggataattagcagtatccctggtggctacccaatagacgccagtagcaccccgaattgacaacccaaactctccagacatcaccaactgtcccctgcgaggagaaatcactcctgggggagaaccactgacccaaatgaattctaaaccaatcaaatgtctgggaagccctccaagaaaaaaaatagaaaagcacttgaagaatattcccaatattcccggtcagcagtatcaaggctgacttgtgttcatgtggagtcattataaattctataaatcaattattccccttcggtcttaaaaatatatttcctcataaacatttgagttttgttgaaaagatggagtttacaaagataccattcttgagtcatggatttctctgctcacagaagggtgtggcatttggaaacgggaataaacaaaattgctgcaccaatgcactgagtgaaggaagagagacagaggatcaagggctttagacagcactccttcaatatgcaatcacagagaaagatgcgccttatccaagttaatatctctaaggtgagagccttcttagagtcagtttgttgcaaatttcacctactctgttcttttccatccatccccctgagtcagttggttgaagggagttattttttcaagtggaattcaaacaaagctcaaaccagaactgtaaatagtgattgcaggaattcttttctaaactgctttgccctttcctctcactgccttttatagccaatataaatgtctctttgcacaccttttgttgtggttttatattgtaacaccatttttctttgaaactattgtatttaaagtaaggtttcatattatgtcagcaagtaattaacttatgtttaaaaggtggccatatcatgtaccaaaagttgctgaagtttctcttctagctggtaaagtaggagtttgcatgacttcacactttttttgcgtagtttcttctgttgtatgatggcgtgagtgtgtgtcttgggtaccgctgtgtactactgtgtgcctagattccatgcactctcgttgtgtttgaagtaaatattggagaccggagggtaacaggttggcctgttgattacagctagtaatcgctgtgtcttgttccgccccctccctgacaccccagcttcccaggatgtggaaagcctggatctcagctccttgccccatatcccttctgtaatttgtacctaaagagtgtgattatcctaattcaagagtcactaaaactcatcacattatcattgcatatcagcaaagggtaaagtcctagcaccaattgcttcacataccagcatgttccatttccaatttagaattagccacataataaaatcttagaatcttccttgagaaagagctgcctgagatgtagttttgttatatggttccccaccgaccatttttgtgcttttttcttgttttgttttgttttgactgcactgtgagttttgtagtgtcctcttcttgccaaaacaaacgcgagatgaactggacttatgtagacaaatcgtgatgccagtgtatccttcctttcttcagttccagcaataatgaatggtcaacttttttaaaatctagatctctctcattcatttcaatgtatttttactttaagatgaaccaaaattattagacttatttaagatgtacaggcatcagaaaaaagaagcacataatgcttttggtgcgatggcactcactgtgaacatgtgtaaccacatattaatatgcaatattgtttccaatactttctaatacagttttttataatgttgtgtgtggtgattgttcaggtcgaatctgttgtatccagtacagctttaggtcttcagctgcccttctggcgagtacatgcacaggattgtaaatgagaaatgcagtcatatttccagtctgcctctatgatgatgttaaattattgctgtttagctgtgaacaagggatgtaccactggaggaatagagtatccttttgtacacattttgaaatgcttcttctgtagtgatagaacaaataaatgcaacgaatactctgtctgccctatcccgtgaagtccacactggcgtaagagaaggcccagcagagcaggaatctgcctagactttctcccaatgagatcccaatatgagagggagaagagatgggcctcaggacagctgcaataccacttgggaacacatgtggtgtcttgatgtggccagcgcagcagttcagcacaacgtacctcccatctacaacagtgctggacgtgggaattctaagtcccagtcttgagggtgggtggagatggagggcaacaagagatacatttccagttctccactgcagcatgcttcagtcattctgtgagtggccgggcccagggccctcacaatttcactaccttgtcttttacatagtcataagaattatcctcaacatagccttttgacgctgtaaatcttgagtattcatttacccttttctgatctcctggaaacagctgcctgcctgcattgcacttctcttcccgaggagtggggtaaatttaaaagtcaagttatagtttggatgttagtatagaattttgaaattgggaattaaaaatcaggactggggactgggagaccaaaaatttctgatcccatttctgatggatgtgtcacaccttttctgtcaaaataaaatgtcttggaggttatgactccttggtgaaa

SEQ ID NO: 141925 - DNA, 5376 bp, Homo sapiens
  Payload ID: 7909
  Gene Symbol: IKZF1
  Gene Name: IKAROS family zinc finger 1 (Ikaros)
  ENST ID: ENST00000346667
  CDS Start-End: 156-905
cgcggcgcatcccagcctgggcgggacgctcggccgcggcgaggcgggcaagcctggcagggcagagggagccccggctccgaggttgctcttcgcacccgaggatcagtcttggccccaaagcgcgacgcacaaatccacataacctgaggaccatggatgctgatgagggtcaagacatgtcccaagtttcaggggacaagggcctgtccgacacgccctacgacagcagcgccagctacgagaaggagaacgaaatgatgaagtcccacgtgatggaccaagccatcaacaacgccatcaactacctgggggccgagtccctgcgcccgctggtgcagacgcccccgggcggttccgaggtggtcccggtcatcagcccgatgtaccagctgcacaagccgctcgcggagggcaccccgcgctccaaccactcggcccaggacagcgccgtggagaacctgctgctgctctccaaggccaagttggtgccctcggagcgcgaggcgtccccgagcaacagctgccaagactccacggacaccgagagcaacaacgaggagcagcgcagcggtctcatctacctgaccaaccacatcgccccgcacgcgcgcaacgggctgtcgctcaaggaggagcaccgcgcctacgacctgctgcgcgccgcctccgagaactcgcaggacgcgctccgcgtggtcagcaccagcggggagcagatgaaggtgtacaagtgcgaacactgccgggtgctcttcctggatcacgtcatgtacaccatccacatgggctgccacggcttccgtgatccttttgagtgcaacatgtgcggctaccacagccaggaccggtacgagttctcgtcgcacataacgcgaggggagcaccgcttccacatgagctaaagccctcccgcgcccccaccccagaccccgagccaccccaggaaaagcacaaggactgccgccttctcgctcccgccagcagcatagactggactggaccagacaatgttgtgtttggatttgtaactgttttttgttttttgtttgagttggttgattggggtttgatttgcttttgaaaagatttttatttttagaggcagggctgcattgggagcatccagaactgctaccttcctagatgtttccccagaccgctggctgagattccctcacctgtcgcttcctagaatccccttctccaaacgattagtctaaattttcagagagaaatagataaaacacgccacagcctgggaaggagcgtgctctaccctgtgctaagcacggggttcgcgcaccaggtgtctttttccagtccccagaagcagagagcacagcccctgctgtgtgggtctgcaggtgagcagacaggacaggtgtgccgccacccaagtgccaagacacagcagggccaacaacctgtgcccaggccagcttcgagctacatgcatctagggcggagaggctgcacttgtgagagaaaatactatttcaagtcatattctgcgtaggaaaatgaattggttggggaaagtcgtgtctgtcagactgccctgggtggagggagacgccgggctagagcctttgggatcgtcctggattcactggctttgcggaggctgctcagatggcctgagcctcccgaggcttgctgccccgtaggaggagactgtcttcccgtgggcatatctggggagccctgttccccgctttttcactcccatacctttaatggcccccaaaatctgtcactacaatttaaacaccagtcccgaaatttggatcttctttctttttgaatctctcaaacggcaacattcctcagaaaccaaagctttatttcaaatctcttccttccctggctggttccatctagtaccagaggcctcttttcctgaagaaatccaatcctagccctcattttaattatgtacatctgtttgtagccacaagcctgaatttctcagtgttggtaagtttctttacctaccctcactatatattattctcgttttaaaacccataaaggagtgatttagaacagtcattaattttcaactcaatgaaatatgtgaagcccagcatctctgttgctaacacacagagctcacctgtttgaaaccaagctttcaaacatgttgaagctctttactgtaaaggcaagccagcatgtgtgtccacacatacataggatggctggctctgcacctgtaggatattggaatgcacagggcaattgagggactgagccagaccttcggagagtaatgccaccagatcccctaggaaagaggaggcaaatggcactgcaggtgagaaccccgcccatccgtgctatgacatggaggcactgaagcccgaggaaggtgtgtggagattctaatcccaacaagcaagggtctccttcaagattaatgctatcaatcattaaggtcattactctcaaccacctaggcaatgaagaatataccatttcaaatatttacagtacttgtcttcaccaacactgtcccaaggtgaaatgaagcaacagagaggaaattgtacataagtacctcagcatttaatccaaacaggggttcttagtctcagcactatgacattttgggctgactacttatttgttaggcgggagctctcctgtgcattgtaggataattagcagtatccctggtggctacccaatagacgccagtagcaccccgaattgacaacccaaactctccagacatcaccaactgtcccctgcgaggagaaatcactcctgggggagaaccactgacccaaatgaattctaaaccaatcaaatgtctgggaagccctccaagaaaaaaaatagaaaagcacttgaagaatattcccaatattcccggtcagcagtatcaaggctgacttgtgttcatgtggagtcattataaattctataaatcaattattccccttcggtcttaaaaatatatttcctcataaacatttgagttttgttgaaaagatggagtttacaaagataccattcttgagtcatggatttctctgctcacagaagggtgtggcatttggaaacgggaataaacaaaattgctgcaccaatgcactgagtgaaggaagagagacagaggatcaagggctttagacagcactccttcaatatgcaatcacagagaaagatgcgccttatccaagttaatatctctaaggtgagagccttcttagagtcagtttgttgcaaatttcacctactctgttcttttccatccatccccctgagtcagttggttgaagggagttattttttcaagtggaattcaaacaaagctcaaaccagaactgtaaatagtgattgcaggaattcttttctaaactgctttgccctttcctctcactgccttttatagccaatataaatgtctctttgcacaccttttgttgtggttttatattgtaacaccatttttctttgaaactattgtatttaaagtaaggtttcatattatgtcagcaagtaattaacttatgtttaaaaggtggccatatcatgtaccaaaagttgctgaagtttctcttctagctggtaaagtaggagtttgcatgacttcacactttttttgcgtagtttcttctgttgtatgatggcgtgagtgtgtgtcttgggtaccgctgtgtactactgtgtgcctagattccatgcactctcgttgtgtttgaagtaaatattggagaccggagggtaacaggttggcctgttgattacagctagtaatcgctgtgtcttgttccgccccctccctgacaccccagcttcccaggatgtggaaagcctggatctcagctccttgccccatatcccttctgtaatttgtacctaaagagtgtgattatcctaattcaagagtcactaaaactcatcacattatcattgcatatcagcaaagggtaaagtcctagcaccaattgcttcacataccagcatgttccatttccaatttagaattagccacataataaaatcttagaatcttccttgagaaagagctgcctgagatgtagttttgttatatggttccccaccgaccatttttgtgcttttttcttgttttgttttgttttgactgcactgtgagttttgtagtgtcctcttcttgccaaaacaaacgcgagatgaactggacttatgtagacaaatcgtgatgccagtgtatccttcctttcttcagttccagcaataatgaatggtcaacttttttaaaatctagatctctctcattcatttcaatgtatttttactttaagatgaaccaaaattattagacttatttaagatgtacaggcatcagaaaaaagaagcacataatgcttttggtgcgatggcactcactgtgaacatgtgtaaccacatattaatatgcaatattgtttccaatactttctaatacagttttttataatgttgtgtgtggtgattgttcaggtcgaatctgttgtatccagtacagctttaggtcttcagctgcccttctggcgagtacatgcacaggattgtaaatgagaaatgcagtcatatttccagtctgcctctatgatgatgttaaattattgctgtttagctgtgaacaagggatgtaccactggaggaatagagtatccttttgtacacattttgaaatgcttcttctgtagtgatagaacaaataaatgcaacgaatactctgtctgccctatcccgtgaagtccacactggcgtaagagaaggcccagcagagcaggaatctgcctagactttctcccaatgagatcccaatatgagagggagaagagatgggcctcaggacagctgcaataccacttgggaacacatgtggtgtcttgatgtggccagcgcagcagttcagcacaacgtacctcccatctacaacagtgctggacgtgggaattctaagtcccagtcttgagggtgggtggagatggagggcaacaagagatacatttccagttctccactgcagcatgcttcagtcattctgtgagtggccgggcccagggccctcacaatttcactaccttgtcttttacatagtcataagaattatcctcaacatagccttttgacgctgtaaatcttgagtattcatttacccttttctgatctcctggaaacagctgcctgcctgcattgcacttctcttcccgaggagtggggtaaatttaaaagtcaagttatagtttggatgttagtatagaattttgaaattgggaattaaaaatcaggactggggactgggagaccaaaaatttctgatcccatttctgatggatgtgtcacaccttttctgtcaaaataaaatgtcttggaggttatgactccttggtg

SEQ ID NO: 141926 - DNA, 5757 bp, Homo sapiens
  Payload ID: 7909
  Gene Symbol: IKZF1
  Gene Name: IKAROS family zinc finger 1 (Ikaros)
  Uniprot ID: Q13422
  ENST ID: ENST00000349824
  CDS Start-End: 156-1286
cgcggcgcatcccagcctgggcgggacgctcggccgcggcgaggcgggcaagcctggcagggcagagggagccccggctccgaggttgctcttcgcacccgaggatcagtcttggccccaaagcgcgacgcacaaatccacataacctgaggaccatggatgctgatgagggtcaagacatgtcccaagtttcagggaaggaaagcccccctgtaagcgatactccagatgagggcgatgagcccatgccgatccccgaggacctctccaccacctcgggaggacagcaaagctccaagagtgacagagtcgtggccagtaatgttaaagtagagactcagagtgatgaagagaatgggcgtgcctgtgaaatgaatggggaagaatgtgcggaggatttacgaatgcttgatgcctcgggagagaaaatgaatggctcccacagggaccaaggcagctcggctttgtcgggagttggaggcattcgacttcctaacggaaaactaaagtgtgatatctgtgggatcatttgcatcgggcccaatgtgctcatggttcacaaaagaagccacactggggacaagggcctgtccgacacgccctacgacagcagcgccagctacgagaaggagaacgaaatgatgaagtcccacgtgatggaccaagccatcaacaacgccatcaactacctgggggccgagtccctgcgcccgctggtgcagacgcccccgggcggttccgaggtggtcccggtcatcagcccgatgtaccagctgcacaagccgctcgcggagggcaccccgcgctccaaccactcggcccaggacagcgccgtggagaacctgctgctgctctccaaggccaagttggtgccctcggagcgcgaggcgtccccgagcaacagctgccaagactccacggacaccgagagcaacaacgaggagcagcgcagcggtctcatctacctgaccaaccacatcgccccgcacgcgcgcaacgggctgtcgctcaaggaggagcaccgcgcctacgacctgctgcgcgccgcctccgagaactcgcaggacgcgctccgcgtggtcagcaccagcggggagcagatgaaggtgtacaagtgcgaacactgccgggtgctcttcctggatcacgtcatgtacaccatccacatgggctgccacggcttccgtgatccttttgagtgcaacatgtgcggctaccacagccaggaccggtacgagttctcgtcgcacataacgcgaggggagcaccgcttccacatgagctaaagccctcccgcgcccccaccccagaccccgagccaccccaggaaaagcacaaggactgccgccttctcgctcccgccagcagcatagactggactggaccagacaatgttgtgtttggatttgtaactgttttttgttttttgtttgagttggttgattggggtttgatttgcttttgaaaagatttttatttttagaggcagggctgcattgggagcatccagaactgctaccttcctagatgtttccccagaccgctggctgagattccctcacctgtcgcttcctagaatccccttctccaaacgattagtctaaattttcagagagaaatagataaaacacgccacagcctgggaaggagcgtgctctaccctgtgctaagcacggggttcgcgcaccaggtgtctttttccagtccccagaagcagagagcacagcccctgctgtgtgggtctgcaggtgagcagacaggacaggtgtgccgccacccaagtgccaagacacagcagggccaacaacctgtgcccaggccagcttcgagctacatgcatctagggcggagaggctgcacttgtgagagaaaatactatttcaagtcatattctgcgtaggaaaatgaattggttggggaaagtcgtgtctgtcagactgccctgggtggagggagacgccgggctagagcctttgggatcgtcctggattcactggctttgcggaggctgctcagatggcctgagcctcccgaggcttgctgccccgtaggaggagactgtcttcccgtgggcatatctggggagccctgttccccgctttttcactcccatacctttaatggcccccaaaatctgtcactacaatttaaacaccagtcccgaaatttggatcttctttctttttgaatctctcaaacggcaacattcctcagaaaccaaagctttatttcaaatctcttccttccctggctggttccatctagtaccagaggcctcttttcctgaagaaatccaatcctagccctcattttaattatgtacatctgtttgtagccacaagcctgaatttctcagtgttggtaagtttctttacctaccctcactatatattattctcgttttaaaacccataaaggagtgatttagaacagtcattaattttcaactcaatgaaatatgtgaagcccagcatctctgttgctaacacacagagctcacctgtttgaaaccaagctttcaaacatgttgaagctctttactgtaaaggcaagccagcatgtgtgtccacacatacataggatggctggctctgcacctgtaggatattggaatgcacagggcaattgagggactgagccagaccttcggagagtaatgccaccagatcccctaggaaagaggaggcaaatggcactgcaggtgagaaccccgcccatccgtgctatgacatggaggcactgaagcccgaggaaggtgtgtggagattctaatcccaacaagcaagggtctccttcaagattaatgctatcaatcattaaggtcattactctcaaccacctaggcaatgaagaatataccatttcaaatatttacagtacttgtcttcaccaacactgtcccaaggtgaaatgaagcaacagagaggaaattgtacataagtacctcagcatttaatccaaacaggggttcttagtctcagcactatgacattttgggctgactacttatttgttaggcgggagctctcctgtgcattgtaggataattagcagtatccctggtggctacccaatagacgccagtagcaccccgaattgacaacccaaactctccagacatcaccaactgtcccctgcgaggagaaatcactcctgggggagaaccactgacccaaatgaattctaaaccaatcaaatgtctgggaagccctccaagaaaaaaaatagaaaagcacttgaagaatattcccaatattcccggtcagcagtatcaaggctgacttgtgttcatgtggagtcattataaattctataaatcaattattccccttcggtcttaaaaatatatttcctcataaacatttgagttttgttgaaaagatggagtttacaaagataccattcttgagtcatggatttctctgctcacagaagggtgtggcatttggaaacgggaataaacaaaattgctgcaccaatgcactgagtgaaggaagagagacagaggatcaagggctttagacagcactccttcaatatgcaatcacagagaaagatgcgccttatccaagttaatatctctaaggtgagagccttcttagagtcagtttgttgcaaatttcacctactctgttcttttccatccatccccctgagtcagttggttgaagggagttattttttcaagtggaattcaaacaaagctcaaaccagaactgtaaatagtgattgcaggaattcttttctaaactgctttgccctttcctctcactgccttttatagccaatataaatgtctctttgcacaccttttgttgtggttttatattgtaacaccatttttctttgaaactattgtatttaaagtaaggtttcatattatgtcagcaagtaattaacttatgtttaaaaggtggccatatcatgtaccaaaagttgctgaagtttctcttctagctggtaaagtaggagtttgcatgacttcacactttttttgcgtagtttcttctgttgtatgatggcgtgagtgtgtgtcttgggtaccgctgtgtactactgtgtgcctagattccatgcactctcgttgtgtttgaagtaaatattggagaccggagggtaacaggttggcctgttgattacagctagtaatcgctgtgtcttgttccgccccctccctgacaccccagcttcccaggatgtggaaagcctggatctcagctccttgccccatatcccttctgtaatttgtacctaaagagtgtgattatcctaattcaagagtcactaaaactcatcacattatcattgcatatcagcaaagggtaaagtcctagcaccaattgcttcacataccagcatgttccatttccaatttagaattagccacataataaaatcttagaatcttccttgagaaagagctgcctgagatgtagttttgttatatggttccccaccgaccatttttgtgcttttttcttgttttgttttgttttgactgcactgtgagttttgtagtgtcctcttcttgccaaaacaaacgcgagatgaactggacttatgtagacaaatcgtgatgccagtgtatccttcctttcttcagttccagcaataatgaatggtcaacttttttaaaatctagatctctctcattcatttcaatgtatttttactttaagatgaaccaaaattattagacttatttaagatgtacaggcatcagaaaaaagaagcacataatgcttttggtgcgatggcactcactgtgaacatgtgtaaccacatattaatatgcaatattgtttccaatactttctaatacagttttttataatgttgtgtgtggtgattgttcaggtcgaatctgttgtatccagtacagctttaggtcttcagctgcccttctggcgagtacatgcacaggattgtaaatgagaaatgcagtcatatttccagtctgcctctatgatgatgttaaattattgctgtttagctgtgaacaagggatgtaccactggaggaatagagtatccttttgtacacattttgaaatgcttcttctgtagtgatagaacaaataaatgcaacgaatactctgtctgccctatcccgtgaagtccacactggcgtaagagaaggcccagcagagcaggaatctgcctagactttctcccaatgagatcccaatatgagagggagaagagatgggcctcaggacagctgcaataccacttgggaacacatgtggtgtcttgatgtggccagcgcagcagttcagcacaacgtacctcccatctacaacagtgctggacgtgggaattctaagtcccagtcttgagggtgggtggagatggagggcaacaagagatacatttccagttctccactgcagcatgcttcagtcattctgtgagtggccgggcccagggccctcacaatttcactaccttgtcttttacatagtcataagaattatcctcaacatagccttttgacgctgtaaatcttgagtattcatttacccttttctgatctcctggaaacagctgcctgcctgcattgcacttctcttcccgaggagtggggtaaatttaaaagtcaagttatagtttggatgttagtatagaattttgaaattgggaattaaaaatcaggactggggactgggagaccaaaaatttctgatcccatttctgatggatgtgtcacaccttttctgtcaaaataaaatgtcttggaggttatgactccttggtg

SEQ ID NO: 141927 - DNA, 5925 bp, Homo sapiens
  Payload ID: 7909
  Gene Symbol: IKZF1
  Gene Name: IKAROS family zinc finger 1 (Ikaros)
  Uniprot ID: Q13422
  ENST ID: ENST00000343574
  CDS Start-End: 156-1454
cgcggcgcatcccagcctgggcgggacgctcggccgcggcgaggcgggcaagcctggcagggcagagggagccccggctccgaggttgctcttcgcacccgaggatcagtcttggccccaaagcgcgacgcacaaatccacataacctgaggaccatggatgctgatgagggtcaagacatgtcccaagtttcagggaaggaaagcccccctgtaagcgatactccagatgagggcgatgagcccatgccgatccccgaggacctctccaccacctcgggaggacagcaaagctccaagagtgacagagtcgtgggagaacggcccttccagtgcaatcagtgcggggcctcattcacccagaagggcaacctgctccggcacatcaagctgcattccggggagaagcccttcaaatgccacctctgcaactacgcctgccgccggagggacgccctcactggccacctgaggacgcactccgttggtaaacctcacaaatgtggatattgtggccgaagctataaacagcgaagctctttagaggaacataaagagcgctgccacaactacttggaaagcatgggccttccgggcacactgtacccagtcattaaagaagaaactaatcacagtgaaatggcagaagacctgtgcaagataggatcagagagatctctcgtgctggacagactagcaagtaacgtcgccaaacgtaagagctctatgcctcagaaatttcttggggacaagggcctgtccgacacgccctacgacagcagcgccagctacgagaaggagaacgaaatgatgaagtcccacgtgatggaccaagccatcaacaacgccatcaactacctgggggccgagtccctgcgcccgctggtgcagacgcccccgggcggttccgaggtggtcccggtcatcagcccgatgtaccagctgcacaagccgctcgcggagggcaccccgcgctccaaccactcggcccaggacagcgccgtggagaacctgctgctgctctccaaggccaagttggtgccctcggagcgcgaggcgtccccgagcaacagctgccaagactccacggacaccgagagcaacaacgaggagcagcgcagcggtctcatctacctgaccaaccacatcgccccgcacgcgcgcaacgggctgtcgctcaaggaggagcaccgcgcctacgacctgctgcgcgccgcctccgagaactcgcaggacgcgctccgcgtggtcagcaccagcggggagcagatgaaggtgtacaagtgcgaacactgccgggtgctcttcctggatcacgtcatgtacaccatccacatgggctgccacggcttccgtgatccttttgagtgcaacatgtgcggctaccacagccaggaccggtacgagttctcgtcgcacataacgcgaggggagcaccgcttccacatgagctaaagccctcccgcgcccccaccccagaccccgagccaccccaggaaaagcacaaggactgccgccttctcgctcccgccagcagcatagactggactggaccagacaatgttgtgtttggatttgtaactgttttttgttttttgtttgagttggttgattggggtttgatttgcttttgaaaagatttttatttttagaggcagggctgcattgggagcatccagaactgctaccttcctagatgtttccccagaccgctggctgagattccctcacctgtcgcttcctagaatccccttctccaaacgattagtctaaattttcagagagaaatagataaaacacgccacagcctgggaaggagcgtgctctaccctgtgctaagcacggggttcgcgcaccaggtgtctttttccagtccccagaagcagagagcacagcccctgctgtgtgggtctgcaggtgagcagacaggacaggtgtgccgccacccaagtgccaagacacagcagggccaacaacctgtgcccaggccagcttcgagctacatgcatctagggcggagaggctgcacttgtgagagaaaatactatttcaagtcatattctgcgtaggaaaatgaattggttggggaaagtcgtgtctgtcagactgccctgggtggagggagacgccgggctagagcctttgggatcgtcctggattcactggctttgcggaggctgctcagatggcctgagcctcccgaggcttgctgccccgtaggaggagactgtcttcccgtgggcatatctggggagccctgttccccgctttttcactcccatacctttaatggcccccaaaatctgtcactacaatttaaacaccagtcccgaaatttggatcttctttctttttgaatctctcaaacggcaacattcctcagaaaccaaagctttatttcaaatctcttccttccctggctggttccatctagtaccagaggcctcttttcctgaagaaatccaatcctagccctcattttaattatgtacatctgtttgtagccacaagcctgaatttctcagtgttggtaagtttctttacctaccctcactatatattattctcgttttaaaacccataaaggagtgatttagaacagtcattaattttcaactcaatgaaatatgtgaagcccagcatctctgttgctaacacacagagctcacctgtttgaaaccaagctttcaaacatgttgaagctctttactgtaaaggcaagccagcatgtgtgtccacacatacataggatggctggctctgcacctgtaggatattggaatgcacagggcaattgagggactgagccagaccttcggagagtaatgccaccagatcccctaggaaagaggaggcaaatggcactgcaggtgagaaccccgcccatccgtgctatgacatggaggcactgaagcccgaggaaggtgtgtggagattctaatcccaacaagcaagggtctccttcaagattaatgctatcaatcattaaggtcattactctcaaccacctaggcaatgaagaatataccatttcaaatatttacagtacttgtcttcaccaacactgtcccaaggtgaaatgaagcaacagagaggaaattgtacataagtacctcagcatttaatccaaacaggggttcttagtctcagcactatgacattttgggctgactacttatttgttaggcgggagctctcctgtgcattgtaggataattagcagtatccctggtggctacccaatagacgccagtagcaccccgaattgacaacccaaactctccagacatcaccaactgtcccctgcgaggagaaatcactcctgggggagaaccactgacccaaatgaattctaaaccaatcaaatgtctgggaagccctccaagaaaaaaaatagaaaagcacttgaagaatattcccaatattcccggtcagcagtatcaaggctgacttgtgttcatgtggagtcattataaattctataaatcaattattccccttcggtcttaaaaatatatttcctcataaacatttgagttttgttgaaaagatggagtttacaaagataccattcttgagtcatggatttctctgctcacagaagggtgtggcatttggaaacgggaataaacaaaattgctgcaccaatgcactgagtgaaggaagagagacagaggatcaagggctttagacagcactccttcaatatgcaatcacagagaaagatgcgccttatccaagttaatatctctaaggtgagagccttcttagagtcagtttgttgcaaatttcacctactctgttcttttccatccatccccctgagtcagttggttgaagggagttattttttcaagtggaattcaaacaaagctcaaaccagaactgtaaatagtgattgcaggaattcttttctaaactgctttgccctttcctctcactgccttttatagccaatataaatgtctctttgcacaccttttgttgtggttttatattgtaacaccatttttctttgaaactattgtatttaaagtaaggtttcatattatgtcagcaagtaattaacttatgtttaaaaggtggccatatcatgtaccaaaagttgctgaagtttctcttctagctggtaaagtaggagtttgcatgacttcacactttttttgcgtagtttcttctgttgtatgatggcgtgagtgtgtgtcttgggtaccgctgtgtactactgtgtgcctagattccatgcactctcgttgtgtttgaagtaaatattggagaccggagggtaacaggttggcctgttgattacagctagtaatcgctgtgtcttgttccgccccctccctgacaccccagcttcccaggatgtggaaagcctggatctcagctccttgccccatatcccttctgtaatttgtacctaaagagtgtgattatcctaattcaagagtcactaaaactcatcacattatcattgcatatcagcaaagggtaaagtcctagcaccaattgcttcacataccagcatgttccatttccaatttagaattagccacataataaaatcttagaatcttccttgagaaagagctgcctgagatgtagttttgttatatggttccccaccgaccatttttgtgcttttttcttgttttgttttgttttgactgcactgtgagttttgtagtgtcctcttcttgccaaaacaaacgcgagatgaactggacttatgtagacaaatcgtgatgccagtgtatccttcctttcttcagttccagcaataatgaatggtcaacttttttaaaatctagatctctctcattcatttcaatgtatttttactttaagatgaaccaaaattattagacttatttaagatgtacaggcatcagaaaaaagaagcacataatgcttttggtgcgatggcactcactgtgaacatgtgtaaccacatattaatatgcaatattgtttccaatactttctaatacagttttttataatgttgtgtgtggtgattgttcaggtcgaatctgttgtatccagtacagctttaggtcttcagctgcccttctggcgagtacatgcacaggattgtaaatgagaaatgcagtcatatttccagtctgcctctatgatgatgttaaattattgctgtttagctgtgaacaagggatgtaccactggaggaatagagtatccttttgtacacattttgaaatgcttcttctgtagtgatagaacaaataaatgcaacgaatactctgtctgccctatcccgtgaagtccacactggcgtaagagaaggcccagcagagcaggaatctgcctagactttctcccaatgagatcccaatatgagagggagaagagatgggcctcaggacagctgcaataccacttgggaacacatgtggtgtcttgatgtggccagcgcagcagttcagcacaacgtacctcccatctacaacagtgctggacgtgggaattctaagtcccagtcttgagggtgggtggagatggagggcaacaagagatacatttccagttctccactgcagcatgcttcagtcattctgtgagtggccgggcccagggccctcacaatttcactaccttgtcttttacatagtcataagaattatcctcaacatagccttttgacgctgtaaatcttgagtattcatttacccttttctgatctcctggaaacagctgcctgcctgcattgcacttctcttcccgaggagtggggtaaatttaaaagtcaagttatagtttggatgttagtatagaattttgaaattgggaattaaaaatcaggactggggactgggagaccaaaaatttctgatcccatttctgatggatgtgtcacaccttttctgtcaaaataaaatgtcttggaggttatgactccttggtg

SEQ ID NO: 141928 - DNA, 5925 bp, Homo sapiens
  Payload ID: 7909
  Gene Symbol: IKZF1
  Gene Name: IKAROS family zinc finger 1 (Ikaros)
  Uniprot ID: Q13422
  ENST ID: ENST00000357364
  CDS Start-End: 156-1454
cgcggcgcatcccagcctgggcgggacgctcggccgcggcgaggcgggcaagcctggcagggcagagggagccccggctccgaggttgctcttcgcacccgaggatcagtcttggccccaaagcgcgacgcacaaatccacataacctgaggaccatggatgctgatgagggtcaagacatgtcccaagtttcagggaaggaaagcccccctgtaagcgatactccagatgagggcgatgagcccatgccgatccccgaggacctctccaccacctcgggaggacagcaaagctccaagagtgacagagtcgtggccagtaatgttaaagtagagactcagagtgatgaagagaatgggcgtgcctgtgaaatgaatggggaagaatgtgcggaggatttacgaatgcttgatgcctcgggagagaaaatgaatggctcccacagggaccaaggcagctcggctttgtcgggagttggaggcattcgacttcctaacggaaaactaaagtgtgatatctgtgggatcatttgcatcgggcccaatgtgctcatggttcacaaaagaagccacactggagaacggcccttccagtgcaatcagtgcggggcctcattcacccagaagggcaacctgctccggcacatcaagctgcattccggggagaagcccttcaaatgccacctctgcaactacgcctgccgccggagggacgccctcactggccacctgaggacgcactccggggacaagggcctgtccgacacgccctacgacagcagcgccagctacgagaaggagaacgaaatgatgaagtcccacgtgatggaccaagccatcaacaacgccatcaactacctgggggccgagtccctgcgcccgctggtgcagacgcccccgggcggttccgaggtggtcccggtcatcagcccgatgtaccagctgcacaagccgctcgcggagggcaccccgcgctccaaccactcggcccaggacagcgccgtggagaacctgctgctgctctccaaggccaagttggtgccctcggagcgcgaggcgtccccgagcaacagctgccaagactccacggacaccgagagcaacaacgaggagcagcgcagcggtctcatctacctgaccaaccacatcgccccgcacgcgcgcaacgggctgtcgctcaaggaggagcaccgcgcctacgacctgctgcgcgccgcctccgagaactcgcaggacgcgctccgcgtggtcagcaccagcggggagcagatgaaggtgtacaagtgcgaacactgccgggtgctcttcctggatcacgtcatgtacaccatccacatgggctgccacggcttccgtgatccttttgagtgcaacatgtgcggctaccacagccaggaccggtacgagttctcgtcgcacataacgcgaggggagcaccgcttccacatgagctaaagccctcccgcgcccccaccccagaccccgagccaccccaggaaaagcacaaggactgccgccttctcgctcccgccagcagcatagactggactggaccagacaatgttgtgtttggatttgtaactgttttttgttttttgtttgagttggttgattggggtttgatttgcttttgaaaagatttttatttttagaggcagggctgcattgggagcatccagaactgctaccttcctagatgtttccccagaccgctggctgagattccctcacctgtcgcttcctagaatccccttctccaaacgattagtctaaattttcagagagaaatagataaaacacgccacagcctgggaaggagcgtgctctaccctgtgctaagcacggggttcgcgcaccaggtgtctttttccagtccccagaagcagagagcacagcccctgctgtgtgggtctgcaggtgagcagacaggacaggtgtgccgccacccaagtgccaagacacagcagggccaacaacctgtgcccaggccagcttcgagctacatgcatctagggcggagaggctgcacttgtgagagaaaatactatttcaagtcatattctgcgtaggaaaatgaattggttggggaaagtcgtgtctgtcagactgccctgggtggagggagacgccgggctagagcctttgggatcgtcctggattcactggctttgcggaggctgctcagatggcctgagcctcccgaggcttgctgccccgtaggaggagactgtcttcccgtgggcatatctggggagccctgttccccgctttttcactcccatacctttaatggcccccaaaatctgtcactacaatttaaacaccagtcccgaaatttggatcttctttctttttgaatctctcaaacggcaacattcctcagaaaccaaagctttatttcaaatctcttccttccctggctggttccatctagtaccagaggcctcttttcctgaagaaatccaatcctagccctcattttaattatgtacatctgtttgtagccacaagcctgaatttctcagtgttggtaagtttctttacctaccctcactatatattattctcgttttaaaacccataaaggagtgatttagaacagtcattaattttcaactcaatgaaatatgtgaagcccagcatctctgttgctaacacacagagctcacctgtttgaaaccaagctttcaaacatgttgaagctctttactgtaaaggcaagccagcatgtgtgtccacacatacataggatggctggctctgcacctgtaggatattggaatgcacagggcaattgagggactgagccagaccttcggagagtaatgccaccagatcccctaggaaagaggaggcaaatggcactgcaggtgagaaccccgcccatccgtgctatgacatggaggcactgaagcccgaggaaggtgtgtggagattctaatcccaacaagcaagggtctccttcaagattaatgctatcaatcattaaggtcattactctcaaccacctaggcaatgaagaatataccatttcaaatatttacagtacttgtcttcaccaacactgtcccaaggtgaaatgaagcaacagagaggaaattgtacataagtacctcagcatttaatccaaacaggggttcttagtctcagcactatgacattttgggctgactacttatttgttaggcgggagctctcctgtgcattgtaggataattagcagtatccctggtggctacccaatagacgccagtagcaccccgaattgacaacccaaactctccagacatcaccaactgtcccctgcgaggagaaatcactcctgggggagaaccactgacccaaatgaattctaaaccaatcaaatgtctgggaagccctccaagaaaaaaaatagaaaagcacttgaagaatattcccaatattcccggtcagcagtatcaaggctgacttgtgttcatgtggagtcattataaattctataaatcaattattccccttcggtcttaaaaatatatttcctcataaacatttgagttttgttgaaaagatggagtttacaaagataccattcttgagtcatggatttctctgctcacagaagggtgtggcatttggaaacgggaataaacaaaattgctgcaccaatgcactgagtgaaggaagagagacagaggatcaagggctttagacagcactccttcaatatgcaatcacagagaaagatgcgccttatccaagttaatatctctaaggtgagagccttcttagagtcagtttgttgcaaatttcacctactctgttcttttccatccatccccctgagtcagttggttgaagggagttattttttcaagtggaattcaaacaaagctcaaaccagaactgtaaatagtgattgcaggaattcttttctaaactgctttgccctttcctctcactgccttttatagccaatataaatgtctctttgcacaccttttgttgtggttttatattgtaacaccatttttctttgaaactattgtatttaaagtaaggtttcatattatgtcagcaagtaattaacttatgtttaaaaggtggccatatcatgtaccaaaagttgctgaagtttctcttctagctggtaaagtaggagtttgcatgacttcacactttttttgcgtagtttcttctgttgtatgatggcgtgagtgtgtgtcttgggtaccgctgtgtactactgtgtgcctagattccatgcactctcgttgtgtttgaagtaaatattggagaccggagggtaacaggttggcctgttgattacagctagtaatcgctgtgtcttgttccgccccctccctgacaccccagcttcccaggatgtggaaagcctggatctcagctccttgccccatatcccttctgtaatttgtacctaaagagtgtgattatcctaattcaagagtcactaaaactcatcacattatcattgcatatcagcaaagggtaaagtcctagcaccaattgcttcacataccagcatgttccatttccaatttagaattagccacataataaaatcttagaatcttccttgagaaagagctgcctgagatgtagttttgttatatggttccccaccgaccatttttgtgcttttttcttgttttgttttgttttgactgcactgtgagttttgtagtgtcctcttcttgccaaaacaaacgcgagatgaactggacttatgtagacaaatcgtgatgccagtgtatccttcctttcttcagttccagcaataatgaatggtcaacttttttaaaatctagatctctctcattcatttcaatgtatttttactttaagatgaaccaaaattattagacttatttaagatgtacaggcatcagaaaaaagaagcacataatgcttttggtgcgatggcactcactgtgaacatgtgtaaccacatattaatatgcaatattgtttccaatactttctaatacagttttttataatgttgtgtgtggtgattgttcaggtcgaatctgttgtatccagtacagctttaggtcttcagctgcccttctggcgagtacatgcacaggattgtaaatgagaaatgcagtcatatttccagtctgcctctatgatgatgttaaattattgctgtttagctgtgaacaagggatgtaccactggaggaatagagtatccttttgtacacattttgaaatgcttcttctgtagtgatagaacaaataaatgcaacgaatactctgtctgccctatcccgtgaagtccacactggcgtaagagaaggcccagcagagcaggaatctgcctagactttctcccaatgagatcccaatatgagagggagaagagatgggcctcaggacagctgcaataccacttgggaacacatgtggtgtcttgatgtggccagcgcagcagttcagcacaacgtacctcccatctacaacagtgctggacgtgggaattctaagtcccagtcttgagggtgggtggagatggagggcaacaagagatacatttccagttctccactgcagcatgcttcagtcattctgtgagtggccgggcccagggccctcacaatttcactaccttgtcttttacatagtcataagaattatcctcaacatagccttttgacgctgtaaatcttgagtattcatttacccttttctgatctcctggaaacagctgcctgcctgcattgcacttctcttcccgaggagtggggtaaatttaaaagtcaagttatagtttggatgttagtatagaattttgaaattgggaattaaaaatcaggactggggactgggagaccaaaaatttctgatcccatttctgatggatgtgtcacaccttttctgtcaaaataaaatgtcttggaggttatgactccttggtg

SEQ ID NO: 141929 - DNA, 3487 bp, Homo sapiens
  Payload ID: 7909
  Gene Symbol: IKZF1
  Gene Name: IKAROS family zinc finger 1 (Ikaros)
  Uniprot ID: Q13422
  ENST ID: ENST00000359197
  CDS Start-End: 156-1589
cgcggcgcatcccagcctgggcgggacgctcggccgcggcgaggcgggcaagcctggcagggcagagggagccccggctccgaggttgctcttcgcacccgaggatcagtcttggccccaaagcgcgacgcacaaatccacataacctgaggaccatggatgctgatgagggtcaagacatgtcccaagtttcagggaaggaaagcccccctgtaagcgatactccagatgagggcgatgagcccatgccgatccccgaggacctctccaccacctcgggaggacagcaaagctccaagagtgacagagtcgtggccagtaatgttaaagtagagactcagagtgatgaagagaatgggcgtgcctgtgaaatgaatggggaagaatgtgcggaggatttacgaatgcttgatgcctcgggagagaaaatgaatggctcccacagggaccaaggcagctcggctttgtcgggagttggaggcattcgacttcctaacggaaaactaaagtgtgatatctgtgggatcatttgcatcgggcccaatgtgctcatggttcacaaaagaagccacactggagaacggcccttccagtgcaatcagtgcggggcctcattcacccagaagggcaacctgctccggcacatcaagctgcattccggggagaagcccttcaaatgccacctctgcaactacgcctgccgccggagggacgccctcactggccacctgaggacgcactccgtcattaaagaagaaactaatcacagtgaaatggcagaagacctgtgcaagataggatcagagagatctctcgtgctggacagactagcaagtaacgtcgccaaacgtaagagctctatgcctcagaaatttcttggggacaagggcctgtccgacacgccctacgacagcagcgccagctacgagaaggagaacgaaatgatgaagtcccacgtgatggaccaagccatcaacaacgccatcaactacctgggggccgagtccctgcgcccgctggtgcagacgcccccgggcggttccgaggtggtcccggtcatcagcccgatgtaccagctgcacaagccgctcgcggagggcaccccgcgctccaaccactcggcccaggacagcgccgtggagaacctgctgctgctctccaaggccaagttggtgccctcggagcgcgaggcgtccccgagcaacagctgccaagactccacggacaccgagagcaacaacgaggagcagcgcagcggtctcatctacctgaccaaccacatcgccccgcacgcgcgcaacgggctgtcgctcaaggaggagcaccgcgcctacgacctgctgcgcgccgcctccgagaactcgcaggacgcgctccgcgtggtcagcaccagcggggagcagatgaaggtgtacaagtgcgaacactgccgggtgctcttcctggatcacgtcatgtacaccatccacatgggctgccacggcttccgtgatccttttgagtgcaacatgtgcggctaccacagccaggaccggtacgagttctcgtcgcacataacgcgaggggagcaccgcttccacatgagctaaagccctcccgcgcccccaccccagaccccgagccaccccaggaaaagcacaaggactgccgccttctcgctcccgccagcagcatagactggactggaccagacaatgttgtgtttggatttgtaactgttttttgttttttgtttgagttggttgattggggtttgatttgcttttgaaaagatttttatttttagaggcagggctgcattgggagcatccagaactgctaccttcctagatgtttccccagaccgctggctgagattccctcacctgtcgcttcctagaatccccttctccaaacgattagtctaaattttcagagagaaatagataaaacacgccacagcctgggaaggagcgtgctctaccctgtgctaagcacggggttcgcgcaccaggtgtctttttccagtccccagaagcagagagcacagcccctgctgtgtgggtctgcaggtgagcagacaggacaggtgtgccgccacccaagtgccaagacacagcagggccaacaacctgtgcccaggccagcttcgagctacatgcatctagggcggagaggctgcacttgtgagagaaaatactatttcaagtcatattctgcgtaggaaaatgaattggttggggaaagtcgtgtctgtcagactgccctgggtggagggagacgccgggctagagcctttgggatcgtcctggattcactggctttgcggaggctgctcagatggcctgagcctcccgaggcttgctgccccgtaggaggagactgtcttcccgtgggcatatctggggagccctgttccccgctttttcactcccatacctttaatggcccccaaaatctgtcactacaatttaaacaccagtcccgaaatttggatcttctttctttttgaatctctcaaacggcaacattcctcagaaaccaaagctttatttcaaatctcttccttccctggctggttccatctagtaccagaggcctcttttcctgaagaaatccaatcctagccctcattttaattatgtacatctgtttgtagccacaagcctgaatttctcagtgttggtaagtttctttacctaccctcactatatattattctcgttttaaaacccataaaggagtgatttagaacagtcattaattttcaactcaatgaaatatgtgaagcccagcatctctgttgctaacacacagagctcacctgtttgaaaccaagctttcaaacatgttgaagctctttactgtaaaggcaagccagcatgtgtgtccacacatacataggatggctggctctgcacctgtaggatattggaatgcacagggcaattgagggactgagccagaccttcggagagtaatgccaccagatcccctaggaaagaggaggcaaatggcactgcaggtgagaaccccgcccatccgtgctatgacatggaggcactgaagcccgaggaaggtgtgtggagattctaatcccaacaagcaagggtctccttcaagattaatgctatcaatcattaaggtcattactctcaaccacctaggcaatgaagaatataccatttcaaatatttacagtacttgtcttcaccaacactgtcccaaggtgaaatgaagcaacagagaggaaattgtacataagtacctcagcatttaatccaaacaggggttcttagtctcagcactatgacattttgggctgactacttatttgttaggcgggagctctcctgtgcattgtaggataattagcagtatccctggtggctacccaatagacgccagtagcaccccgaattgacaacccaaactctccagacatcaccaactgtcccctgcgaggagaaatcactcctgggggagaaccactgacccaaatgaattc

SEQ ID NO: 141930 - DNA, 1808 bp, Homo sapiens
  Payload ID: 7909
  Gene Symbol: IKZF1
  Gene Name: IKAROS family zinc finger 1 (Ikaros)
  ENST ID: ENST00000413698
  CDS Start-End: 210-734
gactgcgcggcccgcgcccggggcggtgactgcggcaagccccctgggtccccgcgcggcgcatcccagcctgggcgggacgctcggccgcggcgaggcgggcaagcctggcagggcagagggagccccggctccgaggttgctcttcgcacccgaggatcagtcttggccccaaagcgcgacgcacaaatccacataacctgaggaccatggatgctgatgagggtcaagacatgtcccaagtttcagggaaggaaagcccccctgtaagcgatactccagatgagggcgatgagcccatgccgatccccgaggacctctccaccacctcgggaggacagcaaagctccaagagtgacagagtcgtggttacatatggggctgatgactttagggatttccatgcaataattcccaaatctttctctcgtaagtatatgccttgcttctggaaaacaaaagcatgccttcatctcctatcatgtaaatatcgtacgtgcatgttccttcatcaacccccgagatacattaaatattcactgttctattcgttagacacctaccatatcatttttgggtatttataccataaagtgcaaaacgaaggtctaggcagttgtgcggtgtcctgggagcatggcagtggagtaacagtaagggttggagtcacagtagcactgatgggattgttacttcgcagatgctgctggacagctttgagattactcctgtaatcctttttattgagtgtgaggataaaatggccatattttctgtcaccaacaaagaactgaacatggtttcaagataatttttacaattttgtgggacaggagaaggagatatgctcttcatctgtggttctggagtattaatttcagaactgagaagagaaaattgcaggcctccaggccgttattctgtggtgcatcgctgctggagccaacgtactgttcctgcttggtgcccgcaggaccttctctgatctgagctgttaaaccaaaaacagatgtgaatttcatttttcttttttagatattgagctgataaatgataaatatatttgggtaacatcctcaaatgagtactttaaagaacagagagtgcttttgaaaatgtatagagagctgaatatttaaagccatacaagttgataatccccttaggacctgtattagtaaatcctctaatactataaagcaacatcagaaaacaggtcgcatttgttaacactgtgacaattataattataggctctaatttgaacagtgccagtaacagttaaagacaggtgtctgacatcctggttatcaaaaactatctggtgtctaaggaatttaacagtatcaaagtacatctttttgctcacaaactagattggctacttttccagcctatagaagttacagaaatctttcttttactgatattcctttgattccactttaaagcaatagcttgatacctactttttgagatgtatatgtatgtacttgtaaatgcttatatatgtgtatttgtttacacgtgagcttatatgaacatataaaacattatggtattggacagagaaatgatattgatttgaagaatcatattgttgaagtattttgagaagtcaaatgcacttgagagtaagctaatgcatcctaaaacatgtttctgtgaagtctgaggaaggtgtcagccagagcatatgttgaagcagacccttcagtgaagccttcagtctgtaagaatcgctgcatgtgaagatgtgttaatgttatgatagttacagtttttataaaagagatgatatacacttg

SEQ ID NO: 141931 - DNA, 1748 bp, Homo sapiens
  Payload ID: 7909
  Gene Symbol: IKZF1
  Gene Name: IKAROS family zinc finger 1 (Ikaros)
  Uniprot ID: Q13422
  ENST ID: ENST00000438033
  CDS Start-End: 201-1499
agtgtgaaggcagcagaggaaccttttggaggaggaagaggacacagaggccctgtagccaggcaccaagatccctcccaggtggctgggtctgaggggaactccgagcagccctaggtcctcaaagtctggatttgtgtggaaaaggcagctctcacttggccttggcgaggcctcggttggttgataacctgaggaccatggatgctgatgagggtcaagacatgtcccaagtttcagggaaggaaagcccccctgtaagcgatactccagatgagggcgatgagcccatgccgatccccgaggacctctccaccacctcgggaggacagcaaagctccaagagtgacagagtcgtgggagaacggcccttccagtgcaatcagtgcggggcctcattcacccagaagggcaacctgctccggcacatcaagctgcattccggggagaagcccttcaaatgccacctctgcaactacgcctgccgccggagggacgccctcactggccacctgaggacgcactccgttggtaaacctcacaaatgtggatattgtggccgaagctataaacagcgaagctctttagaggaacataaagagcgctgccacaactacttggaaagcatgggccttccgggcacactgtacccagtcattaaagaagaaactaatcacagtgaaatggcagaagacctgtgcaagataggatcagagagatctctcgtgctggacagactagcaagtaacgtcgccaaacgtaagagctctatgcctcagaaatttcttggggacaagggcctgtccgacacgccctacgacagcagcgccagctacgagaaggagaacgaaatgatgaagtcccacgtgatggaccaagccatcaacaacgccatcaactacctgggggccgagtccctgcgcccgctggtgcagacgcccccgggcggttccgaggtggtcccggtcatcagcccgatgtaccagctgcacaagccgctcgcggagggcaccccgcgctccaaccactcggcccaggacagcgccgtggagaacctgctgctgctctccaaggccaagttggtgccctcggagcgcgaggcgtccccgagcaacagctgccaagactccacggacaccgagagcaacaacgaggagcagcgcagcggtctcatctacctgaccaaccacatcgccccgcacgcgcgcaacgggctgtcgctcaaggaggagcaccgcgcctacgacctgctgcgcgccgcctccgagaactcgcaggacgcgctccgcgtggtcagcaccagcggggagcagatgaaggtgtacaagtgcgaacactgccgggtgctcttcctggatcacgtcatgtacaccatccacatgggctgccacggcttccgtgatccttttgagtgcaacatgtgcggctaccacagccaggaccggtacgagttctcgtcgcacataacgcgaggggagcaccgcttccacatgagctaaagccctcccgcgcccccaccccagaccccgagccaccccaggaaaagcacaaggactgccgccttctcgctcccgccagcagcatagactggactggaccagacaatgttgtgtttggatttgtaactgttttttgttttttgtttgagttggttgattggggtttgatttgcttttgaaaagatttttatttttagaggcagggctgcattgggagcatccagaactgctaccttcctagatgtttcc

SEQ ID NO: 141932 - DNA, 5511 bp, Homo sapiens
  Payload ID: 7909
  Gene Symbol: IKZF1
  Gene Name: IKAROS family zinc finger 1 (Ikaros)
  ENST ID: ENST00000440768
  CDS Start-End: 156-1040
cgcggcgcatcccagcctgggcgggacgctcggccgcggcgaggcgggcaagcctggcagggcagagggagccccggctccgaggttgctcttcgcacccgaggatcagtcttggccccaaagcgcgacgcacaaatccacataacctgaggaccatggatgctgatgagggtcaagacatgtcccaagtttcagtcattaaagaagaaactaatcacagtgaaatggcagaagacctgtgcaagataggatcagagagatctctcgtgctggacagactagcaagtaacgtcgccaaacgtaagagctctatgcctcagaaatttcttggggacaagggcctgtccgacacgccctacgacagcagcgccagctacgagaaggagaacgaaatgatgaagtcccacgtgatggaccaagccatcaacaacgccatcaactacctgggggccgagtccctgcgcccgctggtgcagacgcccccgggcggttccgaggtggtcccggtcatcagcccgatgtaccagctgcacaagccgctcgcggagggcaccccgcgctccaaccactcggcccaggacagcgccgtggagaacctgctgctgctctccaaggccaagttggtgccctcggagcgcgaggcgtccccgagcaacagctgccaagactccacggacaccgagagcaacaacgaggagcagcgcagcggtctcatctacctgaccaaccacatcgccccgcacgcgcgcaacgggctgtcgctcaaggaggagcaccgcgcctacgacctgctgcgcgccgcctccgagaactcgcaggacgcgctccgcgtggtcagcaccagcggggagcagatgaaggtgtacaagtgcgaacactgccgggtgctcttcctggatcacgtcatgtacaccatccacatgggctgccacggcttccgtgatccttttgagtgcaacatgtgcggctaccacagccaggaccggtacgagttctcgtcgcacataacgcgaggggagcaccgcttccacatgagctaaagccctcccgcgcccccaccccagaccccgagccaccccaggaaaagcacaaggactgccgccttctcgctcccgccagcagcatagactggactggaccagacaatgttgtgtttggatttgtaactgttttttgttttttgtttgagttggttgattggggtttgatttgcttttgaaaagatttttatttttagaggcagggctgcattgggagcatccagaactgctaccttcctagatgtttccccagaccgctggctgagattccctcacctgtcgcttcctagaatccccttctccaaacgattagtctaaattttcagagagaaatagataaaacacgccacagcctgggaaggagcgtgctctaccctgtgctaagcacggggttcgcgcaccaggtgtctttttccagtccccagaagcagagagcacagcccctgctgtgtgggtctgcaggtgagcagacaggacaggtgtgccgccacccaagtgccaagacacagcagggccaacaacctgtgcccaggccagcttcgagctacatgcatctagggcggagaggctgcacttgtgagagaaaatactatttcaagtcatattctgcgtaggaaaatgaattggttggggaaagtcgtgtctgtcagactgccctgggtggagggagacgccgggctagagcctttgggatcgtcctggattcactggctttgcggaggctgctcagatggcctgagcctcccgaggcttgctgccccgtaggaggagactgtcttcccgtgggcatatctggggagccctgttccccgctttttcactcccatacctttaatggcccccaaaatctgtcactacaatttaaacaccagtcccgaaatttggatcttctttctttttgaatctctcaaacggcaacattcctcagaaaccaaagctttatttcaaatctcttccttccctggctggttccatctagtaccagaggcctcttttcctgaagaaatccaatcctagccctcattttaattatgtacatctgtttgtagccacaagcctgaatttctcagtgttggtaagtttctttacctaccctcactatatattattctcgttttaaaacccataaaggagtgatttagaacagtcattaattttcaactcaatgaaatatgtgaagcccagcatctctgttgctaacacacagagctcacctgtttgaaaccaagctttcaaacatgttgaagctctttactgtaaaggcaagccagcatgtgtgtccacacatacataggatggctggctctgcacctgtaggatattggaatgcacagggcaattgagggactgagccagaccttcggagagtaatgccaccagatcccctaggaaagaggaggcaaatggcactgcaggtgagaaccccgcccatccgtgctatgacatggaggcactgaagcccgaggaaggtgtgtggagattctaatcccaacaagcaagggtctccttcaagattaatgctatcaatcattaaggtcattactctcaaccacctaggcaatgaagaatataccatttcaaatatttacagtacttgtcttcaccaacactgtcccaaggtgaaatgaagcaacagagaggaaattgtacataagtacctcagcatttaatccaaacaggggttcttagtctcagcactatgacattttgggctgactacttatttgttaggcgggagctctcctgtgcattgtaggataattagcagtatccctggtggctacccaatagacgccagtagcaccccgaattgacaacccaaactctccagacatcaccaactgtcccctgcgaggagaaatcactcctgggggagaaccactgacccaaatgaattctaaaccaatcaaatgtctgggaagccctccaagaaaaaaaatagaaaagcacttgaagaatattcccaatattcccggtcagcagtatcaaggctgacttgtgttcatgtggagtcattataaattctataaatcaattattccccttcggtcttaaaaatatatttcctcataaacatttgagttttgttgaaaagatggagtttacaaagataccattcttgagtcatggatttctctgctcacagaagggtgtggcatttggaaacgggaataaacaaaattgctgcaccaatgcactgagtgaaggaagagagacagaggatcaagggctttagacagcactccttcaatatgcaatcacagagaaagatgcgccttatccaagttaatatctctaaggtgagagccttcttagagtcagtttgttgcaaatttcacctactctgttcttttccatccatccccctgagtcagttggttgaagggagttattttttcaagtggaattcaaacaaagctcaaaccagaactgtaaatagtgattgcaggaattcttttctaaactgctttgccctttcctctcactgccttttatagccaatataaatgtctctttgcacaccttttgttgtggttttatattgtaacaccatttttctttgaaactattgtatttaaagtaaggtttcatattatgtcagcaagtaattaacttatgtttaaaaggtggccatatcatgtaccaaaagttgctgaagtttctcttctagctggtaaagtaggagtttgcatgacttcacactttttttgcgtagtttcttctgttgtatgatggcgtgagtgtgtgtcttgggtaccgctgtgtactactgtgtgcctagattccatgcactctcgttgtgtttgaagtaaatattggagaccggagggtaacaggttggcctgttgattacagctagtaatcgctgtgtcttgttccgccccctccctgacaccccagcttcccaggatgtggaaagcctggatctcagctccttgccccatatcccttctgtaatttgtacctaaagagtgtgattatcctaattcaagagtcactaaaactcatcacattatcattgcatatcagcaaagggtaaagtcctagcaccaattgcttcacataccagcatgttccatttccaatttagaattagccacataataaaatcttagaatcttccttgagaaagagctgcctgagatgtagttttgttatatggttccccaccgaccatttttgtgcttttttcttgttttgttttgttttgactgcactgtgagttttgtagtgtcctcttcttgccaaaacaaacgcgagatgaactggacttatgtagacaaatcgtgatgccagtgtatccttcctttcttcagttccagcaataatgaatggtcaacttttttaaaatctagatctctctcattcatttcaatgtatttttactttaagatgaaccaaaattattagacttatttaagatgtacaggcatcagaaaaaagaagcacataatgcttttggtgcgatggcactcactgtgaacatgtgtaaccacatattaatatgcaatattgtttccaatactttctaatacagttttttataatgttgtgtgtggtgattgttcaggtcgaatctgttgtatccagtacagctttaggtcttcagctgcccttctggcgagtacatgcacaggattgtaaatgagaaatgcagtcatatttccagtctgcctctatgatgatgttaaattattgctgtttagctgtgaacaagggatgtaccactggaggaatagagtatccttttgtacacattttgaaatgcttcttctgtagtgatagaacaaataaatgcaacgaatactctgtctgccctatcccgtgaagtccacactggcgtaagagaaggcccagcagagcaggaatctgcctagactttctcccaatgagatcccaatatgagagggagaagagatgggcctcaggacagctgcaataccacttgggaacacatgtggtgtcttgatgtggccagcgcagcagttcagcacaacgtacctcccatctacaacagtgctggacgtgggaattctaagtcccagtcttgagggtgggtggagatggagggcaacaagagatacatttccagttctccactgcagcatgcttcagtcattctgtgagtggccgggcccagggccctcacaatttcactaccttgtcttttacatagtcataagaattatcctcaacatagccttttgacgctgtaaatcttgagtattcatttacccttttctgatctcctggaaacagctgcctgcctgcattgcacttctcttcccgaggagtggggtaaatttaaaagtcaagttatagtttggatgttagtatagaattttgaaattgggaattaaaaatcaggactggggactgggagaccaaaaatttctgatcccatttctgatggatgtgtcacaccttttctgtcaaaataaaatgtcttggaggttatgactccttggtg

SEQ ID NO: 141933 - DNA, 201 bp, Homo sapiens
  Payload ID: 7909
  Gene Symbol: IKZF1
  Gene Name: IKAROS family zinc finger 1 (Ikaros)
  ENST ID: ENST00000426121
  CDS Start-End: 1-201
ccccctgtaagcgatactccagatgagggcgatgagcccatgccgatccccgaggacctctccaccacctcgggaggacagcaaagctccaagagtgacagagtcgtgggggacaagggcctgtccgacacgccctacgacagcagcgccagctacgagaaggagaacgaaatgatgaagtcccacgtgatggaccaagcc

SEQ ID NO: 141934 - DNA, 3572 bp, Homo sapiens
  Payload ID: 7909
  Gene Symbol: IKZF1
  Gene Name: IKAROS family zinc finger 1 (Ikaros)
  Uniprot ID: Q13422
  ENST ID: ENST00000439701
  CDS Start-End: 200-1633
gtgtgaaggcagcagaggaaccttttggaggaggaagaggacacagaggccctgtagccaggcaccaagatccctcccaggtggctgggtctgaggggaactccgagcagccctaggtcctcaaagtctggatttgtgtggaaaaggcagctctcacttggccttggcgaggcctcggttggttgataacctgaggaccatggatgctgatgagggtcaagacatgtcccaagtttcagggaaggaaagcccccctgtaagcgatactccagatgagggcgatgagcccatgccgatccccgaggacctctccaccacctcgggaggacagcaaagctccaagagtgacagagtcgtggccagtaatgttaaagtagagactcagagtgatgaagagaatgggcgtgcctgtgaaatgaatggggaagaatgtgcggaggatttacgaatgcttgatgcctcgggagagaaaatgaatggctcccacagggaccaaggcagctcggctttgtcgggagttggaggcattcgacttcctaacggaaaactaaagtgtgatatctgtgggatcatttgcatcgggcccaatgtgctcatggttcacaaaagaagccacactggagaacggcccttccagtgcaatcagtgcggggcctcattcacccagaagggcaacctgctccggcacatcaagctgcattccggggagaagcccttcaaatgccacctctgcaactacgcctgccgccggagggacgccctcactggccacctgaggacgcactccgtcattaaagaagaaactaatcacagtgaaatggcagaagacctgtgcaagataggatcagagagatctctcgtgctggacagactagcaagtaacgtcgccaaacgtaagagctctatgcctcagaaatttcttggggacaagggcctgtccgacacgccctacgacagcagcgccagctacgagaaggagaacgaaatgatgaagtcccacgtgatggaccaagccatcaacaacgccatcaactacctgggggccgagtccctgcgcccgctggtgcagacgcccccgggcggttccgaggtggtcccggtcatcagcccgatgtaccagctgcacaagccgctcgcggagggcaccccgcgctccaaccactcggcccaggacagcgccgtggagaacctgctgctgctctccaaggccaagttggtgccctcggagcgcgaggcgtccccgagcaacagctgccaagactccacggacaccgagagcaacaacgaggagcagcgcagcggtctcatctacctgaccaaccacatcgccccgcacgcgcgcaacgggctgtcgctcaaggaggagcaccgcgcctacgacctgctgcgcgccgcctccgagaactcgcaggacgcgctccgcgtggtcagcaccagcggggagcagatgaaggtgtacaagtgcgaacactgccgggtgctcttcctggatcacgtcatgtacaccatccacatgggctgccacggcttccgtgatccttttgagtgcaacatgtgcggctaccacagccaggaccggtacgagttctcgtcgcacataacgcgaggggagcaccgcttccacatgagctaaagccctcccgcgcccccaccccagaccccgagccaccccaggaaaagcacaaggactgccgccttctcgctcccgccagcagcatagactggactggaccagacaatgttgtgtttggatttgtaactgttttttgttttttgtttgagttggttgattggggtttgatttgcttttgaaaagatttttatttttagaggcagggctgcattgggagcatccagaactgctaccttcctagatgtttccccagaccgctggctgagattccctcacctgtcgcttcctagaatccccttctccaaacgattagtctaaattttcagagagaaatagataaaacacgccacagcctgggaaggagcgtgctctaccctgtgctaagcacggggttcgcgcaccaggtgtctttttccagtccccagaagcagagagcacagcccctgctgtgtgggtctgcaggtgagcagacaggacaggtgtgccgccacccaagtgccaagacacagcagggccaacaacctgtgcccaggccagcttcgagctacatgcatctagggcggagaggctgcacttgtgagagaaaatactatttcaagtcatattctgcgtaggaaaatgaattggttggggaaagtcgtgtctgtcagactgccctgggtggagggagacgccgggctagagcctttgggatcgtcctggattcactggctttgcggaggctgctcagatggcctgagcctcccgaggcttgctgccccgtaggaggagactgtcttcccgtgggcatatctggggagccctgttccccgctttttcactcccatacctttaatggcccccaaaatctgtcactacaatttaaacaccagtcccgaaatttggatcttctttctttttgaatctctcaaacggcaacattcctcagaaaccaaagctttatttcaaatctcttccttccctggctggttccatctagtaccagaggcctcttttcctgaagaaatccaatcctagccctcattttaattatgtacatctgtttgtagccacaagcctgaatttctcagtgttggtaagtttctttacctaccctcactatatattattctcgttttaaaacccataaaggagtgatttagaacagtcattaattttcaactcaatgaaatatgtgaagcccagcatctctgttgctaacacacagagctcacctgtttgaaaccaagctttcaaacatgttgaagctctttactgtaaaggcaagccagcatgtgtgtccacacatacataggatggctggctctgcacctgtaggatattggaatgcacagggcaattgagggactgagccagaccttcggagagtaatgccaccagatcccctaggaaagaggaggcaaatggcactgcaggtgagaaccccgcccatccgtgctatgacatggaggcactgaagcccgaggaaggtgtgtggagattctaatcccaacaagcaagggtctccttcaagattaatgctatcaatcattaaggtcattactctcaaccacctaggcaatgaagaatataccatttcaaatatttacagtacttgtcttcaccaacactgtcccaaggtgaaatgaagcaacagagaggaaattgtacataagtacctcagcatttaatccaaacaggggttcttagtctcagcactatgacattttgggctgactacttatttgttaggcgggagctctcctgtgcattgtaggataattagcagtatccctggtggctacccaatagacgccagtagcaccccgaattgacaacccaaactctccagacatcaccaactgtcccctgcgaggagaaatcactcctgggggagaaccactgacccaaatgaattctaaaccaatcaaatgtctgggaagccctccaagaaaaaaaa

SEQ ID NO: 141935 - DNA, 5637 bp, Homo sapiens
  Payload ID: 7909
  Gene Symbol: IKZF1
  Gene Name: IKAROS family zinc finger 1 (Ikaros)
  ENST ID: ENST00000615491
  CDS Start-End: 156-1166
cgcggcgcatcccagcctgggcgggacgctcggccgcggcgaggcgggcaagcctggcagggcagagggagccccggctccgaggttgctcttcgcacccgaggatcagtcttggccccaaagcgcgacgcacaaatccacataacctgaggaccatggatgctgatgagggtcaagacatgtcccaagtttcagttggtaaacctcacaaatgtggatattgtggccgaagctataaacagcgaagctctttagaggaacataaagagcgctgccacaactacttggaaagcatgggccttccgggcacactgtacccagtcattaaagaagaaactaatcacagtgaaatggcagaagacctgtgcaagataggatcagagagatctctcgtgctggacagactagcaagtaacgtcgccaaacgtaagagctctatgcctcagaaatttcttggggacaagggcctgtccgacacgccctacgacagcagcgccagctacgagaaggagaacgaaatgatgaagtcccacgtgatggaccaagccatcaacaacgccatcaactacctgggggccgagtccctgcgcccgctggtgcagacgcccccgggcggttccgaggtggtcccggtcatcagcccgatgtaccagctgcacaagccgctcgcggagggcaccccgcgctccaaccactcggcccaggacagcgccgtggagaacctgctgctgctctccaaggccaagttggtgccctcggagcgcgaggcgtccccgagcaacagctgccaagactccacggacaccgagagcaacaacgaggagcagcgcagcggtctcatctacctgaccaaccacatcgccccgcacgcgcgcaacgggctgtcgctcaaggaggagcaccgcgcctacgacctgctgcgcgccgcctccgagaactcgcaggacgcgctccgcgtggtcagcaccagcggggagcagatgaaggtgtacaagtgcgaacactgccgggtgctcttcctggatcacgtcatgtacaccatccacatgggctgccacggcttccgtgatccttttgagtgcaacatgtgcggctaccacagccaggaccggtacgagttctcgtcgcacataacgcgaggggagcaccgcttccacatgagctaaagccctcccgcgcccccaccccagaccccgagccaccccaggaaaagcacaaggactgccgccttctcgctcccgccagcagcatagactggactggaccagacaatgttgtgtttggatttgtaactgttttttgttttttgtttgagttggttgattggggtttgatttgcttttgaaaagatttttatttttagaggcagggctgcattgggagcatccagaactgctaccttcctagatgtttccccagaccgctggctgagattccctcacctgtcgcttcctagaatccccttctccaaacgattagtctaaattttcagagagaaatagataaaacacgccacagcctgggaaggagcgtgctctaccctgtgctaagcacggggttcgcgcaccaggtgtctttttccagtccccagaagcagagagcacagcccctgctgtgtgggtctgcaggtgagcagacaggacaggtgtgccgccacccaagtgccaagacacagcagggccaacaacctgtgcccaggccagcttcgagctacatgcatctagggcggagaggctgcacttgtgagagaaaatactatttcaagtcatattctgcgtaggaaaatgaattggttggggaaagtcgtgtctgtcagactgccctgggtggagggagacgccgggctagagcctttgggatcgtcctggattcactggctttgcggaggctgctcagatggcctgagcctcccgaggcttgctgccccgtaggaggagactgtcttcccgtgggcatatctggggagccctgttccccgctttttcactcccatacctttaatggcccccaaaatctgtcactacaatttaaacaccagtcccgaaatttggatcttctttctttttgaatctctcaaacggcaacattcctcagaaaccaaagctttatttcaaatctcttccttccctggctggttccatctagtaccagaggcctcttttcctgaagaaatccaatcctagccctcattttaattatgtacatctgtttgtagccacaagcctgaatttctcagtgttggtaagtttctttacctaccctcactatatattattctcgttttaaaacccataaaggagtgatttagaacagtcattaattttcaactcaatgaaatatgtgaagcccagcatctctgttgctaacacacagagctcacctgtttgaaaccaagctttcaaacatgttgaagctctttactgtaaaggcaagccagcatgtgtgtccacacatacataggatggctggctctgcacctgtaggatattggaatgcacagggcaattgagggactgagccagaccttcggagagtaatgccaccagatcccctaggaaagaggaggcaaatggcactgcaggtgagaaccccgcccatccgtgctatgacatggaggcactgaagcccgaggaaggtgtgtggagattctaatcccaacaagcaagggtctccttcaagattaatgctatcaatcattaaggtcattactctcaaccacctaggcaatgaagaatataccatttcaaatatttacagtacttgtcttcaccaacactgtcccaaggtgaaatgaagcaacagagaggaaattgtacataagtacctcagcatttaatccaaacaggggttcttagtctcagcactatgacattttgggctgactacttatttgttaggcgggagctctcctgtgcattgtaggataattagcagtatccctggtggctacccaatagacgccagtagcaccccgaattgacaacccaaactctccagacatcaccaactgtcccctgcgaggagaaatcactcctgggggagaaccactgacccaaatgaattctaaaccaatcaaatgtctgggaagccctccaagaaaaaaaatagaaaagcacttgaagaatattcccaatattcccggtcagcagtatcaaggctgacttgtgttcatgtggagtcattataaattctataaatcaattattccccttcggtcttaaaaatatatttcctcataaacatttgagttttgttgaaaagatggagtttacaaagataccattcttgagtcatggatttctctgctcacagaagggtgtggcatttggaaacgggaataaacaaaattgctgcaccaatgcactgagtgaaggaagagagacagaggatcaagggctttagacagcactccttcaatatgcaatcacagagaaagatgcgccttatccaagttaatatctctaaggtgagagccttcttagagtcagtttgttgcaaatttcacctactctgttcttttccatccatccccctgagtcagttggttgaagggagttattttttcaagtggaattcaaacaaagctcaaaccagaactgtaaatagtgattgcaggaattcttttctaaactgctttgccctttcctctcactgccttttatagccaatataaatgtctctttgcacaccttttgttgtggttttatattgtaacaccatttttctttgaaactattgtatttaaagtaaggtttcatattatgtcagcaagtaattaacttatgtttaaaaggtggccatatcatgtaccaaaagttgctgaagtttctcttctagctggtaaagtaggagtttgcatgacttcacactttttttgcgtagtttcttctgttgtatgatggcgtgagtgtgtgtcttgggtaccgctgtgtactactgtgtgcctagattccatgcactctcgttgtgtttgaagtaaatattggagaccggagggtaacaggttggcctgttgattacagctagtaatcgctgtgtcttgttccgccccctccctgacaccccagcttcccaggatgtggaaagcctggatctcagctccttgccccatatcccttctgtaatttgtacctaaagagtgtgattatcctaattcaagagtcactaaaactcatcacattatcattgcatatcagcaaagggtaaagtcctagcaccaattgcttcacataccagcatgttccatttccaatttagaattagccacataataaaatcttagaatcttccttgagaaagagctgcctgagatgtagttttgttatatggttccccaccgaccatttttgtgcttttttcttgttttgttttgttttgactgcactgtgagttttgtagtgtcctcttcttgccaaaacaaacgcgagatgaactggacttatgtagacaaatcgtgatgccagtgtatccttcctttcttcagttccagcaataatgaatggtcaacttttttaaaatctagatctctctcattcatttcaatgtatttttactttaagatgaaccaaaattattagacttatttaagatgtacaggcatcagaaaaaagaagcacataatgcttttggtgcgatggcactcactgtgaacatgtgtaaccacatattaatatgcaatattgtttccaatactttctaatacagttttttataatgttgtgtgtggtgattgttcaggtcgaatctgttgtatccagtacagctttaggtcttcagctgcccttctggcgagtacatgcacaggattgtaaatgagaaatgcagtcatatttccagtctgcctctatgatgatgttaaattattgctgtttagctgtgaacaagggatgtaccactggaggaatagagtatccttttgtacacattttgaaatgcttcttctgtagtgatagaacaaataaatgcaacgaatactctgtctgccctatcccgtgaagtccacactggcgtaagagaaggcccagcagagcaggaatctgcctagactttctcccaatgagatcccaatatgagagggagaagagatgggcctcaggacagctgcaataccacttgggaacacatgtggtgtcttgatgtggccagcgcagcagttcagcacaacgtacctcccatctacaacagtgctggacgtgggaattctaagtcccagtcttgagggtgggtggagatggagggcaacaagagatacatttccagttctccactgcagcatgcttcagtcattctgtgagtggccgggcccagggccctcacaatttcactaccttgtcttttacatagtcataagaattatcctcaacatagccttttgacgctgtaaatcttgagtattcatttacccttttctgatctcctggaaacagctgcctgcctgcattgcacttctcttcccgaggagtggggtaaatttaaaagtcaagttatagtttggatgttagtatagaattttgaaattgggaattaaaaatcaggactggggactgggagaccaaaaatttctgatcccatttctgatggatgtgtcacaccttttctgtcaaaataaaatgtcttggaggttatgactccttggtg

SEQ ID NO: 141936 - DNA, 962 bp, Homo sapiens
  Payload ID: 7909
  Gene Symbol: IKZF1
  Gene Name: IKAROS family zinc finger 1 (Ikaros)
  ENST ID: ENST00000612658
  CDS Start-End: 156-962
cgcggcgcatcccagcctgggcgggacgctcggccgcggcgaggcgggcaagcctggcagggcagagggagccccggctccgaggttgctcttcgcacccgaggatcagtcttggccccaaagcgcgacgcacaaatccacataacctgaggaccatggatgctgatgagggtcaagacatgtcccaagtttcagggaaggaaagcccccctgtaagcgatactccagatgagggcgatgagcccatgccgatccccgaggacctctccaccacctcgggaggacagcaaagctccaagagtgacagagtcgtggttacatatggggctgatgactttagggatttccatgcaataattcccaaatctttctctcgagaacggcccttccagtgcaatcagtgcggggcctcattcacccagaagggcaacctgctccggcacatcaagctgcacaagccgctcgcggagggcaccccgcgctccaaccactcggcccaggacagcgccgtggagaacctgctgctgctctccaaggccaagttggtgccctcggagcgcgaggcgtccccgagcaacagctgccaagactccacggacaccgagagcaacaacgaggagcagcgcagcggtctcatctacctgaccaaccacatcgccccgcacgcgcgcaacgggctgtcgctcaaggaggagcaccgcgcctacgacctgctgcgcgccgcctccgagaactcgcaggacgcgctccgcgtggtcagcaccagcggggagcagatgaaggtgtacaagtgcgaacactgccgggtgctcttcctggatcacgtcatgtacaccatccacatgggctgccacggcttccgtgatccttttgagtgcaacatgtgcggctaccacagccaggaccggtacgagttctcgtcgcacataacgcgaggggagcaccgcttccacatgagctaa

SEQ ID NO: 141937 - DNA, 3747 bp, Homo sapiens
  Payload ID: 7910
  Gene Symbol: IKZF2
  Gene Name: IKAROS family zinc finger 2 (Helios)
  ENST ID: ENST00000342002
  CDS Start-End: 152-1750
gggcttggcttggagggggcaagggagggaaagagagaagggggaaacacaaaaaacttctttctttctccctccgtttatcttcagcccgacattgtcacctcctctttgaggggttagaagaagctgagatctcccgacagagctggaaatgcattgcactttgactatggaaacagaggctattgatggctatataacgtgtgacaatgagctttcacccgaaagggagcactccaatatggcaattgacctcacctcaagcacacccaatggacagcatgcctcaccaagtcacatgacaagcacaaattcagtaaagctagaaatgcagagtgatgaagagtgtgacaggaaacccctgagccgtgaagatgagatcaggggccatgatgagggtagcagcctagaagaacccctaattgagagcagcgaggtggctgacaacaggaaagtccaggagcttcaaggcgagggaggaatccggcttccgaatggtaaactgaaatgtgacgtctgtggcatggtttgcattgggcccaatgtgcttatggtacataaaaggagtcacactggtgaacgccccttccactgtaaccagtgtggagcttcttttactcagaagggcaaccttctgagacacataaagttacactctggagagaagccgttcaaatgtcctttctgtagctacgcctgtagaagaagggacgccctcacaggacacctcaggacccattctgtgggtaaacctcacaagtgcaactactgtggacgaagctacaagcagcgcagttcactggaggagcacaaggaacgctgccacaactatctccagaatgtcagcatggaggctgctgggcaggtcatgagtcaccatgtacctcctatggaagattgtaaggaacaagagcctattatggacaacaatatttctctggtgccttttgagagacctgctgtcatagagaagctcacggggaatatgggaaaacgtaaaagctccactccacaaaagtttgtgggggaaaagctcatgcgattcagctacccagatattcactttgatatgaacttaacatatgagaaggaggctgagctgatgcagtctcatatgatggaccaagccatcaacaatgcaatcacctaccttggagctgaggcccttcaccctctgatgcagcacccgccaagcacaatcgctgaagtggccccagttataagctcagcttattctcaggtctatcatccaaataggatagaaagacccattagcagggaaactgctgatagtcatgaaaacaacatggatggccccatctctctcatcagaccaaagagtcgaccccaggaaagagaggcctctcccagcaatagctgcctggattccactgactcagaaagcagccatgatgaccaccagtcctaccaaggacaccctgccttaaatcccaagaggaaacaaagcccagcttacatgaaggaggatgtcaaagctttggatactaccaaggctcctaagggctctctgaaggacatctacaaggtcttcaatggagaaggagaacagattagggccttcaagtgtgagcactgccgagtccttttcctagaccatgtcatgtacaccattcacatgggttgccatggctaccgggacccactggaatgcaacatctgtggctacagaagccaggaccgttatgagttttcatcacacattgttcgaggggagcacacattccactaggccttttcattccaaaggggacccctatgaagtaaagaactgcacatgaagaaatactgcacttacaatcccacctttcctcaaatgttgacataccttttattttttttaatattattactgttgataattcttattttgtggaggcagtgtcatttgctctgcctaattacgataaggaagaaacagaagagagaaggggcgggaatattgtttctttatcacctggcttgtttattttgtgggaatttaagagcagtccatttctaccaaggcatatcatgctttgaaaaatcacttgattcataaagattcacctaagagattctgatttgccactgatattcagaattatgatggaagacaggaaagttcagagttttctgggtaggactttggtggtttaaaaatggtataagtaactttattcttgaaagaagaatgtgtttcaaactgtaaaccaattttttgttcttcagagatcatggaacacaaacacattgttattttcagtgataactcctaagaggagctgagttgttgtgggttctatgtttacttcccctatggaatttataattcagtatgttttacactgtaccatatagcaaaacttttaaactacaggtagttaagggccacctacaatacatctgaggtcctgtgatcttatttttctaaacgtaagcactgtttttccatagttttgatgactggcattttatagacaccctggcagccttacttttaacacctttaaggaatagtatttttatgtagttttcagaataacatatggtctaagagtggataaaaggcagtcaataatttctgggagggacttctactttcataaatttgtttgagaggttttcttttaaagttgtaatgtgatggcagcatagtatatgtatttgtttctaaaagtatgcttacgattgtcactttatcagcatttaatcagtgttaaccagtcagcagaaaaatataattatgctaacagtagggggagaaaacccacttagaaatcccttttctggtatttctcttttcactagtttttttcaagatgtgacctcccggtgttctgtccatagttcattcatcctttactcttcgagtagaaggtcttaaaagtcttcctgtcggctgtttctttcaaaatctcctcagagcaattgctaatttggcctgaatctggtaacttgaaccctgtaaggttacagaactagggctatttattttagcatttcttcagtagtatttactactcttgttgcaaagaaaagggaatgggacttctttgtaacctgtaccttggacaacagataaaagaaacaaaaaaataagaaagtttacttttacccttcttggagtctagaatgtgacagaacccccaaaggaaagtcctgcacatttttctgtttccaaaacatttaattgtgtaagtccttgtcagaaatgaatctcaatcccttagtatagaattccccttacatggtataggttgccatatttcatgtgcagattttaatttcatttatgtgggcgctctgttttttctttgcagtccagccacattagaggggaggaaccgagtgatattgattcaagtcattttagggggacatacttggaaggcagaacttgctgcttctgtttggggaggacagacctgactgtgactggattatctgataaccatttgtgaatactgaaattctgttaggcagtaactgataactgctctaaaggatcattaaataggatgctgaaattatgtatcttaatacagtgtggtatgagaattaccaagtcaagagaattgtggacataagcaagtttggccccaatactgctcttaactcattttccagcttactatttgctatttaaatggtaggcaccagctaagcacttctaagcactaacacagctagaactaggcaaaaatggttagaactcagctctcttctactagtccctgtcataattat

SEQ ID NO: 141938 - DNA, 2001 bp, Homo sapiens
  Payload ID: 7910
  Gene Symbol: IKZF2
  Gene Name: IKAROS family zinc finger 2 (Helios)
  Uniprot ID: Q9UKS7
  ENST ID: ENST00000374319
  CDS Start-End: 311-1813
gctcctcgctgaagatggaggaagtaaaaacaggattacccttagctacagatccactgccttagtttccaccaccaactgcagtgcacaaacacacgttaggcacaggaaagaaagaaagacagaggacacattaacagtaaacacaaacaaaagggtgatgggattattttactgcatgcactgctgagcccgacattgtcacctcctctttgaggggttagaagaagctgagatctcccgacagagctggaaatggtgatgaatcttttttaatcaaaggacaatttcttttcattgcactttgactatggaaacagaggctattgatggctatataacgtgtgacaatgagctttcacccgaaagggagcactccaatatggcaattgacctcacctcaagcacacccaatggacagcatgcctcaccaagtcacatgacaagcacaaattcagtaaagctagaaatgcagagtgatgaagagtgtgacaggaaacccctgagccgtgaagatgagatcaggggccatgatgagggtagcagcctagaagaacccctaattgagagcagcgaggtggctgacaacaggaaagtccaggagcttcaaggcgagggaggaatccggcttccgaatggtgaacgccccttccactgtaaccagtgtggagcttcttttactcagaagggcaaccttctgagacacataaagttacactctggagagaagccgttcaaatgtcctttctgtagctacgcctgtagaagaagggacgccctcacaggacacctcaggacccattctgtgggtaaacctcacaagtgcaactactgtggacgaagctacaagcagcgcagttcactggaggagcacaaggaacgctgccacaactatctccagaatgtcagcatggaggctgctgggcaggtcatgagtcaccatgtacctcctatggaagattgtaaggaacaagagcctattatggacaacaatatttctctggtgccttttgagagacctgctgtcatagagaagctcacggggaatatgggaaaacgtaaaagctccactccacaaaagtttgtgggggaaaagctcatgcgattcagctacccagatattcactttgatatgaacttaacatatgagaaggaggctgagctgatgcagtctcatatgatggaccaagccatcaacaatgcaatcacctaccttggagctgaggcccttcaccctctgatgcagcacccgccaagcacaatcgctgaagtggccccagttataagctcagcttattctcaggtctatcatccaaataggatagaaagacccattagcagggaaactgctgatagtcatgaaaacaacatggatggccccatctctctcatcagaccaaagagtcgaccccaggaaagagaggcctctcccagcaatagctgcctggattccactgactcagaaagcagccatgatgaccaccagtcctaccaaggacaccctgccttaaatcccaagaggaaacaaagcccagcttacatgaaggaggatgtcaaagctttggatactaccaaggctcctaagggctctctgaaggacatctacaaggtcttcaatggagaaggagaacagattagggccttcaagtgtgagcactgccgagtccttttcctagaccatgtcatgtacaccattcacatgggttgccatggctaccgggacccactggaatgcaacatctgtggctacagaagccaggaccgttatgagttttcatcacacattgttcgaggggagcacacattccactaggccttttcattccaaaggggacccctatgaagtaaagaactgcacatgaagaaatactgcacttacaatcccacctttcctcaaatgttgacataccttttattttttttaatattattactgttgataattcttattttgtggaggcagtgtcatttgctctgcctaattacgataaggaagaaaca

SEQ ID NO: 141939 - DNA, 1401 bp, Homo sapiens
  Payload ID: 7910
  Gene Symbol: IKZF2
  Gene Name: IKAROS family zinc finger 2 (Helios)
  Uniprot ID: Q9UKS7
  ENST ID: ENST00000374326
  CDS Start-End: 1-159
atggaaacagaggctattgatggctatataacgtgtgacaatgagctttcacccgaaagggagcactccaatatggcaattgacctcacctcaagcacacccaatggacagcatgcctcaccaagtcacatgacaagcaggtctttttcaaaaatatagaattagaagtgtcctttgatatacttctgttccttgccagattacattcaaccattaatttaaggtgaacgccccttccactgtaaccagtgtggagcttcttttactcagaagggcaaccttctgagacacataaagttacactctggagagaagccgttcaaatgtcctttctgtagctacgcctgtagaagaagggacgccctcacaggacacctcaggacccattctgtgggtaaacctcacaagtgcaactactgtggacgaagctacaagcagcgcagttcactggaggagcacaaggaacgctgccacaactatctccagaatgtcagcatggaggctgctgggcaggtcatgagtcaccatgtacctcctatggaagattgtaaggaacaagagcctattatggacaacaatatttctctggtgccttttgagagacctgctgtcatagagaagctcacggggaatatgggaaaacgtaaaagctccactccacaaaagtttgtgggggaaaagctcatgcgattcagctacccagatattcactttgatatgaacttaacatatgagaaggaggctgagctgatgcagtctcatatgatggaccaagccatcaacaatgcaatcacctaccttggagctgaggcccttcaccctctgatgcagcacccgccaagcacaatcgctgaagtggccccagttataagctcagcttattctcaggtctatcatccaaataggatagaaagacccattagcagggaaactgctgatagtcatgaaaacaacatggatggccccatctctctcatcagaccaaagagtcgaccccaggaaagagaggcctctcccagcaatagctgcctggattccactgactcagaaagcagccatgatgaccaccagtcctaccaaggacaccctgccttaaatcccaagaggaaacaaagcccagcttacatgaaggaggatgtcaaagctttggatactaccaaggctcctaagggctctctgaaggacatctacaaggtcttcaatggagaaggagaacagattagggccttcaagtgtgagcactgccgagtccttttcctagaccatgtcatgtacaccattcacatgggttgccatggctaccgggacccactggaatgcaacatctgtggctacagaagccaggaccgttatgagttttcatcacacattgttcgaggggagcacacattccactaggcc

SEQ ID NO: 141940 - DNA, 1763 bp, Homo sapiens
  Payload ID: 7910
  Gene Symbol: IKZF2
  Gene Name: IKAROS family zinc finger 2 (Helios)
  Uniprot ID: Q9UKS7
  ENST ID: ENST00000439848
  CDS Start-End: 1-447
atggaaacagaggctattgatggctatataacgtgtgacaatgagctttcacccgaaagggagcactccaatatggcaattgacctcacctcaagcacacccaatggacagcatgcctcaccaagtcacatgacaagcacaaattcagtaaagctagaaatgcagagtgatgaagagtgtgacaggaaacccctgagccgtgaagatgagatcaggggccatgatgagggtagcagcctagaagaacccctaattgagagcagcgaggtggctgacaacaggaaagtccaggagcttcaaggcgagggaggaatccggcttccgaatggtaaactgaaatgtgacgtctgtggcatggtttgcattgggcccaatgtgcttatggtacataaaaggagtcacactggggtggcagtggtgaaaactaccttttcagaattctgctagtattggattgcagaaaaacagagagtagcctgggtcttgacttccagccttcaaatctgaatagcatatcagaaaagaagtttgggattcagtttccacagttcttaatatagcaataatatgataagggttcaaaaggtgaacgccccttccactgtaaccagtgtggagcttcttttactcagaagggcaaccttctgagacacataaagttacactctggagagaagccgttcaaatgtcctttctgtagctacgcctgtagaagaagggacgccctcacaggacacctcaggacccattctgtgggtaaacctcacaagtgcaactactgtggacgaagctacaagcagcgcagttcactggaggagcacaaggaacgctgccacaactatctccagaatgtcagcatggaggctgctgggcaggtcatgagtcaccatgtacctcctatggaagattgtaaggaacaagagcctattatggacaacaatatttctctggtgccttttgagagacctgctgtcatagagaagctcacggggaatatgggaaaacgtaaaagctccactccacaaaagtttgtgggggaaaagctcatgcgattcagctacccagatattcactttgatatgaacttaacatatgagaaggaggctgagctgatgcagtctcatatgatggaccaagccatcaacaatgcaatcacctaccttggagctgaggcccttcaccctctgatgcagcacccgccaagcacaatcgctgaagtggccccagttataagctcagcttattctcaggtctatcatccaaataggatagaaagacccattagcagggaaactgctgatagtcatgaaaacaacatggatggccccatctctctcatcagaccaaagagtcgaccccaggaaagagaggcctctcccagcaatagctgcctggattccactgactcagaaagcagccatgatgaccaccagtcctaccaaggacaccctgccttaaatcccaagaggaaacaaagcccagcttacatgaaggaggatgtcaaagctttggatactaccaaggctcctaagggctctctgaaggacatctacaaggtcttcaatggagaaggagaacagattagggccttcaagtgtgagcactgccgagtccttttcctagaccatgtcatgtacaccattcacatgggttgccatggctaccgggacccactggaatgcaacatctgtggctacagaagccaggaccgttatgagttttcatcacacattgttcgaggggagcacacattccactaggcc

SEQ ID NO: 141941 - DNA, 551 bp, Homo sapiens
  Payload ID: 7910
  Gene Symbol: IKZF2
  Gene Name: IKAROS family zinc finger 2 (Helios)
  ENST ID: ENST00000442445
  CDS Start-End: 59-337
attgtcacctcctctttgaggggttagaagaagctgagatctcccgacagagctggaaatgcattgcactttgactatggaaacagaggctattgatggctatataacgtgtgacaatgagctttcacccgaaagggagcactccaatatggcaattgacctcacctcaagcacacccaatggacagcatgcctcaccaagtcacatgacaagcagtaagtcttcattttatgatttttttttgtgtgtgtgtgtctctccagcaacagactttaatttgttaggtctgtggggtcctctcacattgtggtatagctactgttatagattttgctaaagaaagaacaacacagatttattcctgttcattctagtattataaaacatgagcctgcttactagtctgaactatcccaaggtggcatttgggagctggtgcttacctgtatcaggtaagaaaggttagaatttgctggttgttgttttgacttgccaggtttatgactggattttttgttgttgttgggtaaaaaatgtggaaacgtcacttc

SEQ ID NO: 141942 - DNA, 9344 bp, Homo sapiens
  Payload ID: 7910
  Gene Symbol: IKZF2
  Gene Name: IKAROS family zinc finger 2 (Helios)
  ENST ID: ENST00000451136
  CDS Start-End: 446-1675
aaccctgctcctcgctgaagatggaggaagtaaaaacaggattacccttagctacagatccactgccttagtttccaccaccaactgcagtgcacaaacacacgttaggcacaggaaagaaagaaagacagaggacacattaacagtaaacacaaacaaaagggtgatgggattattttactgcatgcactgctgagcccgacattgtcacctcctctttgaggggttagaagaagctgagatctcccgacagagctggaaatggtgatgaatcttttttaatcaaaggacaatttcttttcattgcactttgactatggaaacagaggctattgatggctatataacgtgtgacaatgagctttcacccgaaagggagcactccaatatggcaattgacctcacctcaagcacacccaatggacagcatgcctcaccaagtcacatgacaagcacaaattcagtaaagctagaaatgcagagtgatgaagagtgtgacaggaaacccctgagccgtgaagatgagatcaggggccatgatgagggtagcagcctagaagaacccctaattgagagcagcgaggtggctgacaacaggaaagtccaggagcttcaaggcgagggaggaatccggcttccgaatggtgaacgccccttccactgtaaccagtgtggagcttcttttactcagaagggcaaccttctgagacacataaagttacactctggagagaagccgttcaaatgtcctttctgtagctacgcctgtagaagaagggacgccctcacaggacacctcaggacccattctgtgggtaaacctcacaagtgcaactactgtggacgaagctacaagcagcgcagttcactggaggagcacaaggaacgctgccacaactatctccagaatgtcagcatggaggctgctgggcaggtcatgagtcaccatggggaaaagctcatgcgattcagctacccagatattcactttgatatgaacttaacatatgagaaggaggctgagctgatgcagtctcatatgatggaccaagccatcaacaatgcaatcacctaccttggagctgaggcccttcaccctctgatgcagcacccgccaagcacaatcgctgaagtggccccagttataagctcagcttattctcaggtctatcatccaaataggatagaaagacccattagcagggaaactgctgatagtcatgaaaacaacatggatggccccatctctctcatcagaccaaagagtcgaccccaggaaagagaggcctctcccagcaatagctgcctggattccactgactcagaaagcagccatgatgaccaccagtcctaccaaggacaccctgccttaaatcccaagaggaaacaaagcccagcttacatgaaggaggatgtcaaagctttggatactaccaaggctcctaagggctctctgaaggacatctacaaggtcttcaatggagaaggagaacagattagggccttcaagtgtgagcactgccgagtccttttcctagaccatgtcatgtacaccattcacatgggttgccatggctaccgggacccactggaatgcaacatctgtggctacagaagccaggaccgttatgagttttcatcacacattgttcgaggggagcacacattccactaggccttttcattccaaaggggacccctatgaagtaaagaactgcacatgaagaaatactgcacttacaatcccacctttcctcaaatgttgacataccttttattttttttaatattattactgttgataattcttattttgtggaggcagtgtcatttgctctgcctaattacgataaggaagaaacagaagagagaaggggcgggaatattgtttctttatcacctggcttgtttattttgtgggaatttaagagcagtccatttctaccaaggcatatcatgctttgaaaaatcacttgattcataaagattcacctaagagattctgatttgccactgatattcagaattatgatggaagacaggaaagttcagagttttctgggtaggactttggtggtttaaaaatggtataagtaactttattcttgaaagaagaatgtgtttcaaactgtaaaccaattttttgttcttcagagatcatggaacacaaacacattgttattttcagtgataactcctaagaggagctgagttgttgtgggttctatgtttacttcccctatggaatttataattcagtatgttttacactgtaccatatagcaaaacttttaaactacaggtagttaagggccacctacaatacatctgaggtcctgtgatcttatttttctaaacgtaagcactgtttttccatagttttgatgactggcattttatagacaccctggcagccttacttttaacacctttaaggaatagtatttttatgtagttttcagaataacatatggtctaagagtggataaaaggcagtcaataatttctgggagggacttctactttcataaatttgtttgagaggttttcttttaaagttgtaatgtgatggcagcatagtatatgtatttgtttctaaaagtatgcttacgattgtcactttatcagcatttaatcagtgttaaccagtcagcagaaaaatataattatgctaacagtagggggagaaaacccacttagaaatcccttttctggtatttctcttttcactagtttttttcaagatgtgacctcccggtgttctgtccatagttcattcatcctttactcttcgagtagaaggtcttaaaagtcttcctgtcggctgtttctttcaaaatctcctcagagcaattgctaatttggcctgaatctggtaacttgaaccctgtaaggttacagaactagggctatttattttagcatttcttcagtagtatttactactcttgttgcaaagaaaagggaatgggacttctttgtaacctgtaccttggacaacagataaaagaaacaaaaaaataagaaagtttacttttacccttcttggagtctagaatgtgacagaacccccaaaggaaagtcctgcacatttttctgtttccaaaacatttaattgtgtaagtccttgtcagaaatgaatctcaatcccttagtatagaattccccttacatggtataggttgccatatttcatgtgcagattttaatttcatttatgtgggcgctctgttttttctttgcagtccagccacattagaggggaggaaccgagtgatattgattcaagtcattttagggggacatacttggaaggcagaacttgctgcttctgtttggggaggacagacctgactgtgactggattatctgataaccatttgtgaatactgaaattctgttaggcagtaactgataactgctctaaaggatcattaaataggatgctgaaattatgtatcttaatacagtgtggtatgagaattaccaagtcaagagaattgtggacataagcaagtttggccccaatactgctcttaactcattttccagcttactatttgctatttaaatggtaggcaccagctaagcacttctaagcactaacacagctagaactaggcaaaaatggttagaactcagctctcttctactagtccctgtcataattatttttgggaaaatgtccaaactgccccctttaaatctaagggaatgcaccaaaacagagatatatagaatgtcaaccatttcatttttttttttctgcatgccttggtacatagtgaacatacaacctatttaaagataaagcatgtttttgagactcgctcacccccccccacccaaccactcccaaataataattgggatgccattttttttccttttggatgaggtaaataattttaaggttcacaattttgtcttttactgcaatttaaggaaacatttggatgtcagtcaatatgttcataattttggctgtgtgcgaatttctgctggcattatctatgaattttcttcctacttatttttttttcagtatatgaacaatcatgtatctacctgccccaggatgaaactaaatttaggtggaccctaaaccttatgaagacagtgctgaggcactttccttttctgatttcatctttttgggaatctgttttattgaaggtagttagtagttgagagtgcatttgctacaagcatatacttgtatcttcctagcttcatgaggaacagaaagaggtggatatggctcagggtgtggcagggacaattgaggacaaagtcaattcaaatttgtgggtcagaaagaatttttgtggacgtagtgtttttggagaaactctggatggttatatgtgcatgccttttcttcaaaaggaaatacgcaaggttgtagcatctaaaaataaacataagagtcagacaccaaataaatcaagttttacataacagttgtatgcccagtttgtttaggtgagatttcacattacagaaagtatttgaggagcatgaaaatgggttatcttctgtattttccagtttggcaaaagttcagaatttcatcacattgctttgccctaattttgcccagaattttatcttagcctctctctgacagtgatgaatcatgctcaaaagccattctaattggacctttttaagacagggaaagggatcagtaggcggattggaagaaatttcaagtcattgaaatattccattgagatttcctaaagggacaaaattgggaaaataagaaactacgacttagatttggctacgtagtagaaagtatctcccctacatacatacaggcaattgtatgtatgaatcatagggtatatgtgtgtgtatactacacacacattcttttaaagagaattcatggaaaaaaaagcagttggagtgatcagatgtattgcaaaaacatacagagaatttaaatgacagttaataccaagaaattagttgggtttactttatcaggtcgtaataggaatcactaaagaagttactagtgtgtctttaggaccagtggcaactcttaaactaaaactttgggtccttattatctacttacagaacaaagtgaaacaaacaatgattaagctgattggatatacattcaaagatatttaatgtaaagttttttggaatacgaagaaaattcagaaaataaatattatcaacagttacttattggcaaatagagaaagacaagaatagtttagtgagcccggtattttgtttttatagtttttatctcagttgtacaactcacaaaaccatgaagtctttggtattttataaatgtttaacaaaatttacatcagattaaggcatttagatgaaaattattatgttctcactatcttccaaattttatttcatcctatctccaaaatgatttcttagggtacaaaaagagcagacggggctgtaaaaatacaagcaaaaaactgtgtgcccctagtttcaggcagaacttaaactgtcagaggtactagctacatgatttgttttttaactttggattgttcacgtccaaaaatggataaattacatttgtgtttatcatcagttgcattttatgtattattttaataaatactatctgaatgaagactattctaaaccagaaaattccccaaatccaaaagaaaaaaaaagtgggaagaggtgaaattgaagtttgtgtatatgaaagttatcttagacatatttttaattctccagtttctgcaaaataattaaaatatacagtaactggtctcctaaatcctgaatttaatgtattaaatacttatgttctttatattggtgcctttttaaaatgcattgagagtgttggttagctgttgcagctgtacaacacttttaatatgcatttttaaaaatcacttaaaattgagtactatataattcatctctgcatttttagtgcaaatctttagagcaatttctaatagagaaattttcagctcagctgttaaaaggaaaaggaaactttgaaactagactttactacctttttagtttcatagtatttctgaatatgattacaagattatgcaggtaaaatatagagtgaaactttacctgtgaattgaattataatttgtgtttttgttttgtttttaaggaagaataagttctgtatcaaacaagaatttattagataattttttggtcaataaaatacagtattcatttggattttcatctccagactagtattgttctagtcttggaatctgtattttctaatctgttagaaaatagagattgaaaattgatggaataatgtgaaaaagcaggtaattaattctccttgaacaaagcaaaactgaacagtcatatcacattgctattctccaaagcataatctcaaatggtttcatatcatggttgtgtattacttgcaatgggtgtgttaggatatgacagctttttaaaaaaatgagctgctggttatacaaagcaaatggcatatgaccaagaagctgtgatatgctagtgtttctttttatcatagtgtattactaggccaaataatgacaccttgaatatttttacatttattgcagaaaccttaaactttggaatttccataaggtttttatgtaatattctatttctagctttttagttttatcttgctgtactgtaagtttgaggatatttttcacctgcactcttaggaataagttcataattctgtttatggggctttcctcccataacactgcatttgtatattttctgtataaaatatgtgttgtgtattaacctttatcccatacagagagtggtacatgaatgactagttttctaagatgtcctttttattgtgaataaaatataaaagttaaaggccctctgctaagtcacataaagtacagcatataagttcatataggtacaaataaatgagtttgcagtgaattgggccttcaaattacctcaagtgacagatagtaagaaaagcttcttgagcaggtggaggtcactgaatcccctactatgcacttaccaagattttacttactttaatttactggaaattgattttttaaaaaatgactacactgtaacaagggaagggatctgggtttttttgttgttttattcttgttttttttaagtagttcaaattctgaaactgtgatttaaaaattttttacagtcaagcattctgattttgaacataactcccttccctttctgtgtaacaaaggtctctctgttatctcttaaattttgttacatctccctcagcctctttctttgtccgtctcccttctgtcattgtctatggatgtttacctctctgttctcctaaaagtttgaagattaggtcaactcttatttctagttcattggtaatttaatcttaatttttttttcgtgatttttgttggttgtataatctgctgacgtatttttatactcaagtgtagttttctattaaaaagaaaagtggttggattaaaaatagtaagctatgtaaccctcatgttactttcactttcaaatattgggtacctaaaacattacttcagagattatgtaatcctattatagtatgtttgctttcctttattgttggattttacattctgatttggctttcctccaaaaaatgtatatcatgaaagactagacagttatttgcaagtgtttagaaaggtgttaaaaatgtaaagcaaagagtcttaactttctcctaattgggagaaaaatgctttaacattactataataatattccaggtttggagggggtctccaggccccatatttgctgttaatagttggaccttttagaccatgtgttatttgcaatcccagaatgattgcttctgctattagttaaaaagatactattcttttctttctgtacaagtgcaatactccccttgaagtcttaaaaactatggtgatttttttttcttttctgacctattcttcctttagctaatgacaaaaagaaactcataaaagtcatagtatgttaaaggacacaacaagcaaagagaaaaacactccacaatcaaaagattacagaatgtggaaaccactagtctgatctcatggtatctttatttaagctaaatttccatggaaattagtaatcttttgcttgaaaaatgtgtcctaaagttgaactttttacagattgaatcttcttagaccctcgcccaatgctctaaattaagaacctaatacttaatatttttattttacttctccccttttagaaataaacttttaaataaaagcaaagcacttagctgagttttaaacacttacatatcacctattggagaaattttttttaaaaatatttggagcagtcctgttttcatacaaatttaagtaagaggtatttttcttatacatatttatatgtagtgtgctaattttctttttttatacctgtgtccctgtagtaaaactgctgtaatataaatacatgttttgttaaaagataacatttctttggcatttcttttaaaggcagttactgcatttctgcatttgtacagtatgtgtcttggccattttagatattctttctttaacaataccaaaggtaattagactattttaaagactaattgcttgacagtttctagggtattttgtgttttagaagcaaaaaaagaaaaaaaaataggtcaaaccagtaaacctcattttttttcaaactaataatttggggaaataaaaactattgtttaaaaaagaaatatatatatatatatataaatatatatgtaaagttaaaattccataccttgtatgtcaggtttgctaagtgtaatgtagtttttttaaggctcaaataccatacctcagaaaatgaggtttactatggaaatactgaaacagtctttgcagctgtgtgacaagtcactctactacatactgatttggagacctccgctaaatagttttatcactgcagactaaaatgtgggacttgtatcttctttgtttttaatgcacacacatacatgttctgtgcatgtatgtggttactgtgtatatgtgtatgagtgttgtatatgcatgtgtgagtgtgtgtctgtatgtgtgtacaactaaagaagctgcagaaactttgtaatactttgtgaaaaggattatattataaaggtttgtactgtctgagtgcacagctactggaataaatttagggaatctcaggaacaagcatataatttgtccaagatttatttcttctcagaagtgtaagtgcagtttttaattctgtatattatttaatattttaccaataaaataaacttctgacataaaaagtttgct

SEQ ID NO: 141943 - DNA, 1780 bp, Homo sapiens
  Payload ID: 7910
  Gene Symbol: IKZF2
  Gene Name: IKAROS family zinc finger 2 (Helios)
  Uniprot ID: Q9UKS7
  ENST ID: ENST00000431520
  CDS Start-End: 1-720
atggaaacagaggctattgatggctatataacgtgtgacaatgagctttcacccgaaagggagcactccaatatggcaattgacctcacctcaagcacacccaatggacagcatgcctcaccaagtcacatgacaagcacaaattcagtaaagctagaaatgcagagtgatgaagagtgtgacaggaaacccctgagccgtgaagatgagatcaggggccatgatgagggtagcagcctagaagaacccctaattgagagcagcgaggtggctgacaacaggaaagtccaggagcttcaaggcgagggaggaatccggcttccgaatggtaaactgaaatgtgacgtctgtggcatggtttgcattgggcccaatgtgcttatggtacataaaaggagtcacactggtgaacgccccttccactgtaaccagtgtggagcttcttttactcagaagggcaaccttctgagacacataaagttacactctggagagaagccgttcaaatgtcctttctgtagctacgcctgtagaagaagggacgccctcacaggacacctcaggacccattctgtgggtaaacctcacaagtgcaactactgtggacgaagctacaagcagcgcagttcactggaggagcacaaggaacgctgccacaactatctccagaatgtcagcatggaggctgctgggcaggtcatgagtcaccatgatagttagagctgattccacattagtctgtaggctgcctaaaagaatgaattggttatttgaatattttcatctcagatcgggtaacacggagaaaatttgcaacaatatagaagacatctgttgtttttgcctgcctgacatcccttcctccttctcttgataacaagagtgcccatttacctttagagaactttccttacctcctatggaagattgtaaggaacaagagcctattatggacaacaatatttctctggtgccttttgagagacctgctgtcatagagaagctcacggggaatatgggaaaacgtaaaagctccactccacaaaagtttgtgggggaaaagctcatgcgattcagctacccagatattcactttgatatgaacttaacatatgagaaggaggctgagctgatgcagtctcatatgatggaccaagccatcaacaatgcaatcacctaccttggagctgaggcccttcaccctctgatgcagcacccgccaagcacaatcgctgaagtggccccagttataagctcagcttattctcaggtctatcatccaaataggatagaaagacccattagcagggaaactgctgatagtcatgaaaacaacatggatggccccatctctctcatcagaccaaagagtcgaccccaggaaagagaggcctctcccagcaatagctgcctggattccactgactcagaaagcagccatgatgaccaccagtcctaccaaggacaccctgccttaaatcccaagaggaaacaaagcccagcttacatgaaggaggatgtcaaagctttggatactaccaaggctcctaagggctctctgaaggacatctacaaggtcttcaatggagaaggagaacagattagggccttcaagtgtgagcactgccgagtccttttcctagaccatgtcatgtacaccattcacatgggttgccatggctaccgggacccactggaatgcaacatctgtggctacagaagccaggaccgttatgagttttcatcacacattgttcgaggggagcacacattccactag

SEQ ID NO: 141944 - DNA, 567 bp, Homo sapiens
  Payload ID: 7910
  Gene Symbol: IKZF2
  Gene Name: IKAROS family zinc finger 2 (Helios)
  ENST ID: ENST00000452786
  CDS Start-End: 318-567
gacatgaatgtctttctcagtctattccccaggacccctcttatcccgcttcaggtcccggtcaatgcggtgcgctttccgaaatggggccgcagagttgccggcggagaccagtaggtgggaggctccacgcacactccccgactcggccgggacgcggctcccggactccgcgcagggcgccaagatcgccgccccgctcccttcccccggcctccccaccaatcccagtttgaaagaaaacttcacgcggccgaaatgaacgtcacctcaccgctccaagcctccagccggcagaaaaccattgcactttgactatggaaacagaggctattgatggctatataacgtgtgacaatgagctttcacccgaaagggagcactccaatatggcaattgacctcacctcaagcacacccaatggacagcatgcctcaccaagtcacatgacaagcacaaattcagtaaagctagaaatgcagagtgatgaagagtgtgacaggaaacccctgagccgtgaagatgagatcaggggccatgatgagggtagcagcctagaagaacccc

SEQ ID NO: 141945 - DNA, 602 bp, Homo sapiens
  Payload ID: 7910
  Gene Symbol: IKZF2
  Gene Name: IKAROS family zinc finger 2 (Helios)
  ENST ID: ENST00000433134
  CDS Start-End: 226-602
gtttgctggatttgggcttggaatgacccacctgtaaagtgcttttccttcctcctccccttgaactctgcagggggcttggcttggagggggcaagggagggaaagagagaagggggaaacacaaaaaacttctttctttctccctccgtttatcttcagcccgacattgtcacctcctctttgaggggttagaagaagctgagatctcccgacagagctggaaatgcattgcactttgactatggaaacagaggctattgatggctatataacgtgtgacaatgagctttcacccgaaagggagcactccaatatggcaattgacctcacctcaagcacacccaatggacagcatgcctcaccaagtcacatgacaagcacaaattcagtaaagctagaaatgcagagtgatgaagagtgtgacaggaaacccctgagccgtgaagatgagatcaggggccatgatgagggtagcagcctagaagaacccctaattgagagcagcgaggtggctgacaacaggaaagtccaggagcttcaaggcgagggaggaatccggcttccgaatggtgaacgccccttccactgtaaccagtgtgg

SEQ ID NO: 141946 - DNA, 9350 bp, Homo sapiens
  Payload ID: 7910
  Gene Symbol: IKZF2
  Gene Name: IKAROS family zinc finger 2 (Helios)
  ENST ID: ENST00000457361
  CDS Start-End: 446-1681
aaccctgctcctcgctgaagatggaggaagtaaaaacaggattacccttagctacagatccactgccttagtttccaccaccaactgcagtgcacaaacacacgttaggcacaggaaagaaagaaagacagaggacacattaacagtaaacacaaacaaaagggtgatgggattattttactgcatgcactgctgagcccgacattgtcacctcctctttgaggggttagaagaagctgagatctcccgacagagctggaaatggtgatgaatcttttttaatcaaaggacaatttcttttcattgcactttgactatggaaacagaggctattgatggctatataacgtgtgacaatgagctttcacccgaaagggagcactccaatatggcaattgacctcacctcaagcacacccaatggacagcatgcctcaccaagtcacatgacaagcacaaattcagtaaagctagaaatgcagagtgatgaagagtgtgacaggaaacccctgagccgtgaagatgagatcaggggccatgatgagggtagcagcctagaagaacccctaattgagagcagcgaggtggctgacaacaggaaagtccaggagcttcaaggcgagggaggaatccggcttccgaatggtgaacgccccttccactgtaaccagtgtggagcttcttttactcagaagggcaaccttctgagacacataaagttacactctggagagaagccgttcaaatgtcctttctgtagctacgcctgtagaagaagggacgccctcacaggacacctcaggacccattctgtacctcctatggaagattgtaaggaacaagagcctattatggacaacaatatttctctggtgccttttgagagacctgctgtcatagagaagctcacggggaatatgggaaaacgtaaaagctccactccacaaaagtttgtgggggaaaagctcatgcgattcagctacccagatattcactttgatatgaacttaacatatgagaaggaggctgagctgatgcagtctcatatgatggaccaagccatcaacaatgcaatcacctaccttggagctgaggcccttcaccctctgatgcagcacccgccaagcacaatcgctgaagtggccccagttataagctcagcttattctcaggtctatcatccaaataggatagaaagacccattagcagggaaactgctgatagtcatgaaaacaacatggatggccccatctctctcatcagaccaaagagtcgaccccaggaaagagaggcctctcccagcaatagctgcctggattccactgactcagaaagcagccatgatgaccaccagtcctaccaaggacaccctgccttaaatcccaagaggaaacaaagcccagcttacatgaaggaggatgtcaaagctttggatactaccaaggctcctaagggctctctgaaggacatctacaaggtcttcaatggagaaggagaacagattagggccttcaagtgtgagcactgccgagtccttttcctagaccatgtcatgtacaccattcacatgggttgccatggctaccgggacccactggaatgcaacatctgtggctacagaagccaggaccgttatgagttttcatcacacattgttcgaggggagcacacattccactaggccttttcattccaaaggggacccctatgaagtaaagaactgcacatgaagaaatactgcacttacaatcccacctttcctcaaatgttgacataccttttattttttttaatattattactgttgataattcttattttgtggaggcagtgtcatttgctctgcctaattacgataaggaagaaacagaagagagaaggggcgggaatattgtttctttatcacctggcttgtttattttgtgggaatttaagagcagtccatttctaccaaggcatatcatgctttgaaaaatcacttgattcataaagattcacctaagagattctgatttgccactgatattcagaattatgatggaagacaggaaagttcagagttttctgggtaggactttggtggtttaaaaatggtataagtaactttattcttgaaagaagaatgtgtttcaaactgtaaaccaattttttgttcttcagagatcatggaacacaaacacattgttattttcagtgataactcctaagaggagctgagttgttgtgggttctatgtttacttcccctatggaatttataattcagtatgttttacactgtaccatatagcaaaacttttaaactacaggtagttaagggccacctacaatacatctgaggtcctgtgatcttatttttctaaacgtaagcactgtttttccatagttttgatgactggcattttatagacaccctggcagccttacttttaacacctttaaggaatagtatttttatgtagttttcagaataacatatggtctaagagtggataaaaggcagtcaataatttctgggagggacttctactttcataaatttgtttgagaggttttcttttaaagttgtaatgtgatggcagcatagtatatgtatttgtttctaaaagtatgcttacgattgtcactttatcagcatttaatcagtgttaaccagtcagcagaaaaatataattatgctaacagtagggggagaaaacccacttagaaatcccttttctggtatttctcttttcactagtttttttcaagatgtgacctcccggtgttctgtccatagttcattcatcctttactcttcgagtagaaggtcttaaaagtcttcctgtcggctgtttctttcaaaatctcctcagagcaattgctaatttggcctgaatctggtaacttgaaccctgtaaggttacagaactagggctatttattttagcatttcttcagtagtatttactactcttgttgcaaagaaaagggaatgggacttctttgtaacctgtaccttggacaacagataaaagaaacaaaaaaataagaaagtttacttttacccttcttggagtctagaatgtgacagaacccccaaaggaaagtcctgcacatttttctgtttccaaaacatttaattgtgtaagtccttgtcagaaatgaatctcaatcccttagtatagaattccccttacatggtataggttgccatatttcatgtgcagattttaatttcatttatgtgggcgctctgttttttctttgcagtccagccacattagaggggaggaaccgagtgatattgattcaagtcattttagggggacatacttggaaggcagaacttgctgcttctgtttggggaggacagacctgactgtgactggattatctgataaccatttgtgaatactgaaattctgttaggcagtaactgataactgctctaaaggatcattaaataggatgctgaaattatgtatcttaatacagtgtggtatgagaattaccaagtcaagagaattgtggacataagcaagtttggccccaatactgctcttaactcattttccagcttactatttgctatttaaatggtaggcaccagctaagcacttctaagcactaacacagctagaactaggcaaaaatggttagaactcagctctcttctactagtccctgtcataattatttttgggaaaatgtccaaactgccccctttaaatctaagggaatgcaccaaaacagagatatatagaatgtcaaccatttcatttttttttttctgcatgccttggtacatagtgaacatacaacctatttaaagataaagcatgtttttgagactcgctcacccccccccacccaaccactcccaaataataattgggatgccattttttttccttttggatgaggtaaataattttaaggttcacaattttgtcttttactgcaatttaaggaaacatttggatgtcagtcaatatgttcataattttggctgtgtgcgaatttctgctggcattatctatgaattttcttcctacttatttttttttcagtatatgaacaatcatgtatctacctgccccaggatgaaactaaatttaggtggaccctaaaccttatgaagacagtgctgaggcactttccttttctgatttcatctttttgggaatctgttttattgaaggtagttagtagttgagagtgcatttgctacaagcatatacttgtatcttcctagcttcatgaggaacagaaagaggtggatatggctcagggtgtggcagggacaattgaggacaaagtcaattcaaatttgtgggtcagaaagaatttttgtggacgtagtgtttttggagaaactctggatggttatatgtgcatgccttttcttcaaaaggaaatacgcaaggttgtagcatctaaaaataaacataagagtcagacaccaaataaatcaagttttacataacagttgtatgcccagtttgtttaggtgagatttcacattacagaaagtatttgaggagcatgaaaatgggttatcttctgtattttccagtttggcaaaagttcagaatttcatcacattgctttgccctaattttgcccagaattttatcttagcctctctctgacagtgatgaatcatgctcaaaagccattctaattggacctttttaagacagggaaagggatcagtaggcggattggaagaaatttcaagtcattgaaatattccattgagatttcctaaagggacaaaattgggaaaataagaaactacgacttagatttggctacgtagtagaaagtatctcccctacatacatacaggcaattgtatgtatgaatcatagggtatatgtgtgtgtatactacacacacattcttttaaagagaattcatggaaaaaaaagcagttggagtgatcagatgtattgcaaaaacatacagagaatttaaatgacagttaataccaagaaattagttgggtttactttatcaggtcgtaataggaatcactaaagaagttactagtgtgtctttaggaccagtggcaactcttaaactaaaactttgggtccttattatctacttacagaacaaagtgaaacaaacaatgattaagctgattggatatacattcaaagatatttaatgtaaagttttttggaatacgaagaaaattcagaaaataaatattatcaacagttacttattggcaaatagagaaagacaagaatagtttagtgagcccggtattttgtttttatagtttttatctcagttgtacaactcacaaaaccatgaagtctttggtattttataaatgtttaacaaaatttacatcagattaaggcatttagatgaaaattattatgttctcactatcttccaaattttatttcatcctatctccaaaatgatttcttagggtacaaaaagagcagacggggctgtaaaaatacaagcaaaaaactgtgtgcccctagtttcaggcagaacttaaactgtcagaggtactagctacatgatttgttttttaactttggattgttcacgtccaaaaatggataaattacatttgtgtttatcatcagttgcattttatgtattattttaataaatactatctgaatgaagactattctaaaccagaaaattccccaaatccaaaagaaaaaaaaagtgggaagaggtgaaattgaagtttgtgtatatgaaagttatcttagacatatttttaattctccagtttctgcaaaataattaaaatatacagtaactggtctcctaaatcctgaatttaatgtattaaatacttatgttctttatattggtgcctttttaaaatgcattgagagtgttggttagctgttgcagctgtacaacacttttaatatgcatttttaaaaatcacttaaaattgagtactatataattcatctctgcatttttagtgcaaatctttagagcaatttctaatagagaaattttcagctcagctgttaaaaggaaaaggaaactttgaaactagactttactacctttttagtttcatagtatttctgaatatgattacaagattatgcaggtaaaatatagagtgaaactttacctgtgaattgaattataatttgtgtttttgttttgtttttaaggaagaataagttctgtatcaaacaagaatttattagataattttttggtcaataaaatacagtattcatttggattttcatctccagactagtattgttctagtcttggaatctgtattttctaatctgttagaaaatagagattgaaaattgatggaataatgtgaaaaagcaggtaattaattctccttgaacaaagcaaaactgaacagtcatatcacattgctattctccaaagcataatctcaaatggtttcatatcatggttgtgtattacttgcaatgggtgtgttaggatatgacagctttttaaaaaaatgagctgctggttatacaaagcaaatggcatatgaccaagaagctgtgatatgctagtgtttctttttatcatagtgtattactaggccaaataatgacaccttgaatatttttacatttattgcagaaaccttaaactttggaatttccataaggtttttatgtaatattctatttctagctttttagttttatcttgctgtactgtaagtttgaggatatttttcacctgcactcttaggaataagttcataattctgtttatggggctttcctcccataacactgcatttgtatattttctgtataaaatatgtgttgtgtattaacctttatcccatacagagagtggtacatgaatgactagttttctaagatgtcctttttattgtgaataaaatataaaagttaaaggccctctgctaagtcacataaagtacagcatataagttcatataggtacaaataaatgagtttgcagtgaattgggccttcaaattacctcaagtgacagatagtaagaaaagcttcttgagcaggtggaggtcactgaatcccctactatgcacttaccaagattttacttactttaatttactggaaattgattttttaaaaaatgactacactgtaacaagggaagggatctgggtttttttgttgttttattcttgttttttttaagtagttcaaattctgaaactgtgatttaaaaattttttacagtcaagcattctgattttgaacataactcccttccctttctgtgtaacaaaggtctctctgttatctcttaaattttgttacatctccctcagcctctttctttgtccgtctcccttctgtcattgtctatggatgtttacctctctgttctcctaaaagtttgaagattaggtcaactcttatttctagttcattggtaatttaatcttaatttttttttcgtgatttttgttggttgtataatctgctgacgtatttttatactcaagtgtagttttctattaaaaagaaaagtggttggattaaaaatagtaagctatgtaaccctcatgttactttcactttcaaatattgggtacctaaaacattacttcagagattatgtaatcctattatagtatgtttgctttcctttattgttggattttacattctgatttggctttcctccaaaaaatgtatatcatgaaagactagacagttatttgcaagtgtttagaaaggtgttaaaaatgtaaagcaaagagtcttaactttctcctaattgggagaaaaatgctttaacattactataataatattccaggtttggagggggtctccaggccccatatttgctgttaatagttggaccttttagaccatgtgttatttgcaatcccagaatgattgcttctgctattagttaaaaagatactattcttttctttctgtacaagtgcaatactccccttgaagtcttaaaaactatggtgatttttttttcttttctgacctattcttcctttagctaatgacaaaaagaaactcataaaagtcatagtatgttaaaggacacaacaagcaaagagaaaaacactccacaatcaaaagattacagaatgtggaaaccactagtctgatctcatggtatctttatttaagctaaatttccatggaaattagtaatcttttgcttgaaaaatgtgtcctaaagttgaactttttacagattgaatcttcttagaccctcgcccaatgctctaaattaagaacctaatacttaatatttttattttacttctccccttttagaaataaacttttaaataaaagcaaagcacttagctgagttttaaacacttacatatcacctattggagaaattttttttaaaaatatttggagcagtcctgttttcatacaaatttaagtaagaggtatttttcttatacatatttatatgtagtgtgctaattttctttttttatacctgtgtccctgtagtaaaactgctgtaatataaatacatgttttgttaaaagataacatttctttggcatttcttttaaaggcagttactgcatttctgcatttgtacagtatgtgtcttggccattttagatattctttctttaacaataccaaaggtaattagactattttaaagactaattgcttgacagtttctagggtattttgtgttttagaagcaaaaaaagaaaaaaaaataggtcaaaccagtaaacctcattttttttcaaactaataatttggggaaataaaaactattgtttaaaaaagaaatatatatatatatatataaatatatatgtaaagttaaaattccataccttgtatgtcaggtttgctaagtgtaatgtagtttttttaaggctcaaataccatacctcagaaaatgaggtttactatggaaatactgaaacagtctttgcagctgtgtgacaagtcactctactacatactgatttggagacctccgctaaatagttttatcactgcagactaaaatgtgggacttgtatcttctttgtttttaatgcacacacatacatgttctgtgcatgtatgtggttactgtgtatatgtgtatgagtgttgtatatgcatgtgtgagtgtgtgtctgtatgtgtgtacaactaaagaagctgcagaaactttgtaatactttgtgaaaaggattatattataaaggtttgtactgtctgagtgcacagctactggaataaatttagggaatctcaggaacaagcatataatttgtccaagatttatttcttctcagaagtgtaagtgcagtttttaattctgtatattatttaatattttaccaataaaataaacttctgacataaaaagtttgct

SEQ ID NO: 141947 - DNA, 1594 bp, Homo sapiens
  Payload ID: 7910
  Gene Symbol: IKZF2
  Gene Name: IKAROS family zinc finger 2 (Helios)
  Uniprot ID: Q9UKS7
  ENST ID: ENST00000453575
  CDS Start-End: 1-159
atggaaacagaggctattgatggctatataacgtgtgacaatgagctttcacccgaaagggagcactccaatatggcaattgacctcacctcaagcacacccaatggacagcatgcctcaccaagtcacatgacaagcaggtctttttcaaaaatatagaattagaagtgtcctttgatatacttctgttccttgccagattacattcaaccattaatttaagcaaattcagtaaagctagaaatgcagagtgatgaagagtgtgacaggaaacccctgagccgtgaagatgagatcaggggccatgatgagggtagcagcctagaagaacccctaattgagagcagcgaggtggctgacaacaggaaagtccaggagcttcaaggcgagggaggaatccggcttccgaatggtgaacgccccttccactgtaaccagtgtggagcttcttttactcagaagggcaaccttctgagacacataaagttacactctggagagaagccgttcaaatgtcctttctgtagctacgcctgtagaagaagggacgccctcacaggacacctcaggacccattctgtgggtaaacctcacaagtgcaactactgtggacgaagctacaagcagcgcagttcactggaggagcacaaggaacgctgccacaactatctccagaatgtcagcatggaggctgctgggcaggtcatgagtcaccatgtacctcctatggaagattgtaaggaacaagagcctattatggacaacaatatttctctggtgccttttgagagacctgctgtcatagagaagctcacggggaatatgggaaaacgtaaaagctccactccacaaaagtttgtgggggaaaagctcatgcgattcagctacccagatattcactttgatatgaacttaacatatgagaaggaggctgagctgatgcagtctcatatgatggaccaagccatcaacaatgcaatcacctaccttggagctgaggcccttcaccctctgatgcagcacccgccaagcacaatcgctgaagtggccccagttataagctcagcttattctcaggtctatcatccaaataggatagaaagacccattagcagggaaactgctgatagtcatgaaaacaacatggatggccccatctctctcatcagaccaaagagtcgaccccaggaaagagaggcctctcccagcaatagctgcctggattccactgactcagaaagcagccatgatgaccaccagtcctaccaaggacaccctgccttaaatcccaagaggaaacaaagcccagcttacatgaaggaggatgtcaaagctttggatactaccaaggctcctaagggctctctgaaggacatctacaaggtcttcaatggagaaggagaacagattagggccttcaagtgtgagcactgccgagtccttttcctagaccatgtcatgtacaccattcacatgggttgccatggctaccgggacccactggaatgcaacatctgtggctacagaagccaggaccgttatgagttttcatcacacattgttcgaggggagcacacattccactaggcctttt

SEQ ID NO: 141948 - DNA, 3888 bp, Homo sapiens
  Payload ID: 7910
  Gene Symbol: IKZF2
  Gene Name: IKAROS family zinc finger 2 (Helios)
  Uniprot ID: Q9UKS7
  ENST ID: ENST00000434687
  CDS Start-End: 311-1891
gctcctcgctgaagatggaggaagtaaaaacaggattacccttagctacagatccactgccttagtttccaccaccaactgcagtgcacaaacacacgttaggcacaggaaagaaagaaagacagaggacacattaacagtaaacacaaacaaaagggtgatgggattattttactgcatgcactgctgagcccgacattgtcacctcctctttgaggggttagaagaagctgagatctcccgacagagctggaaatggtgatgaatcttttttaatcaaaggacaatttcttttcattgcactttgactatggaaacagaggctattgatggctatataacgtgtgacaatgagctttcacccgaaagggagcactccaatatggcaattgacctcacctcaagcacacccaatggacagcatgcctcaccaagtcacatgacaagcacaaattcagtaaagctagaaatgcagagtgatgaagagtgtgacaggaaacccctgagccgtgaagatgagatcaggggccatgatgagggtagcagcctagaagaacccctaattgagagcagcgaggtggctgacaacaggaaagtccaggagcttcaaggcgagggaggaatccggcttccgaatggtaaactgaaatgtgacgtctgtggcatggtttgcattgggcccaatgtgcttatggtacataaaaggagtcacactggtgaacgccccttccactgtaaccagtgtggagcttcttttactcagaagggcaaccttctgagacacataaagttacactctggagagaagccgttcaaatgtcctttctgtagctacgcctgtagaagaagggacgccctcacaggacacctcaggacccattctgtgggtaaacctcacaagtgcaactactgtggacgaagctacaagcagcgcagttcactggaggagcacaaggaacgctgccacaactatctccagaatgtcagcatggaggctgctgggcaggtcatgagtcaccatgtacctcctatggaagattgtaaggaacaagagcctattatggacaacaatatttctctggtgccttttgagagacctgctgtcatagagaagctcacggggaatatgggaaaacgtaaaagctccactccacaaaagtttgtgggggaaaagctcatgcgattcagctacccagatattcactttgatatgaacttaacatatgagaaggaggctgagctgatgcagtctcatatgatggaccaagccatcaacaatgcaatcacctaccttggagctgaggcccttcaccctctgatgcagcacccgccaagcacaatcgctgaagtggccccagttataagctcagcttattctcaggtctatcatccaaataggatagaaagacccattagcagggaaactgctgatagtcatgaaaacaacatggatggccccatctctctcatcagaccaaagagtcgaccccaggaaagagaggcctctcccagcaatagctgcctggattccactgactcagaaagcagccatgatgaccaccagtcctaccaaggacaccctgccttaaatcccaagaggaaacaaagcccagcttacatgaaggaggatgtcaaagctttggatactaccaaggctcctaagggctctctgaaggacatctacaaggtcttcaatggagaaggagaacagattagggccttcaagtgtgagcactgccgagtccttttcctagaccatgtcatgtacaccattcacatgggttgccatggctaccgggacccactggaatgcaacatctgtggctacagaagccaggaccgttatgagttttcatcacacattgttcgaggggagcacacattccactaggccttttcattccaaaggggacccctatgaagtaaagaactgcacatgaagaaatactgcacttacaatcccacctttcctcaaatgttgacataccttttattttttttaatattattactgttgataattcttattttgtggaggcagtgtcatttgctctgcctaattacgataaggaagaaacagaagagagaaggggcgggaatattgtttctttatcacctggcttgtttattttgtgggaatttaagagcagtccatttctaccaaggcatatcatgctttgaaaaatcacttgattcataaagattcacctaagagattctgatttgccactgatattcagaattatgatggaagacaggaaagttcagagttttctgggtaggactttggtggtttaaaaatggtataagtaactttattcttgaaagaagaatgtgtttcaaactgtaaaccaattttttgttcttcagagatcatggaacacaaacacattgttattttcagtgataactcctaagaggagctgagttgttgtgggttctatgtttacttcccctatggaatttataattcagtatgttttacactgtaccatatagcaaaacttttaaactacaggtagttaagggccacctacaatacatctgaggtcctgtgatcttatttttctaaacgtaagcactgtttttccatagttttgatgactggcattttatagacaccctggcagccttacttttaacacctttaaggaatagtatttttatgtagttttcagaataacatatggtctaagagtggataaaaggcagtcaataatttctgggagggacttctactttcataaatttgtttgagaggttttcttttaaagttgtaatgtgatggcagcatagtatatgtatttgtttctaaaagtatgcttacgattgtcactttatcagcatttaatcagtgttaaccagtcagcagaaaaatataattatgctaacagtagggggagaaaacccacttagaaatcccttttctggtatttctcttttcactagtttttttcaagatgtgacctcccggtgttctgtccatagttcattcatcctttactcttcgagtagaaggtcttaaaagtcttcctgtcggctgtttctttcaaaatctcctcagagcaattgctaatttggcctgaatctggtaacttgaaccctgtaaggttacagaactagggctatttattttagcatttcttcagtagtatttactactcttgttgcaaagaaaagggaatgggacttctttgtaacctgtaccttggacaacagataaaagaaacaaaaaaataagaaagtttacttttacccttcttggagtctagaatgtgacagaacccccaaaggaaagtcctgcacatttttctgtttccaaaacatttaattgtgtaagtccttgtcagaaatgaatctcaatcccttagtatagaattccccttacatggtataggttgccatatttcatgtgcagattttaatttcatttatgtgggcgctctgttttttctttgcagtccagccacattagaggggaggaaccgagtgatattgattcaagtcattttagggggacatacttggaaggcagaacttgctgcttctgtttggggaggacagacctgactgtgactggattatctgataaccatttgtgaatactgaaattctgttaggcagtaactgataactgctctaaaggatcattaaataggatgctgaaattatgtatcttaatacagtgtggtatgagaattaccaagtcaagagaattgtggacataagcaagtttggccccaatactgctcttaactcattttccagcttactatttgctatttaaatggtaggcaccagctaagcacttctaagcactaacacagctagaactaggcaaaaatggttagaactcagctctcttctactagtccctgtcataattat

SEQ ID NO: 141949 - DNA, 1737 bp, Homo sapiens
  Payload ID: 7910
  Gene Symbol: IKZF2
  Gene Name: IKAROS family zinc finger 2 (Helios)
  Uniprot ID: Q9UKS7
  ENST ID: ENST00000412444
  CDS Start-End: 1-159
atggaaacagaggctattgatggctatataacgtgtgacaatgagctttcacccgaaagggagcactccaatatggcaattgacctcacctcaagcacacccaatggacagcatgcctcaccaagtcacatgacaagcaggtctttttcaaaaatatagaattagaagtgtcctttgatatacttctgttccttgccagattacattcaaccattaatttaagtgtacctacctttgggccatgctccagtttgttgattgctgggataaccactggctagctctatatgctcaaattcagtaaagctagaaatgcagagtgatgaagagtgtgacaggaaacccctgagccgtgaagatgagatcaggggccatgatgagggtagcagcctagaagaacccctaattgagagcagcgaggtggctgacaacaggaaagtccaggagcttcaaggcgagggaggaatccggcttccgaatggtaaactgaaatgtgacgtctgtggcatggtttgcattgggcccaatgtgcttatggtacataaaaggagtcacactggtgaacgccccttccactgtaaccagtgtggagcttcttttactcagaagggcaaccttctgagacacataaagttacactctggagagaagccgttcaaatgtcctttctgtagctacgcctgtagaagaagggacgccctcacaggacacctcaggacccattctgtgggtaaacctcacaagtgcaactactgtggacgaagctacaagcagcgcagttcactggaggagcacaaggaacgctgccacaactatctccagaatgtcagcatggaggctgctgggcaggtcatgagtcaccatgtacctcctatggaagattgtaaggaacaagagcctattatggacaacaatatttctctggtgccttttgagagacctgctgtcatagagaagctcacggggaatatgggaaaacgtaaaagctccactccacaaaagtttgtgggggaaaagctcatgcgattcagctacccagatattcactttgatatgaacttaacatatgagaaggaggctgagctgatgcagtctcatatgatggaccaagccatcaacaatgcaatcacctaccttggagctgaggcccttcaccctctgatgcagcacccgccaagcacaatcgctgaagtggccccagttataagctcagcttattctcaggtctatcatccaaataggatagaaagacccattagcagggaaactgctgatagtcatgaaaacaacatggatggccccatctctctcatcagaccaaagagtcgaccccaggaaagagaggcctctcccagcaatagctgcctggattccactgactcagaaagcagccatgatgaccaccagtcctaccaaggacaccctgccttaaatcccaagaggaaacaaagcccagcttacatgaaggaggatgtcaaagctttggatactaccaaggctcctaagggctctctgaaggacatctacaaggtcttcaatggagaaggagaacagattagggccttcaagtgtgagcactgccgagtccttttcctagaccatgtcatgtacaccattcacatgggttgccatggctaccgggacccactggaatgcaacatctgtggctacagaagccaggaccgttatgagttttcatcacacattgttcgaggggagcacacattccactaggcc

SEQ ID NO: 141950 - DNA, 1296 bp, Homo sapiens
  Payload ID: 7911
  Gene Symbol: IKZF3
  Gene Name: IKAROS family zinc finger 3 (Aiolos)
  Uniprot ID: Q9UKT9
  ENST ID: ENST00000346243
  CDS Start-End: 1-1296
atggaagatatacaaacaaatgcggaactgaaaagcactcaggagcagtctgtgcccgcagaaagtgcagcggttttgaatgactacagtttaaccaaatctcatgaaatggaaaatgtggacagtggagaaggcccagccaatgaagatgaagacataggagatgattcaatgaaagtgaaagatgaatacagtgaaagagatgagaatgttttaaagtcagaacccatgggaaatgcagaagagcctgaaatcccttacagctattcaagagaatataatgaatatgaaaacattaagttggagagacatgttgtctcattcgatagtagcaggccaaccagtggaaagatgaactgcgatgtgtgtggattatcctgcatcagcttcaatgtcttaatggttcataagcgaagccatactggtgaacgcccattccagtgtaatcagtgtggggcatcttttactcagaaaggtaacctcctccgccacattaaactgcacacaggggaaaaaccttttaagtgtcacctctgcaactatgcatgccaaagaagagatgcgctcacggggcatcttaggacacattctggtgagaagcgccactgctttgatgtcaactataattcaagttacatgtatgagaaagagagtgagctcatacagacccgcatgatggaccaagccatcaataacgccatcagctatcttggcgccgaagccctgcgccccttggtccagacaccgcctgctcccacctcggagatggttccagttatcagcagcatgtatcccatagccctcacccgggctgagatgtcaaacggtgcccctcaagagctggaaaagaaaagcatccaccttccagagaagagcgtgccttctgagagaggcctctctcccaacaatagtggccacgactccacggacactgacagcaaccatgaagaacgccagaatcacatctatcagcaaaatcacatggtcctgtctcgggcccgcaatgggatgccacttctgaaggaggttccccgctcttacgaactcctcaagcccccgcccatctgcccaagagactccgtcaaagtgatcaacaaggaaggggaggtgatggatgtgtatcggtgtgaccactgccgcgtcctcttcctggactatgtgatgttcacgattcacatgggctgccacggcttccgtgaccctttcgagtgtaacatgtgtggatatcgaagccatgatcggtatgagttctcgtctcacatagccagaggagaacacagagccctgctgaagtga

SEQ ID NO: 141951 - DNA, 1413 bp, Homo sapiens
  Payload ID: 7911
  Gene Symbol: IKZF3
  Gene Name: IKAROS family zinc finger 3 (Aiolos)
  Uniprot ID: Q9UKT9
  ENST ID: ENST00000350532
  CDS Start-End: 1-1413
atggaagatatacaaacaaatgcggaactgaaaagcactcaggagcagtctgtgcccgcagaaagtgcagcggttttgaatgactacagtttaaccaaatctcatgaaatggaaaatgtggacagtggagaaggcccagccaatgaagatgaagacataggagatgattcaatgaaagtgaaagatgaatacagtgaaagagatgagaatgttttaaagtcagaacccatgggaaatgcagaagagcctgaaatcccttacagctattcaagagaatataatgaatatgaaaacattaagttggagagacatgttgtctcattcgatagtagcaggccaaccagtggaaagatgaactgcgatgtgtgtggattatcctgcatcagcttcaatgtcttaatggttcataagcgaagccatactggtgaacgcccattccagtgtaatcagtgtggggcatcttttactcagaaaggtaacctcctccgccacattaaactgcacacaggggaaaaaccttttaagtgtcacctctgcaactatgcatgccaaagaagagatgcgctcacggggcatcttaggacacattctgtggagaaaccctacaaatgtgagttttgtggaaggagttacaagcagagaagttcccttgaggagcacaaggagcgctgccgtacatttcttcagagcactgacccaggggacactggtgagaagcgccactgctttgatgtcaactataattcaagttacatgtatgagaaagagagtgagctcatacagacccgcatgatggaccaagccatcaataacgccatcagctatcttggcgccgaagccctgcgccccttggtccagacaccgcctgctcccacctcggagatggttccagttatcagcagcatgtatcccatagccctcacccgggctgagatgtcaaacggtgcccctcaagagctggaaaagaaaagcatccaccttccagagaagagcgtgccttctgagagaggcctctctcccaacaatagtggccacgactccacggacactgacagcaaccatgaagaacgccagaatcacatctatcagcaaaatcacatggtcctgtctcgggcccgcaatgggatgccacttctgaaggaggttccccgctcttacgaactcctcaagcccccgcccatctgcccaagagactccgtcaaagtgatcaacaaggaaggggaggtgatggatgtgtatcggtgtgaccactgccgcgtcctcttcctggactatgtgatgttcacgattcacatgggctgccacggcttccgtgaccctttcgagtgtaacatgtgtggatatcgaagccatgatcggtatgagttctcgtctcacatagccagaggagaacacagagccctgctgaagtga

SEQ ID NO: 141952 - DNA, 9667 bp, Homo sapiens
  Payload ID: 7911
  Gene Symbol: IKZF3
  Gene Name: IKAROS family zinc finger 3 (Aiolos)
  Uniprot ID: Q9UKT9
  ENST ID: ENST00000346872
  CDS Start-End: 63-1592
gcaggagcacgtggagaggccgagtagccacagcggcagctccagcccggcccggcagcgacatggaagatatacaaacaaatgcggaactgaaaagcactcaggagcagtctgtgcccgcagaaagtgcagcggttttgaatgactacagtttaaccaaatctcatgaaatggaaaatgtggacagtggagaaggcccagccaatgaagatgaagacataggagatgattcaatgaaagtgaaagatgaatacagtgaaagagatgagaatgttttaaagtcagaacccatgggaaatgcagaagagcctgaaatcccttacagctattcaagagaatataatgaatatgaaaacattaagttggagagacatgttgtctcattcgatagtagcaggccaaccagtggaaagatgaactgcgatgtgtgtggattatcctgcatcagcttcaatgtcttaatggttcataagcgaagccatactggtgaacgcccattccagtgtaatcagtgtggggcatcttttactcagaaaggtaacctcctccgccacattaaactgcacacaggggaaaaaccttttaagtgtcacctctgcaactatgcatgccaaagaagagatgcgctcacggggcatcttaggacacattctgtggagaaaccctacaaatgtgagttttgtggaaggagttacaagcagagaagttcccttgaggagcacaaggagcgctgccgtacatttcttcagagcactgacccaggggacactgcaagtgcggaggcaagacacatcaaagcagagatgggaagtgaaagagctctcgtactggacagattagcaagcaatgtggcaaaacgaaaaagctcaatgcctcagaaattcattggtgagaagcgccactgctttgatgtcaactataattcaagttacatgtatgagaaagagagtgagctcatacagacccgcatgatggaccaagccatcaataacgccatcagctatcttggcgccgaagccctgcgccccttggtccagacaccgcctgctcccacctcggagatggttccagttatcagcagcatgtatcccatagccctcacccgggctgagatgtcaaacggtgcccctcaagagctggaaaagaaaagcatccaccttccagagaagagcgtgccttctgagagaggcctctctcccaacaatagtggccacgactccacggacactgacagcaaccatgaagaacgccagaatcacatctatcagcaaaatcacatggtcctgtctcgggcccgcaatgggatgccacttctgaaggaggttccccgctcttacgaactcctcaagcccccgcccatctgcccaagagactccgtcaaagtgatcaacaaggaaggggaggtgatggatgtgtatcggtgtgaccactgccgcgtcctcttcctggactatgtgatgttcacgattcacatgggctgccacggcttccgtgaccctttcgagtgtaacatgtgtggatatcgaagccatgatcggtatgagttctcgtctcacatagccagaggagaacacagagccctgctgaagtgaatatctggtctcagggattgctcctatgtattcagcatcgtttctaaaaaccaatgacctcgcctaacagattgctctcaaaacatactcagttccaaacttcttttcataccatttttagctgtgttcacaggggtagccagggaaacactgtcttccttcagaaattattcgcaggtctagcatattattacttttgtgaaacctttgttttcccatcagggacttgaattttatggaatttaaaagccaaaaaggtatttggtcattatcttctacagcagtggaatgagtggtcccggagatgtgctatatgaaacattctttctgagatatatcaaccacacgtggaaaagcctttcagtcatacatgcaaatccacaaagaggaagagctgaccagctgaccttgctgggaagcctcacccttctgcccttcacaggctgaagggttaagatctaatctccctaatctaaatgacagtctaagagtaagtaaaagaacagccataaaataagtatctgttacgagtaactgaagaccccattctccaagcatcagatccatttcctatcacaacatttttaaaaaatgtcatctgatggcacttctgcttctgtcctttaccttcccatctccagtgaaaagctgagctgctttgggctaaaccagttgtctatagaagaaaatctatgccagaagaactcatggttttaaatatagaccatcatcgaaactccagaaatttatccactgtggatgatgacatcgctttcctttggtcaaggttggcagagcaagggtataaagggggaaattgtttggcagcaccaacagaaaacaaacaaacaaaaaacagctacctaaaacttcttgaaagagttcatggagaattggtgatacagacccaaagcaaatttgccaatgatattttccacaaaaaaagtccaaaaagtatggctcagcctccccctccccacaggagaggaattggagatagatggcatgtgtgtttagatcggagttgagctccggaatggggtgaggagggacacctctattgagaggttctccttgatcaggcaggcttcggccctttttttcccatttaaatggaactgctgtattccatgaaaattcctgaaagtctgatcacggttctgcagatgtataagtcatccttgtcactcataatatgtacatactatcaggaggagtgctgttatcatggtaaaattagcactggaataggaggtcacaaaatgctggctaattagctatgtgactttgagaaatcgtttaactttttttttttttttttttttgagacaggatctcactctgttgcccaggctggagtgcagtggtgcaatcatggctcagtgcagcctcgacctccccaggctcaggtgatcctcccacctcagcctcttgagtactgggacaacaagtgcacaccaccatgtctggctacattttgttctttttgtagagataggggtctcactatgttgcccatgctggtcttgaactcctgggctcaagcaatcagcccgcctcagcctcctaaagtgctgggattacaggtgtgagccaccacacccagccttatttaactcttaaaactcagtttccggccaggctcggtggctcacacctgtaatcccaacactttgggaagccgaggcaggcgcatcatttgaggtcaggagttcgagaccagcctgacccacatggtgaaaccctgtctctactaaaaatacaaaaattagctgggcagtagtggcacatgcctgtaatcccagctactccggaggctgaggcagaaaaatcgcttaagcctgggaggttgaggttgcggtgagtggagatcacactactgcactccagtctgggcgacagagtgagaccctgtctcaaacaaaacaaaacaaaaacaaacaaacaaaaacaaaaaaaactcagtttcctcatccataaaataggaattagatttcaatgttctcttaggtcccttctagctttaattcatatgtgattatgcagtaaccacaaggtattttttaaacctcctaatgtatggatattaagcagaagagtatttatatgaatacatgtttcacattcctttggtatgaaaatggtgtgttaagtttttcctttaaccactgagttgtgaatgtgaagaaggtggtggagaggaacaaaaaacagaaaggtattttgatcttgccacaaagcatacacacaaattggcacatgcagctgtttgccaaagccttctttttttttttactttttaagaaattatgttagggaaaataaattctgcttccagggacaacttcatggagcctatttacaaattaagagtcagcttaatttgtaacatttctaccagagccaagaatcccaaattcctggtagattagtgttttatttctaaggggcttatgcattcggctccaactcaactcgtctatgtgctgccagtaattaaaatgttccacctcagactgcacaaatggcttatccttctttgtggcatggcgtctgtctcaggaaaaaaggttttatgaaattccatggcaacagtcccaacatgtttgagacttcagctaaaggaatggatgtattttggtgtgtagtcttcagtatatcactgtatttccgtaatactagactccaagctatgccagattgcttattccctttgtgaaagaggagttgctcattacgttcttgaaatatcgcacatcctgttggttcttcaagggacaagagaaagagaatttggaagcagggattagtagaagagaaaacgagggaaaggaagcctttccaccagattagtgttcaagtctttgcagaggagaccaactttttttgttttcttttgttttgagacagtctctcgctctgttgcccaggctggagtgcagtggcgcgatctcggctcacggcaacctccgcctcccgggttcaagcaattctcctgcctcagcctcccaagtagctgggattacaggtgctcaccaccaagcccggctaatttttgtatttttagtagagacaaggtttcaccatgttggccaggccagtctcaaactcctgacctcaggtgatctgcccgccttggcctcccacagtgctgggattacaggcatgagctaccgcacccagcctgagaccaccttttgcatctcaagattgtgaaaccaaggcccattccaccagcctggggactctttttatagatatgatcctcctttttcctgtgactaatgaatttgctgcatgatttctattcttctgaggttagttttctgagtaaggtgaccactcacaaaggcactttctttgtggcattctgagcctagattggggcccatcaattccagaaaaaatttatgtgtggaaactctgcatccttaagtcttgaagttgaaccagatatgcagtggttaccatcacacagataaacgctgccttctgtacataccccttatgctgtactaattaacaaaccccttgccagggctggggaggtgagggtgaaggagaatcttagcagaagggcagagtcaggacttgcatctgccactgctgggcactgaagccctggagcagcttcagatagtacctgtactttctcatgcagactccctctgaacaagagccttgtaggcccctctccttcatttcccaccagcctcttatcaggcgggctttccaccatacacccaggaggccacggtctgaggaacaaccaaacccatgcaaagggccgggcgcgatagctcacgcctgtaatgccagcactttgggaggctggggcaggcagatcacctgaggttgggagttcgagacctgcctgaccaacatggagaaacccccatctctactaaaaatacaaaattagccgggcgtgatggcacatgcctgtaatcccagctactcaggaggctgaggcaggagaatcgcttgaacccgggaggcggaggttgcggtgagccgagatggcaccactgcactccagcctcggcaacaagagcgaaactctgtctaaaacaaaaacaaacaaacaaacaaaaaaacccaggcaaagtttccttgcagccaaggtgacagaactgggctgagggtggaaaagaaacagaaccagtgctccaggtgttttttaattttttaatttatttttattttttttgtatatgtatatatatgtatgtatattttagaggaccagggtctcactatgttgcctaggccagactcaaactcctgtgctcaagcaatcctgcctcagcctcccaagtagctgggattacaggcatgcacaaacaatgcccagctctccaaatgttttctgtcactacctgaagtgttgcatcggtacttcctacggaaagaaaactaaatagaagtgtctctcccgtgagcccccaccactaccaccagaaaaaaaaaagagagaaaatgaactcatcagtctttagtttcctcaagttattctcccaaaaagacattcgccttggcacagataagccagctaatcttatgctttatgacccactgtgagctgttcctgacacagcttctgactttgtcagtgacaaaatttctcaccttttaaatgcagtgcttaacattttgttaggcccatactcaaaatcggccagatataaaatgacctcagattttgatctcctaggctcaaacaatcctcctacctcagcctcccaagtagctgggactataggcacaccaccatgcacagctaattttttttgtatttttctgcagagatggcgtttcgccatactgcccaggctagtctcaaaatcctgggctcaagcaatctgcccacctcagcctcccaaagtgctggaactacaggcaagagccactgcgcccagccacaacctcagatttctttggcaaacagaaatgtttaaaaacacaaaattttgctcaggtgaaacactgtgttactatcaaatctcacatccacataaagtttttcttttcggctttgtttcgtgaggaacagacagaacaaagtttttccaggtagcatctgtatcactattattctcctatttcctgtaccacccccacctccccaagccctactgaatgtgaggtttagaatgttttaaggagggtcaggtgcggtggctcacgcctgtaatcccagcactttgggaggccaaggcgggcggatcacctgagtttgggagttcgagaccagcctgaccaacatggagaaaccctgtctctactaaaaatacaaaattagccaggcgtggtggcacatgcctgtaatcccagctacttaggaggctgaggcaggagaatcgcttgaacccaggaggaggaggttgtggtgagccgagatcgtgccattgcactccagcctgggtgacagagtgagactccatctcgaaaaaaaaaatacaaaaattagctgggtgtggtggtgcacacctgtaatcccagctactcgggaggctgacgcaggagaattgcttgaacctgggaggtggaggttgcagtgagccgagatcgcgccattgcaatccagcctggacaacagagtgagactccatctcaaaaaaaaaaaaaaaaagaatgttttaaggaaaaaaatagtactgttacatataatcccaggtgataagaccacaatggaaatgtttaagtcctcactttaaagagtaccccactgagaagaggtatgttggactctagcagagatttggaaactctgggacactcaagatgtgaaagagcctggctatctgaggactcaaagagtcagcatcgggacttgtgagctcaagaagagaaaagggagtggtgaaactttgtcctaaaagttagcaccaggaacagaagaaaaaaacccgatatatagtgatacctcatcttttagagaatgggaagctatttttgtgttcacacagaaagtatagttcaaaaaacctctatatccagagttcagacaaggagaatgatttgagatataagtgccgatgaaggaggtcaattttgatctgaaaccagcagctggacctgggccacctcaggaaaaggactctgttctccaaggcagcacgactgaatggttctgagaataagccagggttcaggactcctgaccctttaggaccatggactcagaagagcctgaaggacaattgtgggctttaaacttctgagagcttgtaaagtaacacaagactgtgcctctcccttgccccagctgtagatagtctttgccccaccattgttatgaagatacacagggttttgcagtttgaataaattggatacaagtttcctctttttttttttctttttgagacaaagtctcgctctgtttccccaggctgagtgcagtggcacaatcaaggcttacttgccgcctcaacctcctgggctcaagcaacgagccatcctcccgtcttagcctcccaactagctgagactacaggcgtgggtcaccacacccagctaatttttgtactttttgtagagacagggtctcaccatgttgcccaggctggtcctgaactcctgggctcaagtaatctgcccacctcagcctcccaaagtgttggggttacaggcgtgaggcaccgcggctggcctgagtttcttcttaatactgtatcacaattgtgggctgtcttatgtgttgatatcgattgagctatttgaaataggaatgttaatgggtgtattaaatttttgtaaggatataacaatatctaccttccaaggatgttgtgaggttttccatgattttgtatatgagctaatgttacctttgaggggtggtgtgcattatgttggatgattgtaaattttcagtggaaaatgtaccgtgtcctaaatttaaagacatgaaaaatatcccaagatcatactagatcataatagcaattcctttacaaatgaattatggaggtaactgatctctaacagtttccttcatgttgttttaatgcacaagggcagaggatctgctgacccttggaaccagcgtgagctaaccacgtgctatagacacttcatggtgtcgcacccagggaagtcaaagcgctttgctccctcactgtctgtgagtcctcagccattagtaccccaccccccgctgctccaaaacttgagttatttcaaatgtttctcactgttcatctctccactgaccccactccagaaagcctggagagagtcccaagatgccacccaccttccccaatccctcgccacagatctgtgtctatctcacactctgtaagtgccgctttgcttcttcctctcttgaaaagactgagaacacacattttaacatgttaggaaaatggggcagcctaaaaaatgactgatcccaccgccagtgactcatgtatactccaggctagcagacaaggccctttttggtgggcctgcttctgtgggttcacagaaaccaaattactgtgggttgcaaagaattagcaggtcatttacaaagcagacatcccttcacccagactgtggttttgcatgctcaggttctcagtctatgagctttggtgcaggatcattttggctactggaaaaaccatagcttattttaaatttctggttgccaaagccaccacacgtgtggtctgtggatgaccattgtctgcagaatgacgaggaaggaacagaatgtggtttggggctcagggtggccttcccactgggagggaaggcgggagggagcccttgccctgggttttgacacagcctgtgctcacagcctctcctctcatctgcatttctcagaaatgccctccctgcccagtggtgactttccctcgtcactcctatggagttctacctggagcccagccatgtgtggaactgtgaagtttactcctctgtaaagatggtttaaagaaagtcagcttctgaaatgtaacaatgctaacccttgctggaaccctgtaagaaatagccctgctgatagttttctaggtttatcatgtttgatttttacactgaaaaataaaaaaatcctggtatgtttgaaatta

SEQ ID NO: 141953 - DNA, 1413 bp, Homo sapiens
  Payload ID: 7911
  Gene Symbol: IKZF3
  Gene Name: IKAROS family zinc finger 3 (Aiolos)
  Uniprot ID: Q9UKT9
  ENST ID: ENST00000351680
  CDS Start-End: 1-1413
atggaagatatacaaacaaatgcggaactgaaaagcactcaggagcagtctgtgcccgcagaaagtgcagcggttttgaatgactacagtttaaccaaatctcatgaaatggaaaatgtggacagtggagaaggcccagccaatgaagatgaagacataggagatgattcaatgaaagtgaaagatgaatacagtgaaagagatgagaatgttttaaagtcagaacccatgggaaatgcagaagagcctgaaatcccttacagctattcaagagaatataatgaatatgaaaacattaagttggagagacatgttgtctcattcgatagtagcaggccaaccagtggaaagatgaactgcgatgtgtgtggattatcctgcatcagcttcaatgtcttaatggttcataagcgaagccatactggtgaacgcccattccagtgtaatcagtgtggggcatcttttactcagaaaggtaacctcctccgccacattaaactgcacacaggggaaaaaccttttaagtgtcacctctgcaactatgcatgccaaagaagagatgcgctcacggggcatcttaggacacattctgcaagtgcggaggcaagacacatcaaagcagagatgggaagtgaaagagctctcgtactggacagattagcaagcaatgtggcaaaacgaaaaagctcaatgcctcagaaattcattggtgagaagcgccactgctttgatgtcaactataattcaagttacatgtatgagaaagagagtgagctcatacagacccgcatgatggaccaagccatcaataacgccatcagctatcttggcgccgaagccctgcgccccttggtccagacaccgcctgctcccacctcggagatggttccagttatcagcagcatgtatcccatagccctcacccgggctgagatgtcaaacggtgcccctcaagagctggaaaagaaaagcatccaccttccagagaagagcgtgccttctgagagaggcctctctcccaacaatagtggccacgactccacggacactgacagcaaccatgaagaacgccagaatcacatctatcagcaaaatcacatggtcctgtctcgggcccgcaatgggatgccacttctgaaggaggttccccgctcttacgaactcctcaagcccccgcccatctgcccaagagactccgtcaaagtgatcaacaaggaaggggaggtgatggatgtgtatcggtgtgaccactgccgcgtcctcttcctggactatgtgatgttcacgattcacatgggctgccacggcttccgtgaccctttcgagtgtaacatgtgtggatatcgaagccatgatcggtatgagttctcgtctcacatagccagaggagaacacagagccctgctgaagtga

SEQ ID NO: 141954 - DNA, 1669 bp, Homo sapiens
  Payload ID: 7911
  Gene Symbol: IKZF3
  Gene Name: IKAROS family zinc finger 3 (Aiolos)
  Uniprot ID: Q9UKT9
  ENST ID: ENST00000377944
  CDS Start-End: 63-1163
gcaggagcacgtggagaggccgagtagccacagcggcagctccagcccggcccggcagcgacatggaagatatacaaacaaatgcggaactgaaaagcactcaggagcagtctgtgcccgcagaaagtgcagcggttttgaatgactacagtttaaccaaatctcatgaaatggaaaatgtggacagtggagaaggcccagccaatgaagatgaagacataggagtggagaaaccctacaaatgtgagttttgtggaaggagttacaagcagagaagttcccttgaggagcacaaggagcgctgccgtacatttcttcagagcactgacccaggggacactgcaagtgcggaggcaagacacatcaaagcagagatgggaagtgaaagagctctcgtactggacagattagcaagcaatgtggcaaaacgaaaaagctcaatgcctcagaaattcattggtgagaagcgccactgctttgatgtcaactataattcaagttacatgtatgagaaagagagtgagctcatacagacccgcatgatggaccaagccatcaataacgccatcagctatcttggcgccgaagccctgcgccccttggtccagacaccgcctgctcccacctcggagatggttccagttatcagcagcatgtatcccatagccctcacccgggctgagatgtcaaacggtgcccctcaagagctggaaaagaaaagcatccaccttccagagaagagcgtgccttctgagagaggcctctctcccaacaatagtggccacgactccacggacactgacagcaaccatgaagaacgccagaatcacatctatcagcaaaatcacatggtcctgtctcgggcccgcaatgggatgccacttctgaaggaggttccccgctcttacgaactcctcaagcccccgcccatctgcccaagagactccgtcaaagtgatcaacaaggaaggggaggtgatggatgtgtatcggtgtgaccactgccgcgtcctcttcctggactatgtgatgttcacgattcacatgggctgccacggcttccgtgaccctttcgagtgtaacatgtgtggatatcgaagccatgatcggtatgagttctcgtctcacatagccagaggagaacacagagccctgctgaagtgaatatctggtctcagggattgctcctatgtattcagcatcgtttctaaaaaccaatgacctcgcctaacagattgctctcaaaacatactcagttccaaacttcttttcataccatttttagctgtgttcacaggggtagccagggaaacactgtcttccttcagaaattattcgcaggtctagcatattattacttttgtgaaacctttgttttcccatcagggacttgaattttatggaatttaaaagccaaaaaggtatttggtcattatcttctacagcagtggaatgagtggtcccggagatgtgctatatgaaacattctttctgagatatatcaaccacacgtggaaaagcctttcagtcatacatgcaaatccacaaagaggaagagctgaccagctgaccttgctgggaagcctcacccttctgcccttcacaggctgaagggttaagatctaatctccctaatctaaatgacagtctaagagtaagtaaaagaacag

SEQ ID NO: 141955 - DNA, 1696 bp, Homo sapiens
  Payload ID: 7911
  Gene Symbol: IKZF3
  Gene Name: IKAROS family zinc finger 3 (Aiolos)
  Uniprot ID: Q9UKT9
  ENST ID: ENST00000377945
  CDS Start-End: 63-1190
gcaggagcacgtggagaggccgagtagccacagcggcagctccagcccggcccggcagcgacatggaagatatacaaacaaatgcggaactgaaaagcactcaggagcagtctgtgcccgcagaaagtgcagcggttttgaatgactacagtttaaccaaatctcatgaaatggaaaatgtggacagtggagaaggcccagccaatgaagatgaagacataggagatgattcaatgaaagtgaaagatgaatacagtgaaagagatgagaatgttttaaagtcagaacccatgggaaatgcagaagagcctgaaatcccttacagctattcaagagaatataatgaatatgaaaacattaagttggagagacatgttgtctcattcgatagtagcaggccaaccagtggaaagatgaactgcgatgtgtgtggattatcctgcatcagcttcaatgtcttaatggttcataagcgaagccatactggtgagaagcgccactgctttgatgtcaactataattcaagttacatgtatgagaaagagagtgagctcatacagacccgcatgatggaccaagccatcaataacgccatcagctatcttggcgccgaagccctgcgccccttggtccagacaccgcctgctcccacctcggagatggttccagttatcagcagcatgtatcccatagccctcacccgggctgagatgtcaaacggtgcccctcaagagctggaaaagaaaagcatccaccttccagagaagagcgtgccttctgagagaggcctctctcccaacaatagtggccacgactccacggacactgacagcaaccatgaagaacgccagaatcacatctatcagcaaaatcacatggtcctgtctcgggcccgcaatgggatgccacttctgaaggaggttccccgctcttacgaactcctcaagcccccgcccatctgcccaagagactccgtcaaagtgatcaacaaggaaggggaggtgatggatgtgtatcggtgtgaccactgccgcgtcctcttcctggactatgtgatgttcacgattcacatgggctgccacggcttccgtgaccctttcgagtgtaacatgtgtggatatcgaagccatgatcggtatgagttctcgtctcacatagccagaggagaacacagagccctgctgaagtgaatatctggtctcagggattgctcctatgtattcagcatcgtttctaaaaaccaatgacctcgcctaacagattgctctcaaaacatactcagttccaaacttcttttcataccatttttagctgtgttcacaggggtagccagggaaacactgtcttccttcagaaattattcgcaggtctagcatattattacttttgtgaaacctttgttttcccatcagggacttgaattttatggaatttaaaagccaaaaaggtatttggtcattatcttctacagcagtggaatgagtggtcccggagatgtgctatatgaaacattctttctgagatatatcaaccacacgtggaaaagcctttcagtcatacatgcaaatccacaaagaggaagagctgaccagctgaccttgctgggaagcctcacccttctgcccttcacaggctgaagggttaagatctaatctccctaatctaaatgacagtctaagagtaagtaaaagaacag

SEQ ID NO: 141956 - DNA, 1435 bp, Homo sapiens
  Payload ID: 7911
  Gene Symbol: IKZF3
  Gene Name: IKAROS family zinc finger 3 (Aiolos)
  Uniprot ID: Q9UKT9
  ENST ID: ENST00000377952
  CDS Start-End: 63-929
gcaggagcacgtggagaggccgagtagccacagcggcagctccagcccggcccggcagcgacatggaagatatacaaacaaatgcggaactgaaaagcactcaggagcagtctgtgcccgcagaaagtgcagcggttttgaatgactacagtttaaccaaatctcatgaaatggaaaatgtggacagtggagaaggcccagccaatgaagatgaagacataggaggtgagaagcgccactgctttgatgtcaactataattcaagttacatgtatgagaaagagagtgagctcatacagacccgcatgatggaccaagccatcaataacgccatcagctatcttggcgccgaagccctgcgccccttggtccagacaccgcctgctcccacctcggagatggttccagttatcagcagcatgtatcccatagccctcacccgggctgagatgtcaaacggtgcccctcaagagctggaaaagaaaagcatccaccttccagagaagagcgtgccttctgagagaggcctctctcccaacaatagtggccacgactccacggacactgacagcaaccatgaagaacgccagaatcacatctatcagcaaaatcacatggtcctgtctcgggcccgcaatgggatgccacttctgaaggaggttccccgctcttacgaactcctcaagcccccgcccatctgcccaagagactccgtcaaagtgatcaacaaggaaggggaggtgatggatgtgtatcggtgtgaccactgccgcgtcctcttcctggactatgtgatgttcacgattcacatgggctgccacggcttccgtgaccctttcgagtgtaacatgtgtggatatcgaagccatgatcggtatgagttctcgtctcacatagccagaggagaacacagagccctgctgaagtgaatatctggtctcagggattgctcctatgtattcagcatcgtttctaaaaaccaatgacctcgcctaacagattgctctcaaaacatactcagttccaaacttcttttcataccatttttagctgtgttcacaggggtagccagggaaacactgtcttccttcagaaattattcgcaggtctagcatattattacttttgtgaaacctttgttttcccatcagggacttgaattttatggaatttaaaagccaaaaaggtatttggtcattatcttctacagcagtggaatgagtggtcccggagatgtgctatatgaaacattctttctgagatatatcaaccacacgtggaaaagcctttcagtcatacatgcaaatccacaaagaggaagagctgaccagctgaccttgctgggaagcctcacccttctgcccttcacaggctgaagggttaagatctaatctccctaatctaaatgacagtctaagagtaagtaaaagaacag

SEQ ID NO: 141957 - DNA, 1837 bp, Homo sapiens
  Payload ID: 7911
  Gene Symbol: IKZF3
  Gene Name: IKAROS family zinc finger 3 (Aiolos)
  Uniprot ID: Q9UKT9
  ENST ID: ENST00000377958
  CDS Start-End: 63-1331
gcaggagcacgtggagaggccgagtagccacagcggcagctccagcccggcccggcagcgacatggaagatatacaaacaaatgcggaactgaaaagcactcaggagcagtctgtgcccgcagaaagtgcagcggttttgaatgactacagtttaaccaaatctcatgaaatggaaaatgtggacagtggagaaggcccagccaatgaagatgaagacataggaggtgaacgcccattccagtgtaatcagtgtggggcatcttttactcagaaaggtaacctcctccgccacattaaactgcacacaggggaaaaaccttttaagtgtcacctctgcaactatgcatgccaaagaagagatgcgctcacggggcatcttaggacacattctgtggagaaaccctacaaatgtgagttttgtggaaggagttacaagcagagaagttcccttgaggagcacaaggagcgctgccgtacatttcttcagagcactgacccaggggacactgcaagtgcggaggcaagacacatcaaagcagagatgggaagtgaaagagctctcgtactggacagattagcaagcaatgtggcaaaacgaaaaagctcaatgcctcagaaattcattggtgagaagcgccactgctttgatgtcaactataattcaagttacatgtatgagaaagagagtgagctcatacagacccgcatgatggaccaagccatcaataacgccatcagctatcttggcgccgaagccctgcgccccttggtccagacaccgcctgctcccacctcggagatggttccagttatcagcagcatgtatcccatagccctcacccgggctgagatgtcaaacggtgcccctcaagagctggaaaagaaaagcatccaccttccagagaagagcgtgccttctgagagaggcctctctcccaacaatagtggccacgactccacggacactgacagcaaccatgaagaacgccagaatcacatctatcagcaaaatcacatggtcctgtctcgggcccgcaatgggatgccacttctgaaggaggttccccgctcttacgaactcctcaagcccccgcccatctgcccaagagactccgtcaaagtgatcaacaaggaaggggaggtgatggatgtgtatcggtgtgaccactgccgcgtcctcttcctggactatgtgatgttcacgattcacatgggctgccacggcttccgtgaccctttcgagtgtaacatgtgtggatatcgaagccatgatcggtatgagttctcgtctcacatagccagaggagaacacagagccctgctgaagtgaatatctggtctcagggattgctcctatgtattcagcatcgtttctaaaaaccaatgacctcgcctaacagattgctctcaaaacatactcagttccaaacttcttttcataccatttttagctgtgttcacaggggtagccagggaaacactgtcttccttcagaaattattcgcaggtctagcatattattacttttgtgaaacctttgttttcccatcagggacttgaattttatggaatttaaaagccaaaaaggtatttggtcattatcttctacagcagtggaatgagtggtcccggagatgtgctatatgaaacattctttctgagatatatcaaccacacgtggaaaagcctttcagtcatacatgcaaatccacaaagaggaagagctgaccagctgaccttgctgggaagcctcacccttctgcccttcacaggctgaagggttaagatctaatctccctaatctaaatgacagtctaagagtaagtaaaagaacag

SEQ ID NO: 141958 - DNA, 1552 bp, Homo sapiens
  Payload ID: 7911
  Gene Symbol: IKZF3
  Gene Name: IKAROS family zinc finger 3 (Aiolos)
  Uniprot ID: Q9UKT9
  ENST ID: ENST00000394189
  CDS Start-End: 63-1046
gcaggagcacgtggagaggccgagtagccacagcggcagctccagcccggcccggcagcgacatggaagatatacaaacaaatgcggaactgaaaagcactcaggagcagtctgtgcccgcagaaagtgcagcggttttgaatgactacagtttaaccaaatctcatgaaatggaaaatgtggacagtggagaaggcccagccaatgaagatgaagacataggagcaagtgcggaggcaagacacatcaaagcagagatgggaagtgaaagagctctcgtactggacagattagcaagcaatgtggcaaaacgaaaaagctcaatgcctcagaaattcattggtgagaagcgccactgctttgatgtcaactataattcaagttacatgtatgagaaagagagtgagctcatacagacccgcatgatggaccaagccatcaataacgccatcagctatcttggcgccgaagccctgcgccccttggtccagacaccgcctgctcccacctcggagatggttccagttatcagcagcatgtatcccatagccctcacccgggctgagatgtcaaacggtgcccctcaagagctggaaaagaaaagcatccaccttccagagaagagcgtgccttctgagagaggcctctctcccaacaatagtggccacgactccacggacactgacagcaaccatgaagaacgccagaatcacatctatcagcaaaatcacatggtcctgtctcgggcccgcaatgggatgccacttctgaaggaggttccccgctcttacgaactcctcaagcccccgcccatctgcccaagagactccgtcaaagtgatcaacaaggaaggggaggtgatggatgtgtatcggtgtgaccactgccgcgtcctcttcctggactatgtgatgttcacgattcacatgggctgccacggcttccgtgaccctttcgagtgtaacatgtgtggatatcgaagccatgatcggtatgagttctcgtctcacatagccagaggagaacacagagccctgctgaagtgaatatctggtctcagggattgctcctatgtattcagcatcgtttctaaaaaccaatgacctcgcctaacagattgctctcaaaacatactcagttccaaacttcttttcataccatttttagctgtgttcacaggggtagccagggaaacactgtcttccttcagaaattattcgcaggtctagcatattattacttttgtgaaacctttgttttcccatcagggacttgaattttatggaatttaaaagccaaaaaggtatttggtcattatcttctacagcagtggaatgagtggtcccggagatgtgctatatgaaacattctttctgagatatatcaaccacacgtggaaaagcctttcagtcatacatgcaaatccacaaagaggaagagctgaccagctgaccttgctgggaagcctcacccttctgcccttcacaggctgaagggttaagatctaatctccctaatctaaatgacagtctaagagtaagtaaaagaacag

SEQ ID NO: 141959 - DNA, 1246 bp, Homo sapiens
  Payload ID: 7911
  Gene Symbol: IKZF3
  Gene Name: IKAROS family zinc finger 3 (Aiolos)
  Uniprot ID: Q9UKT9
  ENST ID: ENST00000439016
  CDS Start-End: 2-1246
catggaagatatacaaacaaatgcggaactgaaaagcactcaggagcagtctgtgcccgcagaaagtgcagcggttttgaatgactacagtttaaccaaatctcatgaaatggaaaatgtggacagtggagaaggcccagccaatgaagatgaagacataggagatgattcaatgaaagtgaaagatgaatacagtgaaagagatgagaatgttttaaagtcagaacccatgggaaatgcagaagagcctgaaatcccttacagctattcaagagaatataatgaatatgaaaacattaagttggagagacatgttgtctcattcgatagtagcaggccaaccagtggaaagatgaactgcgatgtgtgtggattatcctgcatcagcttcaatgtcttaatggttcataagcgaagccatactgcaagtgcggaggcaagacacatcaaagcagagatgggaagtgaaagagctctcgtactggacagattagcaagcaatgtggcaaaacgaaaaagctcaatgcctcagaaattcattggtgagaagcgccactgctttgatgtcaactataattcaagttacatgtatgagaaagagagtgagctcatacagacccgcatgatggaccaagccatcaataacgccatcagctatcttggcgccgaagccctgcgccccttggtccagacaccgcctgctcccacctcggagatggttccagttatcagcagcatgtatcccatagccctcacccgggctgagatgtcaaacggtgcccctcaagagctggaaaagaaaagcatccaccttccagagaagagcgtgccttctgagagaggcctctctcccaacaatagtggccacgactccacggacactgacagcaaccatgaagaacgccagaatcacatctatcagcaaaatcacatggtcctgtctcgggcccgcaatgggatgccacttctgaaggaggttccccgctcttacgaactcctcaagcccccgcccatctgcccaagagactccgtcaaagtgatcaacaaggaaggggaggtgatggatgtgtatcggtgtgaccactgccgcgtcctcttcctggactatgtgatgttcacgattcacatgggctgccacggcttccgtgaccctttcgagtgtaacatgtgtggatatcgaagccatgatcggtatgagttctcgtctcacatagccagaggagaacacagagccctgctgaagtga

SEQ ID NO: 141960 - DNA, 1879 bp, Homo sapiens
  Payload ID: 7911
  Gene Symbol: IKZF3
  Gene Name: IKAROS family zinc finger 3 (Aiolos)
  Uniprot ID: Q9UKT9
  ENST ID: ENST00000439167
  CDS Start-End: 63-1373
gcaggagcacgtggagaggccgagtagccacagcggcagctccagcccggcccggcagcgacatggaagatatacaaacaaatgcggaactgaaaagcactcaggagcagtctgtgcccgcagatgattcaatgaaagtgaaagatgaatacagtgaaagagatgagaatgttttaaagtcagaacccatgggaaatgcagaagagcctgaaatcccttacagctattcaagagaatataatgaatatgaaaacattaagttggagagacatgttgtctcattcgatagtagcaggccaaccagtggaaagatgaactgcgatgtgtgtggattatcctgcatcagcttcaatgtcttaatggttcataagcgaagccatactggtgaacgcccattccagtgtaatcagtgtggggcatcttttactcagaaaggtaacctcctccgccacattaaactgcacacaggggaaaaaccttttaagtgtcacctctgcaactatgcatgccaaagaagagatgcgctcacggggcatcttaggacacattctgcaagtgcggaggcaagacacatcaaagcagagatgggaagtgaaagagctctcgtactggacagattagcaagcaatgtggcaaaacgaaaaagctcaatgcctcagaaattcattggtgagaagcgccactgctttgatgtcaactataattcaagttacatgtatgagaaagagagtgagctcatacagacccgcatgatggaccaagccatcaataacgccatcagctatcttggcgccgaagccctgcgccccttggtccagacaccgcctgctcccacctcggagatggttccagttatcagcagcatgtatcccatagccctcacccgggctgagatgtcaaacggtgcccctcaagagctggaaaagaaaagcatccaccttccagagaagagcgtgccttctgagagaggcctctctcccaacaatagtggccacgactccacggacactgacagcaaccatgaagaacgccagaatcacatctatcagcaaaatcacatggtcctgtctcgggcccgcaatgggatgccacttctgaaggaggttccccgctcttacgaactcctcaagcccccgcccatctgcccaagagactccgtcaaagtgatcaacaaggaaggggaggtgatggatgtgtatcggtgtgaccactgccgcgtcctcttcctggactatgtgatgttcacgattcacatgggctgccacggcttccgtgaccctttcgagtgtaacatgtgtggatatcgaagccatgatcggtatgagttctcgtctcacatagccagaggagaacacagagccctgctgaagtgaatatctggtctcagggattgctcctatgtattcagcatcgtttctaaaaaccaatgacctcgcctaacagattgctctcaaaacatactcagttccaaacttcttttcataccatttttagctgtgttcacaggggtagccagggaaacactgtcttccttcagaaattattcgcaggtctagcatattattacttttgtgaaacctttgttttcccatcagggacttgaattttatggaatttaaaagccaaaaaggtatttggtcattatcttctacagcagtggaatgagtggtcccggagatgtgctatatgaaacattctttctgagatatatcaaccacacgtggaaaagcctttcagtcatacatgcaaatccacaaagaggaagagctgaccagctgaccttgctgggaagcctcacccttctgcccttcacaggctgaagggttaagatctaatctccctaatctaaatgacagtctaagagtaagtaaaagaacag

SEQ ID NO: 141961 - DNA, 1362 bp, Homo sapiens
  Payload ID: 7911
  Gene Symbol: IKZF3
  Gene Name: IKAROS family zinc finger 3 (Aiolos)
  Uniprot ID: Q9UKT9
  ENST ID: ENST00000467757
  CDS Start-End: 1-1362
atggaagatatacaaacaaatgcggaactgaaaagcactcaggagcagtctgtgcccgcagaaagtgcagcggttttgaatgactacagtttaaccaaatctcatgaaatggaaaatgtggacagtggagaaggcccagccaatgaagatgaagacataggagatgattcaatgaaagtgaaagatgaatacagtgaaagagatgagaatgttttaaagtcagaacccatgggaaatgcagaagagcctgaaatcccttacagctattcaagagaatataatgaatatgaaaacattaagttggagagacatgttgtctcattcgatagtagcaggccaaccagtggaaagatgaactgcgatgtgtgtggattatcctgcatcagcttcaatgtcttaatggttcataagcgaagccatactgtggagaaaccctacaaatgtgagttttgtggaaggagttacaagcagagaagttcccttgaggagcacaaggagcgctgccgtacatttcttcagagcactgacccaggggacactgcaagtgcggaggcaagacacatcaaagcagagatgggaagtgaaagagctctcgtactggacagattagcaagcaatgtggcaaaacgaaaaagctcaatgcctcagaaattcattggtgagaagcgccactgctttgatgtcaactataattcaagttacatgtatgagaaagagagtgagctcatacagacccgcatgatggaccaagccatcaataacgccatcagctatcttggcgccgaagccctgcgccccttggtccagacaccgcctgctcccacctcggagatggttccagttatcagcagcatgtatcccatagccctcacccgggctgagatgtcaaacggtgcccctcaagagctggaaaagaaaagcatccaccttccagagaagagcgtgccttctgagagaggcctctctcccaacaatagtggccacgactccacggacactgacagcaaccatgaagaacgccagaatcacatctatcagcaaaatcacatggtcctgtctcgggcccgcaatgggatgccacttctgaaggaggttccccgctcttacgaactcctcaagcccccgcccatctgcccaagagactccgtcaaagtgatcaacaaggaaggggaggtgatggatgtgtatcggtgtgaccactgccgcgtcctcttcctggactatgtgatgttcacgattcacatgggctgccacggcttccgtgaccctttcgagtgtaacatgtgtggatatcgaagccatgatcggtatgagttctcgtctcacatagccagaggagaacacagagccctgctgaagtga

SEQ ID NO: 141962 - DNA, 1996 bp, Homo sapiens
  Payload ID: 7911
  Gene Symbol: IKZF3
  Gene Name: IKAROS family zinc finger 3 (Aiolos)
  Uniprot ID: Q9UKT9
  ENST ID: ENST00000535189
  CDS Start-End: 63-1490
gcaggagcacgtggagaggccgagtagccacagcggcagctccagcccggcccggcagcgacatggaagatatacaaacaaatgcggaactgaaaagcactcaggagcagtctgtgcccgcagatgattcaatgaaagtgaaagatgaatacagtgaaagagatgagaatgttttaaagtcagaacccatgggaaatgcagaagagcctgaaatcccttacagctattcaagagaatataatgaatatgaaaacattaagttggagagacatgttgtctcattcgatagtagcaggccaaccagtggaaagatgaactgcgatgtgtgtggattatcctgcatcagcttcaatgtcttaatggttcataagcgaagccatactggtgaacgcccattccagtgtaatcagtgtggggcatcttttactcagaaaggtaacctcctccgccacattaaactgcacacaggggaaaaaccttttaagtgtcacctctgcaactatgcatgccaaagaagagatgcgctcacggggcatcttaggacacattctgtggagaaaccctacaaatgtgagttttgtggaaggagttacaagcagagaagttcccttgaggagcacaaggagcgctgccgtacatttcttcagagcactgacccaggggacactgcaagtgcggaggcaagacacatcaaagcagagatgggaagtgaaagagctctcgtactggacagattagcaagcaatgtggcaaaacgaaaaagctcaatgcctcagaaattcattggtgagaagcgccactgctttgatgtcaactataattcaagttacatgtatgagaaagagagtgagctcatacagacccgcatgatggaccaagccatcaataacgccatcagctatcttggcgccgaagccctgcgccccttggtccagacaccgcctgctcccacctcggagatggttccagttatcagcagcatgtatcccatagccctcacccgggctgagatgtcaaacggtgcccctcaagagctggaaaagaaaagcatccaccttccagagaagagcgtgccttctgagagaggcctctctcccaacaatagtggccacgactccacggacactgacagcaaccatgaagaacgccagaatcacatctatcagcaaaatcacatggtcctgtctcgggcccgcaatgggatgccacttctgaaggaggttccccgctcttacgaactcctcaagcccccgcccatctgcccaagagactccgtcaaagtgatcaacaaggaaggggaggtgatggatgtgtatcggtgtgaccactgccgcgtcctcttcctggactatgtgatgttcacgattcacatgggctgccacggcttccgtgaccctttcgagtgtaacatgtgtggatatcgaagccatgatcggtatgagttctcgtctcacatagccagaggagaacacagagccctgctgaagtgaatatctggtctcagggattgctcctatgtattcagcatcgtttctaaaaaccaatgacctcgcctaacagattgctctcaaaacatactcagttccaaacttcttttcataccatttttagctgtgttcacaggggtagccagggaaacactgtcttccttcagaaattattcgcaggtctagcatattattacttttgtgaaacctttgttttcccatcagggacttgaattttatggaatttaaaagccaaaaaggtatttggtcattatcttctacagcagtggaatgagtggtcccggagatgtgctatatgaaacattctttctgagatatatcaaccacacgtggaaaagcctttcagtcatacatgcaaatccacaaagaggaagagctgaccagctgaccttgctgggaagcctcacccttctgcccttcacaggctgaagggttaagatctaatctccctaatctaaatgacagtctaagagtaagtaaaagaacag

SEQ ID NO: 141963 - DNA, 1456 bp, Homo sapiens
  Payload ID: 7911
  Gene Symbol: IKZF3
  Gene Name: IKAROS family zinc finger 3 (Aiolos)
  Uniprot ID: Q9UKT9
  ENST ID: ENST00000583368
  CDS Start-End: 374-1162
ttttcaaaagtgctgttaacataaacagagcagtaaatctggggcaccatgcttttttttcaaagttgttaagaattatatcagtctgcaggtgtcacacgcagttactcagaatcagaaagaaggctgatcgggggttagatctccatctatctatctttttgcaaccaaccacgtccaggctgtttatttaatacttcctcttgctaatgaaggtactggttggggatgggtcgagctttcccatctcggcataagactgcaagatttgaatgtgccctggtgtcggcttcactgaccacagcaggtaccccaggcaagaatctgagcagttataacagcaagtgcggaggcaagacacatcaaagcagagatgggaagtgaaagagctctcgtactggacagattagcaagcaatgtggcaaaacgaaaaagctcaatgcctcagaaattcattggtgagaagcgccactgctttgatgtcaactataattcaagttacatgtatgagaaagagagtgagctcatacagacccgcatgatggaccaagccatcaataacgccatcagctatcttggcgccgaagccctgcgccccttggtccagacaccgcctgctcccacctcggagatggttccagttatcagcagcatgtatcccatagccctcacccgggctgagatgtcaaacggtgcccctcaagagctggaaaagaaaagcatccaccttccagagaagagcgtgccttctgagagaggcctctctcccaacaatagtggccacgactccacggacactgacagcaaccatgaagaacgccagaatcacatctatcagcaaaatcacatggtcctgtctcgggcccgcaatgggatgccacttctgaaggaggttccccgctcttacgaactcctcaagcccccgcccatctgcccaagagactccgtcaaagtgatcaacaaggaaggggaggtgatggatgtgtatcggtgtgaccactgccgcgtcctcttcctggactatgtgatgttcacgattcacatgggctgccacggcttccgtgaccctttcgagtgtaacatgtgtggatatcgaagccatgatcggtatgagttctcgtctcacatagccagaggagaacacagagccctgctgaagtgaatatctggtctcagggattgctcctatgtattcagcatcgtttctaaaaaccaatgacctcgcctaacagattgctctcaaaacatactcagttccaaacttcttttcataccatttttagctgtgttcacaggggtagccagggaaacactgtcttccttcagaaattattcgcaggtctagcatattattacttttgtgaaacctttgttttcccatcagggacttgaattttatggaatttaaaagccaaaaaggtatttggtcattatcttctacagcagtggaatgagt

SEQ ID NO: 141964 - DNA, 2224 bp, Homo sapiens
  Payload ID: 7911
  Gene Symbol: IKZF3
  Gene Name: IKAROS family zinc finger 3 (Aiolos)
  Uniprot ID: Q9UKT9
  ENST ID: ENST00000293068
  CDS Start-End: 63-854
gcaggagcacgtggagaggccgagtagccacagcggcagctccagcccggcccggcagcgacatggaagatatacaaacaaatgcggaactgaaaagcactcaggagcagtctgtgcccgcagaaagtgcagcggttttgaatgactacagtttaaccaaatctcatgaaatggaaaatgtggacagtggagaaggcccagccaatgaagatgaagacataggagatgattcaatgaaagtgaaagatgaatacagtgaaagagatgagaatgttttaaagtcagaacccatgggaaatgcagaagagcctgaaatcccttacagctattcaagagaatataatgaatatgaaaacattaagttggagagacatgttgtctcattcgatagtagcaggccaaccagtggaaagatgaactgcgatgtgtgtggattatcctgcatcagcttcaatgtcttaatggttcataagcgaagccatactggtgaacgcccattccagtgtaatcagtgtggggcatcttttactcagaaaggtaacctcctccgccacattaaactgcacacaggggaaaaaccttttaagtgtcacctctgcaactatgcatgccaaagaagagatgcgctcacggggcatcttaggacacattctgtggagaaaccctacaaatgtgagttttgtggaaggagttacaagcagagaagttcccttgaggagcacaaggagcgctgccgtacatttcttcagagcactgacccaggggacactggtactggttggggatgggtcgagctttcccatctcggcataagactgcaagatttgaatgtgccctggtgtcggcttcactgaccacagcaggtaccccaggcaagaatctgagcagttataacagcaagtgcggaggcaagacacatcaaagcagagatgggaagtgaaagagctctcgtactggacagattagcaagcaatgtggcaaaacgaaaaagctcaatgcctcagaaattcattggtgagaagcgccactgctttgatgtcaactataattcaagttacatgtatgagaaagagagtgagctcatacagacccgcatgatggaccaagccatcaataacgccatcagctatcttggcgccgaagccctgcgccccttggtccagacaccgcctgctcccacctcggagatggttccagttatcagcagcatgtatcccatagccctcacccgggctgagatgtcaaacggtgcccctcaagagctggaaaagaaaagcatccaccttccagagaagagcgtgccttctgagagaggcctctctcccaacaatagtggccacgactccacggacactgacagcaaccatgaagaacgccagaatcacatctatcagcaaaatcacatggtcctgtctcgggcccgcaatgggatgccacttctgaaggaggttccccgctcttacgaactcctcaagcccccgcccatctgcccaagagactccgtcaaagtgatcaacaaggaaggggaggtgatggatgtgtatcggtgtgaccactgccgcgtcctcttcctggactatgtgatgttcacgattcacatgggctgccacggcttccgtgaccctttcgagtgtaacatgtgtggatatcgaagccatgatcggtatgagttctcgtctcacatagccagaggagaacacagagccctgctgaagtgaatatctggtctcagggattgctcctatgtattcagcatcgtttctaaaaaccaatgacctcgcctaacagattgctctcaaaacatactcagttccaaacttcttttcataccatttttagctgtgttcacaggggtagccagggaaacactgtcttccttcagaaattattcgcaggtctagcatattattacttttgtgaaacctttgttttcccatcagggacttgaattttatggaatttaaaagccaaaaaggtatttggtcattatcttctacagcagtggaatgagtggtcccggagatgtgctatatgaaacattctttctgagatatatcaaccacacgtggaaaagcctttcagtcatacatgcaaatccacaaagaggaagagctgaccagctgaccttgctgggaagcctcacccttctgcccttcacaggctgaagggttaagatctaatctccctaatctaaatgacagtctaagagtaagtaaaagaacag

SEQ ID NO: 141965 - DNA, 2056 bp, Homo sapiens
  Payload ID: 7911
  Gene Symbol: IKZF3
  Gene Name: IKAROS family zinc finger 3 (Aiolos)
  ENST ID: ENST00000348427
  CDS Start-End: 63-686
gcaggagcacgtggagaggccgagtagccacagcggcagctccagcccggcccggcagcgacatggaagatatacaaacaaatgcggaactgaaaagcactcaggagcagtctgtgcccgcagaaagtgcagcggttttgaatgactacagtttaaccaaatctcatgaaatggaaaatgtggacagtggagaaggcccagccaatgaagatgaagacataggagatgattcaatgaaagtgaaagatgaatacagtgaaagagatgagaatgttttaaagtcagaacccatgggaaatgcagaagagcctgaaatcccttacagctattcaagagaatataatgaatatgaaaacattaagttggagagacatgttgtctcattcgatagtagcaggccaaccagtggaaagatgaactgcgatgtgtgtggattatcctgcatcagcttcaatgtcttaatggttcataagcgaagccatactgtggagaaaccctacaaatgtgagttttgtggaaggagttacaagcagagaagttcccttgaggagcacaaggagcgctgccgtacatttcttcagagcactgacccaggggacactggtactggttggggatgggtcgagctttcccatctcggcataagactgcaagatttgaatgtgccctggtgtcggcttcactgaccacagcaggtaccccaggcaagaatctgagcagttataacagcaagtgcggaggcaagacacatcaaagcagagatgggaagtgaaagagctctcgtactggacagattagcaagcaatgtggcaaaacgaaaaagctcaatgcctcagaaattcattggtgagaagcgccactgctttgatgtcaactataattcaagttacatgtatgagaaagagagtgagctcatacagacccgcatgatggaccaagccatcaataacgccatcagctatcttggcgccgaagccctgcgccccttggtccagacaccgcctgctcccacctcggagatggttccagttatcagcagcatgtatcccatagccctcacccgggctgagatgtcaaacggtgcccctcaagagctggaaaagaaaagcatccaccttccagagaagagcgtgccttctgagagaggcctctctcccaacaatagtggccacgactccacggacactgacagcaaccatgaagaacgccagaatcacatctatcagcaaaatcacatggtcctgtctcgggcccgcaatgggatgccacttctgaaggaggttccccgctcttacgaactcctcaagcccccgcccatctgcccaagagactccgtcaaagtgatcaacaaggaaggggaggtgatggatgtgtatcggtgtgaccactgccgcgtcctcttcctggactatgtgatgttcacgattcacatgggctgccacggcttccgtgaccctttcgagtgtaacatgtgtggatatcgaagccatgatcggtatgagttctcgtctcacatagccagaggagaacacagagccctgctgaagtgaatatctggtctcagggattgctcctatgtattcagcatcgtttctaaaaaccaatgacctcgcctaacagattgctctcaaaacatactcagttccaaacttcttttcataccatttttagctgtgttcacaggggtagccagggaaacactgtcttccttcagaaattattcgcaggtctagcatattattacttttgtgaaacctttgttttcccatcagggacttgaattttatggaatttaaaagccaaaaaggtatttggtcattatcttctacagcagtggaatgagtggtcccggagatgtgctatatgaaacattctttctgagatatatcaaccacacgtggaaaagcctttcagtcatacatgcaaatccacaaagaggaagagctgaccagctgaccttgctgggaagcctcacccttctgcccttcacaggctgaagggttaagatctaatctccctaatctaaatgacagtctaagagtaagtaaaagaacag

SEQ ID NO: 141966 - DNA, 9787 bp, Homo sapiens
  Payload ID: 7911
  Gene Symbol: IKZF3
  Gene Name: IKAROS family zinc finger 3 (Aiolos)
  Uniprot ID: Q9UKT9
  ENST ID: ENST00000623724
  CDS Start-End: 930-1718
gcaggagcacgtggagaggccgagtagccacagcggcagctccagcccggcccggcagcgacatggaagatatacaaacaaatgcggaactgaaaagcactcaggagcagtctgtgcccgcagaaagtgcagcggttttgaatgactacagtttaaccaaatctcatgaaatggaaaatgtggacagtggagaaggcccagccaatgaagatgaagacataggagatgattcaatgaaagtgaaagatgaatacagtgaaagagatgagaatgttttaaagtcagaacccatgggaaatgcagaagagcctgaaatcccttacagctattcaagagaatataatgaatatgaaaacattaagttggagagacatgttgtctcattcgatagtagcaggccaaccagtggaaagatgaactgcgatgtgtgtggattatcctgcatcagcttcaatgtcttaatggttcataagcgaagccatactggtgaacgcccattccagtgtaatcagtgtggggcatcttttactcagaaaggtaacctcctccgccacattaaactgcacacaggggaaaaaccttttaagtgtcacctctgcaactatgcatgccaaagaagagatgcgctcacggggcatcttaggacacattctgtggagaaaccctacaaatgtgagttttgtggaaggagttacaagcagagaagttcccttgaggagcacaaggagcgctgccgtacatttcttcagagcactgacccaggggacactggtactggttggggatgggtcgagctttcccatctcggcataagactgcaagatttgaatgtgccctggtgtcggcttcactgaccacagcaggtaccccaggcaagaatctgagcagttataacagcaagtgcggaggcaagacacatcaaagcagagatgggaagtgaaagagctctcgtactggacagattagcaagcaatgtggcaaaacgaaaaagctcaatgcctcagaaattcattggtgagaagcgccactgctttgatgtcaactataattcaagttacatgtatgagaaagagagtgagctcatacagacccgcatgatggaccaagccatcaataacgccatcagctatcttggcgccgaagccctgcgccccttggtccagacaccgcctgctcccacctcggagatggttccagttatcagcagcatgtatcccatagccctcacccgggctgagatgtcaaacggtgcccctcaagagctggaaaagaaaagcatccaccttccagagaagagcgtgccttctgagagaggcctctctcccaacaatagtggccacgactccacggacactgacagcaaccatgaagaacgccagaatcacatctatcagcaaaatcacatggtcctgtctcgggcccgcaatgggatgccacttctgaaggaggttccccgctcttacgaactcctcaagcccccgcccatctgcccaagagactccgtcaaagtgatcaacaaggaaggggaggtgatggatgtgtatcggtgtgaccactgccgcgtcctcttcctggactatgtgatgttcacgattcacatgggctgccacggcttccgtgaccctttcgagtgtaacatgtgtggatatcgaagccatgatcggtatgagttctcgtctcacatagccagaggagaacacagagccctgctgaagtgaatatctggtctcagggattgctcctatgtattcagcatcgtttctaaaaaccaatgacctcgcctaacagattgctctcaaaacatactcagttccaaacttcttttcataccatttttagctgtgttcacaggggtagccagggaaacactgtcttccttcagaaattattcgcaggtctagcatattattacttttgtgaaacctttgttttcccatcagggacttgaattttatggaatttaaaagccaaaaaggtatttggtcattatcttctacagcagtggaatgagtggtcccggagatgtgctatatgaaacattctttctgagatatatcaaccacacgtggaaaagcctttcagtcatacatgcaaatccacaaagaggaagagctgaccagctgaccttgctgggaagcctcacccttctgcccttcacaggctgaagggttaagatctaatctccctaatctaaatgacagtctaagagtaagtaaaagaacagccataaaataagtatctgttacgagtaactgaagaccccattctccaagcatcagatccatttcctatcacaacatttttaaaaaatgtcatctgatggcacttctgcttctgtcctttaccttcccatctccagtgaaaagctgagctgctttgggctaaaccagttgtctatagaagaaaatctatgccagaagaactcatggttttaaatatagaccatcatcgaaactccagaaatttatccactgtggatgatgacatcgctttcctttggtcaaggttggcagagcaagggtataaagggggaaattgtttggcagcaccaacagaaaacaaacaaacaaaaaacagctacctaaaacttcttgaaagagttcatggagaattggtgatacagacccaaagcaaatttgccaatgatattttccacaaaaaaagtccaaaaagtatggctcagcctccccctccccacaggagaggaattggagatagatggcatgtgtgtttagatcggagttgagctccggaatggggtgaggagggacacctctattgagaggttctccttgatcaggcaggcttcggccctttttttcccatttaaatggaactgctgtattccatgaaaattcctgaaagtctgatcacggttctgcagatgtataagtcatccttgtcactcataatatgtacatactatcaggaggagtgctgttatcatggtaaaattagcactggaataggaggtcacaaaatgctggctaattagctatgtgactttgagaaatcgtttaactttttttttttttttttttttgagacaggatctcactctgttgcccaggctggagtgcagtggtgcaatcatggctcagtgcagcctcgacctccccaggctcaggtgatcctcccacctcagcctcttgagtactgggacaacaagtgcacaccaccatgtctggctacattttgttctttttgtagagataggggtctcactatgttgcccatgctggtcttgaactcctgggctcaagcaatcagcccgcctcagcctcctaaagtgctgggattacaggtgtgagccaccacacccagccttatttaactcttaaaactcagtttccggccaggctcggtggctcacacctgtaatcccaacactttgggaagccgaggcaggcgcatcatttgaggtcaggagttcgagaccagcctgacccacatggtgaaaccctgtctctactaaaaatacaaaaattagctgggcagtagtggcacatgcctgtaatcccagctactccggaggctgaggcagaaaaatcgcttaagcctgggaggttgaggttgcggtgagtggagatcacactactgcactccagtctgggcgacagagtgagaccctgtctcaaacaaaacaaaacaaaaacaaacaaacaaaaacaaaaaaaactcagtttcctcatccataaaataggaattagatttcaatgttctcttaggtcccttctagctttaattcatatgtgattatgcagtaaccacaaggtattttttaaacctcctaatgtatggatattaagcagaagagtatttatatgaatacatgtttcacattcctttggtatgaaaatggtgtgttaagtttttcctttaaccactgagttgtgaatgtgaagaaggtggtggagaggaacaaaaaacagaaaggtattttgatcttgccacaaagcatacacacaaattggcacatgcagctgtttgccaaagccttctttttttttttactttttaagaaattatgttagggaaaataaattctgcttccagggacaacttcatggagcctatttacaaattaagagtcagcttaatttgtaacatttctaccagagccaagaatcccaaattcctggtagattagtgttttatttctaaggggcttatgcattcggctccaactcaactcgtctatgtgctgccagtaattaaaatgttccacctcagactgcacaaatggcttatccttctttgtggcatggcgtctgtctcaggaaaaaaggttttatgaaattccatggcaacagtcccaacatgtttgagacttcagctaaaggaatggatgtattttggtgtgtagtcttcagtatatcactgtatttccgtaatactagactccaagctatgccagattgcttattccctttgtgaaagaggagttgctcattacgttcttgaaatatcgcacatcctgttggttcttcaagggacaagagaaagagaatttggaagcagggattagtagaagagaaaacgagggaaaggaagcctttccaccagattagtgttcaagtctttgcagaggagaccaactttttttgttttcttttgttttgagacagtctctcgctctgttgcccaggctggagtgcagtggcgcgatctcggctcacggcaacctccgcctcccgggttcaagcaattctcctgcctcagcctcccaagtagctgggattacaggtgctcaccaccaagcccggctaatttttgtatttttagtagagacaaggtttcaccatgttggccaggccagtctcaaactcctgacctcaggtgatctgcccgccttggcctcccacagtgctgggattacaggcatgagctaccgcacccagcctgagaccaccttttgcatctcaagattgtgaaaccaaggcccattccaccagcctggggactctttttatagatatgatcctcctttttcctgtgactaatgaatttgctgcatgatttctattcttctgaggttagttttctgagtaaggtgaccactcacaaaggcactttctttgtggcattctgagcctagattggggcccatcaattccagaaaaaatttatgtgtggaaactctgcatccttaagtcttgaagttgaaccagatatgcagtggttaccatcacacagataaacgctgccttctgtacataccccttatgctgtactaattaacaaaccccttgccagggctggggaggtgagggtgaaggagaatcttagcagaagggcagagtcaggacttgcatctgccactgctgggcactgaagccctggagcagcttcagatagtacctgtactttctcatgcagactccctctgaacaagagccttgtaggcccctctccttcatttcccaccagcctcttatcaggcgggctttccaccatacacccaggaggccacggtctgaggaacaaccaaacccatgcaaagggccgggcgcgatagctcacgcctgtaatgccagcactttgggaggctggggcaggcagatcacctgaggttgggagttcgagacctgcctgaccaacatggagaaacccccatctctactaaaaatacaaaattagccgggcgtgatggcacatgcctgtaatcccagctactcaggaggctgaggcaggagaatcgcttgaacccgggaggcggaggttgcggtgagccgagatggcaccactgcactccagcctcggcaacaagagcgaaactctgtctaaaacaaaaacaaacaaacaaacaaaaaaacccaggcaaagtttccttgcagccaaggtgacagaactgggctgagggtggaaaagaaacagaaccagtgctccaggtgttttttaattttttaatttatttttattttttttgtatatgtatatatatgtatgtatattttagaggaccagggtctcactatgttgcctaggccagactcaaactcctgtgctcaagcaatcctgcctcagcctcccaagtagctgggattacaggcatgcacaaacaatgcccagctctccaaatgttttctgtcactacctgaagtgttgcatcggtacttcctacggaaagaaaactaaatagaagtgtctctcccgtgagcccccaccactaccaccagaaaaaaaaaagagagaaaatgaactcatcagtctttagtttcctcaagttattctcccaaaaagacattcgccttggcacagataagccagctaatcttatgctttatgacccactgtgagctgttcctgacacagcttctgactttgtcagtgacaaaatttctcaccttttaaatgcagtgcttaacattttgttaggcccatactcaaaatcggccagatataaaatgacctcagattttgatctcctaggctcaaacaatcctcctacctcagcctcccaagtagctgggactataggcacaccaccatgcacagctaattttttttgtatttttctgcagagatggcgtttcgccatactgcccaggctagtctcaaaatcctgggctcaagcaatctgcccacctcagcctcccaaagtgctggaactacaggcaagagccactgcgcccagccacaacctcagatttctttggcaaacagaaatgtttaaaaacacaaaattttgctcaggtgaaacactgtgttactatcaaatctcacatccacataaagtttttcttttcggctttgtttcgtgaggaacagacagaacaaagtttttccaggtagcatctgtatcactattattctcctatttcctgtaccacccccacctccccaagccctactgaatgtgaggtttagaatgttttaaggagggtcaggtgcggtggctcacgcctgtaatcccagcactttgggaggccaaggcgggcggatcacctgagtttgggagttcgagaccagcctgaccaacatggagaaaccctgtctctactaaaaatacaaaattagccaggcgtggtggcacatgcctgtaatcccagctacttaggaggctgaggcaggagaatcgcttgaacccaggaggaggaggttgtggtgagccgagatcgtgccattgcactccagcctgggtgacagagtgagactccatctcgaaaaaaaaaatacaaaaattagctgggtgtggtggtgcacacctgtaatcccagctactcgggaggctgacgcaggagaattgcttgaacctgggaggtggaggttgcagtgagccgagatcgcgccattgcaatccagcctggacaacagagtgagactccatctcaaaaaaaaaaaaaaaaagaatgttttaaggaaaaaaatagtactgttacatataatcccaggtgataagaccacaatggaaatgtttaagtcctcactttaaagagtaccccactgagaagaggtatgttggactctagcagagatttggaaactctgggacactcaagatgtgaaagagcctggctatctgaggactcaaagagtcagcatcgggacttgtgagctcaagaagagaaaagggagtggtgaaactttgtcctaaaagttagcaccaggaacagaagaaaaaaacccgatatatagtgatacctcatcttttagagaatgggaagctatttttgtgttcacacagaaagtatagttcaaaaaacctctatatccagagttcagacaaggagaatgatttgagatataagtgccgatgaaggaggtcaattttgatctgaaaccagcagctggacctgggccacctcaggaaaaggactctgttctccaaggcagcacgactgaatggttctgagaataagccagggttcaggactcctgaccctttaggaccatggactcagaagagcctgaaggacaattgtgggctttaaacttctgagagcttgtaaagtaacacaagactgtgcctctcccttgccccagctgtagatagtctttgccccaccattgttatgaagatacacagggttttgcagtttgaataaattggatacaagtttcctctttttttttttctttttgagacaaagtctcgctctgtttccccaggctgagtgcagtggcacaatcaaggcttacttgccgcctcaacctcctgggctcaagcaacgagccatcctcccgtcttagcctcccaactagctgagactacaggcgtgggtcaccacacccagctaatttttgtactttttgtagagacagggtctcaccatgttgcccaggctggtcctgaactcctgggctcaagtaatctgcccacctcagcctcccaaagtgttggggttacaggcgtgaggcaccgcggctggcctgagtttcttcttaatactgtatcacaattgtgggctgtcttatgtgttgatatcgattgagctatttgaaataggaatgttaatgggtgtattaaatttttgtaaggatataacaatatctaccttccaaggatgttgtgaggttttccatgattttgtatatgagctaatgttacctttgaggggtggtgtgcattatgttggatgattgtaaattttcagtggaaaatgtaccgtgtcctaaatttaaagacatgaaaaatatcccaagatcatactagatcataatagcaattcctttacaaatgaattatggaggtaactgatctctaacagtttccttcatgttgttttaatgcacaagggcagaggatctgctgacccttggaaccagcgtgagctaaccacgtgctatagacacttcatggtgtcgcacccagggaagtcaaagcgctttgctccctcactgtctgtgagtcctcagccattagtaccccaccccccgctgctccaaaacttgagttatttcaaatgtttctcactgttcatctctccactgaccccactccagaaagcctggagagagtcccaagatgccacccaccttccccaatccctcgccacagatctgtgtctatctcacactctgtaagtgccgctttgcttcttcctctcttgaaaagactgagaacacacattttaacatgttaggaaaatggggcagcctaaaaaatgactgatcccaccgccagtgactcatgtatactccaggctagcagacaaggccctttttggtgggcctgcttctgtgggttcacagaaaccaaattactgtgggttgcaaagaattagcaggtcatttacaaagcagacatcccttcacccagactgtggttttgcatgctcaggttctcagtctatgagctttggtgcaggatcattttggctactggaaaaaccatagcttattttaaatttctggttgccaaagccaccacacgtgtggtctgtggatgaccattgtctgcagaatgacgaggaaggaacagaatgtggtttggggctcagggtggccttcccactgggagggaaggcgggagggagcccttgccctgggttttgacacagcctgtgctcacagcctctcctctcatctgcatttctcagaaatgccctccctgcccagtggtgactttccctcgtcactcctatggagttctacctggagcccagccatgtgtggaactgtgaagtttactcctctgtaaagatggtttaaagaaagtcagcttctgaaatgtaacaatgctaacccttgctggaaccctgtaagaaatagccctgctgatagttttctaggtttatcatgtttgatttttacactgaaaaataaaaaaatcctggtatgtttg

SEQ ID NO: 141967 - DNA, 5229 bp, Homo sapiens
  Payload ID: 7912
  Gene Symbol: IKZF4
  Gene Name: IKAROS family zinc finger 4 (Eos)
  Uniprot ID: Q9H2S9
  ENST ID: ENST00000262032
  CDS Start-End: 368-2125
cctcgcctccctctcccccaacactgtcccctctccccaacccctcacagcctgcgcgcgcgcggagacacctcagtctacatggggaggacagagaagcgcaaagaacaagagaaaagatgcatccatctgagatctaaaaggagacaatgagaatctctttaaaatggacatagaagactgcaatggccgctcctatgtgtctgtaggaccaatgaaggaattattggcatgcactaaaggagatagcaagatgggtcagacacacatatgagagtcattggcaacacccgggtaatgtaaggaatccacgcttcctggaaggtgagtggctgggctcacccctgcctgccactgagacgcagacatgcatacaccacccgcactccctcgccgtttccaaggcggcggccgcgttcgcaccccagggtctcaccggcaagggaaggataatctggagagggatccctcaggagggtgtgttccggatttcttgcctcaggcccaagactccaaccattttataatggaatctttattttgtgaaagtagcggggactcatctctggagaaggagttcctcggggccccagtggggccctcggtgagcacccccaacagccagcactcttctcctagccgctcactcagtgccaactccatcaaggtggagatgtacagcgatgaggagtcaagcagactgctggggccagatgagcggctcctggaaaaggacgacagcgtgattgtggaagattcattgtctgagcccctgggctactgtgatgggagtgggccagagcctcactcccctgggggcatccggctgcccaatggcaagctcaagtgtgacgtctgcggcatggtctgtattggacccaacgtgctcatggtgcacaagcgcagtcacactggtgaaaggcccttccattgcaaccagtgtggtgcctccttcacccagaaggggaacctgctgcgccacatcaagctgcactctggggagaagccctttaaatgtcccttctgcaactatgcctgccgccggcgtgatgcactcactggtcacctccgcacacactcagtctcctctcccacagtgggcaagccctacaagtgtaactactgtggccggagctacaaacagcagagtaccctggaggagcacaaggagcggtgccataactacctacagagtctcagcactgaagcccaagctttggctggccaaccaggtgacgaaatacgtgacctggagatggtgccagactccatgctgcactcatcctctgagcggccaactttcatcgatcgtctggccaatagcctcaccaaacgcaagcgttccacaccccagaagtttgtaggcgaaaagcagatgcgcttcagcctctcagacctcccctatgatgtgaactcgggtggctatgaaaaggatgtggagttggtggcacaccacagcctagagcctggctttggaagttccctggcctttgtgggtgcagagcatctgcgtcccctccgccttccacccaccaattgcatctcagaactcacgcctgtcatcagctctgtctacacccagatgcagcccctccctggtcgactggagcttccaggatcccgagaagcaggtgagggacctgaggacctggctgatggaggtcccctcctctaccggccccgaggccccctgactgaccctggggcatcccccagcaatggctgccaggactccacagacacagaaagcaaccacgaagatcgggttgcgggggtggtatccctccctcagggtcccccaccccagccacctcccaccattgtggtgggccggcacagtcctgcctacgccaaagaggaccccaagccacaggaggggttattgcggggcaccccaggcccctccaaggaagtgcttcgggtggtgggcgagagtggtgagcctgtgaaggccttcaagtgtgagcactgccgtatcctcttcctggaccacgtcatgttcactatccacatgggctgccatggcttcagagacccttttgagtgcaacatctgtggttatcacagccaggaccggtacgaattctcttcccacattgtccggggggagcataaggtgggctagcaacctctccctctctcctcagtccaccactccactgccctgactacaggcattgatccctgtccccaccatttcccaaggagttttgctttgtagccctcactactggccacctgacctcacacctgaccctgacccctcctcacctattctcttcctctatcctgaccgatgtaagcattgtgatgaaacagatcttttgcttatgtttttcctttttatcttctctcatcccagcatactgagttatttattaattagttgatttatttttgcctttttaaattttaacttatatcagtcacttgccactcccccaccctcctgtccacaactcctttccactttaggccaatttttctctcttagatcttccagcagccccaggggtaggaagctcctcttagtactaagagacttcaagcttcttgctttaagtcctcaccctttacattatctaattcttcagttttgatgctgatacctgcccccggccctaccttagctctgtggcattatatctcctctctgggactcttcaacctggtactccatacctcttgtgccctctcactttaggcagcttgcactattcttgaatgaatgaagaattatttcctcatttggaagtaggagggactgaagaaattctccccaggcactgtgggactgagagtcctattcccctagtaataggtcatattcccctagtaatatgagttctcaaagcctacattcaggatctccctctaggatgtgatagatctggtccctctccttgaactacccctccacacgctctagtcccttcaacctaccggtctattaagtggtggcttttctctccttggagtgccccaattttatattctcaggggccaaggctaggtctgcaaccctctgtctctgacagattgggagccacaggtgcctaattgggaaccagggcatgggaaaggagtgggtcaaaattcttctctttctcctccacctctcaaacttcttcactatagtgaccttcctaggctctcaggggctccttcagtccccatcctatgagaaactagtgggttgctgcctgatgacaaggggttgtttcagcccctcagtcatgctgccttctgctgctccctcccagcaggattcaccctctcattcccgggctcctgggccctgttcttaggatcagtggcagggagaaacgggtatctcttttctctcttctaattttcagtataaccaaaaattatcccagcatgagcacgggcacgtgcccttcaccccattccacccttgttccagcaagactgggatgggtacaactgaactggggtcttcctttactacccccttctacactcagctcccagacacagggtaggaggggggactgctggctactgcagagacccttggctatttgagtaacctaggattagtgagaaggggcagaaggagatacaactccactgcaagtggaggtttctttctacaagagttttctgcccaaggccacagccatcccactctctgcttccttgagattcaaaccaaaggctgtttttctatgtttaaagaaaaaaaaaagtaaaaaccaaacacaacacctcacaagttgtaactcttggtccttctctctctccttttctcttcccttccttccccttccatctttctttccacatgtcctttccttattggctcttttacctcctacttttctcactccctatcagggatattttggggggggatggtaaagggtgggctaaggaacagaccctgggattagggccttaagggctctgagaggagtctaccttgccttcttatgggaagggagaccctaaaaaactttctcctctttgtcctcctttttctcccccactctgaggtttccccaagagaaccagattggcagggagaagcattgtggggcaattgttcctccttgacaatgtagcaataaatagatgctgccaagggcagaaaatggggaggttagctcagagcagagtagtctctagagaaaggaagaatcctcaacggcaccctggggtgctagctcctttttagaatgtcagcagagctgagattaatatctgggcttttcctgaactattctggttattgagcccttcctgttagacctaccgcctcccacctcttctgtgtctgctgtgtatttggtgacacttcataaggactagtcccttctggggtatcagagccttagggtgcccccatccccttccccagtcaactgtggcacctgtaacctcccggaacatgaaggactatgctctgaggctatactctgtgcccatgagagcagagactggaagggcaagaccaggtgctaaggaggggagagggggcatcctgtctctctccagaccatcactgcactttaaccagggtcttaggtacaaaatcctacttttcagagccttccagctctggaacctcaaacatcctcatgctctctcccagctccttttgcataaaaaaaaaagtaaagaaaaagaaaaaaaaatacacacacactgaaacccacatggagaaaagaggtgtttccttttatattgctattcaaaatcaataccaccaacaaaatatttctaagtagacacttttccagacctttgtttttttgtgtcagtgtccaagctgcagataggattttgtaatacttctggcagcttctttccttgtgtacataatatatatatatacatatatatatatatttttaatcagaagttatgaagaacaaaaagaaaaaataaacacagaagcaagtgcaataccacctctcttctccctctctcctagggtttcctttgtagcctatgtttggtgtctcttttgacctttaccccttcacctcctcctctcttcttctgattcccctcccccccttttttaaagagtttttctcctttctcaaggggagttaaactagcttttgagacttattgcaaagcattttgtatatgtaatatattgtaagtaaatatttgtgtaacggagatatactactgtaagttttgtactgtactggctgaaagtctgttataaataaacatgagtaatttaacacc

SEQ ID NO: 141968 - DNA, 5021 bp, Homo sapiens
  Payload ID: 7912
  Gene Symbol: IKZF4
  Gene Name: IKAROS family zinc finger 4 (Eos)
  Uniprot ID: Q9H2S9
  ENST ID: ENST00000431367
  CDS Start-End: 160-1917
ggaccaatgaaggaattattggcatgcactaaaggagatagcaagatgggtcagacacacatatgagagtcattggcaacacccgggtaatgtaaggaatccacgcttcctggaaggtgagtggctgggctcacccctgcctgccactgagacgcagacatgcatacaccacccgcactccctcgccgtttccaaggcggcggccgcgttcgcaccccagggtctcaccggcaagggaaggataatctggagagggatccctcaggagggtgtgttccggatttcttgcctcaggcccaagactccaaccattttataatggaatctttattttgtgaaagtagcggggactcatctctggagaaggagttcctcggggccccagtggggccctcggtgagcacccccaacagccagcactcttctcctagccgctcactcagtgccaactccatcaaggtggagatgtacagcgatgaggagtcaagcagactgctggggccagatgagcggctcctggaaaaggacgacagcgtgattgtggaagattcattgtctgagcccctgggctactgtgatgggagtgggccagagcctcactcccctgggggcatccggctgcccaatggcaagctcaagtgtgacgtctgcggcatggtctgtattggacccaacgtgctcatggtgcacaagcgcagtcacactggtgaaaggcccttccattgcaaccagtgtggtgcctccttcacccagaaggggaacctgctgcgccacatcaagctgcactctggggagaagccctttaaatgtcccttctgcaactatgcctgccgccggcgtgatgcactcactggtcacctccgcacacactcagtctcctctcccacagtgggcaagccctacaagtgtaactactgtggccggagctacaaacagcagagtaccctggaggagcacaaggagcggtgccataactacctacagagtctcagcactgaagcccaagctttggctggccaaccaggtgacgaaatacgtgacctggagatggtgccagactccatgctgcactcatcctctgagcggccaactttcatcgatcgtctggccaatagcctcaccaaacgcaagcgttccacaccccagaagtttgtaggcgaaaagcagatgcgcttcagcctctcagacctcccctatgatgtgaactcgggtggctatgaaaaggatgtggagttggtggcacaccacagcctagagcctggctttggaagttccctggcctttgtgggtgcagagcatctgcgtcccctccgccttccacccaccaattgcatctcagaactcacgcctgtcatcagctctgtctacacccagatgcagcccctccctggtcgactggagcttccaggatcccgagaagcaggtgagggacctgaggacctggctgatggaggtcccctcctctaccggccccgaggccccctgactgaccctggggcatcccccagcaatggctgccaggactccacagacacagaaagcaaccacgaagatcgggttgcgggggtggtatccctccctcagggtcccccaccccagccacctcccaccattgtggtgggccggcacagtcctgcctacgccaaagaggaccccaagccacaggaggggttattgcggggcaccccaggcccctccaaggaagtgcttcgggtggtgggcgagagtggtgagcctgtgaaggccttcaagtgtgagcactgccgtatcctcttcctggaccacgtcatgttcactatccacatgggctgccatggcttcagagacccttttgagtgcaacatctgtggttatcacagccaggaccggtacgaattctcttcccacattgtccggggggagcataaggtgggctagcaacctctccctctctcctcagtccaccactccactgccctgactacaggcattgatccctgtccccaccatttcccaaggagttttgctttgtagccctcactactggccacctgacctcacacctgaccctgacccctcctcacctattctcttcctctatcctgaccgatgtaagcattgtgatgaaacagatcttttgcttatgtttttcctttttatcttctctcatcccagcatactgagttatttattaattagttgatttatttttgcctttttaaattttaacttatatcagtcacttgccactcccccaccctcctgtccacaactcctttccactttaggccaatttttctctcttagatcttccagcagccccaggggtaggaagctcctcttagtactaagagacttcaagcttcttgctttaagtcctcaccctttacattatctaattcttcagttttgatgctgatacctgcccccggccctaccttagctctgtggcattatatctcctctctgggactcttcaacctggtactccatacctcttgtgccctctcactttaggcagcttgcactattcttgaatgaatgaagaattatttcctcatttggaagtaggagggactgaagaaattctccccaggcactgtgggactgagagtcctattcccctagtaataggtcatattcccctagtaatatgagttctcaaagcctacattcaggatctccctctaggatgtgatagatctggtccctctccttgaactacccctccacacgctctagtcccttcaacctaccggtctattaagtggtggcttttctctccttggagtgccccaattttatattctcaggggccaaggctaggtctgcaaccctctgtctctgacagattgggagccacaggtgcctaattgggaaccagggcatgggaaaggagtgggtcaaaattcttctctttctcctccacctctcaaacttcttcactatagtgaccttcctaggctctcaggggctccttcagtccccatcctatgagaaactagtgggttgctgcctgatgacaaggggttgtttcagcccctcagtcatgctgccttctgctgctccctcccagcaggattcaccctctcattcccgggctcctgggccctgttcttaggatcagtggcagggagaaacgggtatctcttttctctcttctaattttcagtataaccaaaaattatcccagcatgagcacgggcacgtgcccttcaccccattccacccttgttccagcaagactgggatgggtacaactgaactggggtcttcctttactacccccttctacactcagctcccagacacagggtaggaggggggactgctggctactgcagagacccttggctatttgagtaacctaggattagtgagaaggggcagaaggagatacaactccactgcaagtggaggtttctttctacaagagttttctgcccaaggccacagccatcccactctctgcttccttgagattcaaaccaaaggctgtttttctatgtttaaagaaaaaaaaaagtaaaaaccaaacacaacacctcacaagttgtaactcttggtccttctctctctccttttctcttcccttccttccccttccatctttctttccacatgtcctttccttattggctcttttacctcctacttttctcactccctatcagggatattttggggggggatggtaaagggtgggctaaggaacagaccctgggattagggccttaagggctctgagaggagtctaccttgccttcttatgggaagggagaccctaaaaaactttctcctctttgtcctcctttttctcccccactctgaggtttccccaagagaaccagattggcagggagaagcattgtggggcaattgttcctccttgacaatgtagcaataaatagatgctgccaagggcagaaaatggggaggttagctcagagcagagtagtctctagagaaaggaagaatcctcaacggcaccctggggtgctagctcctttttagaatgtcagcagagctgagattaatatctgggcttttcctgaactattctggttattgagcccttcctgttagacctaccgcctcccacctcttctgtgtctgctgtgtatttggtgacacttcataaggactagtcccttctggggtatcagagccttagggtgcccccatccccttccccagtcaactgtggcacctgtaacctcccggaacatgaaggactatgctctgaggctatactctgtgcccatgagagcagagactggaagggcaagaccaggtgctaaggaggggagagggggcatcctgtctctctccagaccatcactgcactttaaccagggtcttaggtacaaaatcctacttttcagagccttccagctctggaacctcaaacatcctcatgctctctcccagctccttttgcataaaaaaaaaagtaaagaaaaagaaaaaaaaatacacacacactgaaacccacatggagaaaagaggtgtttccttttatattgctattcaaaatcaataccaccaacaaaatatttctaagtagacacttttccagacctttgtttttttgtgtcagtgtccaagctgcagataggattttgtaatacttctggcagcttctttccttgtgtacataatatatatatatacatatatatatatatttttaatcagaagttatgaagaacaaaaagaaaaaataaacacagaagcaagtgcaataccacctctcttctccctctctcctagggtttcctttgtagcctatgtttggtgtctcttttgacctttaccccttcacctcctcctctcttcttctgattcccctcccccccttttttaaagagtttttctcctttctcaaggggagttaaactagcttttgagacttattgcaaagcattttgtatatgtaatatattgtaagtaaatatttgtgtaacggagatatactactgtaagttttgtactgtactggctgaaagtctgttataaataaacatgagtaatttaacacc

SEQ ID NO: 141969 - DNA, 2539 bp, Homo sapiens
  Payload ID: 7912
  Gene Symbol: IKZF4
  Gene Name: IKAROS family zinc finger 4 (Eos)
  Uniprot ID: Q9H2S9
  ENST ID: ENST00000547167
  CDS Start-End: 415-2172
ctctttgtctgctgggcacgaggggcaacagcatctgcctttccctccctgtgcacacacccaccacccacccccttcactgtcttggaaaagggatgctgtagcctagcatctcccccactatatacacatatacattctctccagccccctccccaagcacatccaagcgtgctctcccctctccttctctccctctctctctctctctctctcacacacacacacacacacacactcaacacacatacaccctgggctgagctgctcttgctggctgcagccgtgggcctctgctcaccgtgccgctgctgctgcctgcgaaatgacggcggttcccctcacttccaggaatccacgcttcctggaaggtgagtggctgggctcacccctgcctgccactgagacgcagacatgcatacaccacccgcactccctcgccgtttccaaggcggcggccgcgttcgcaccccagggtctcaccggcaagggaaggataatctggagagggatccctcaggagggtgtgttccggatttcttgcctcaggcccaagactccaaccattttataatggaatctttattttgtgaaagtagcggggactcatctctggagaaggagttcctcggggccccagtggggccctcggtgagcacccccaacagccagcactcttctcctagccgctcactcagtgccaactccatcaaggtggagatgtacagcgatgaggagtcaagcagactgctggggccagatgagcggctcctggaaaaggacgacagcgtgattgtggaagattcattgtctgagcccctgggctactgtgatgggagtgggccagagcctcactcccctgggggcatccggctgcccaatggcaagctcaagtgtgacgtctgcggcatggtctgtattggacccaacgtgctcatggtgcacaagcgcagtcacactggtgaaaggcccttccattgcaaccagtgtggtgcctccttcacccagaaggggaacctgctgcgccacatcaagctgcactctggggagaagccctttaaatgtcccttctgcaactatgcctgccgccggcgtgatgcactcactggtcacctccgcacacactcagtctcctctcccacagtgggcaagccctacaagtgtaactactgtggccggagctacaaacagcagagtaccctggaggagcacaaggagcggtgccataactacctacagagtctcagcactgaagcccaagctttggctggccaaccaggtgacgaaatacgtgacctggagatggtgccagactccatgctgcactcatcctctgagcggccaactttcatcgatcgtctggccaatagcctcaccaaacgcaagcgttccacaccccagaagtttgtaggcgaaaagcagatgcgcttcagcctctcagacctcccctatgatgtgaactcgggtggctatgaaaaggatgtggagttggtggcacaccacagcctagagcctggctttggaagttccctggcctttgtgggtgcagagcatctgcgtcccctccgccttccacccaccaattgcatctcagaactcacgcctgtcatcagctctgtctacacccagatgcagcccctccctggtcgactggagcttccaggatcccgagaagcaggtgagggacctgaggacctggctgatggaggtcccctcctctaccggccccgaggccccctgactgaccctggggcatcccccagcaatggctgccaggactccacagacacagaaagcaaccacgaagatcgggttgcgggggtggtatccctccctcagggtcccccaccccagccacctcccaccattgtggtgggccggcacagtcctgcctacgccaaagaggaccccaagccacaggaggggttattgcggggcaccccaggcccctccaaggaagtgcttcgggtggtgggcgagagtggtgagcctgtgaaggccttcaagtgtgagcactgccgtatcctcttcctggaccacgtcatgttcactatccacatgggctgccatggcttcagagacccttttgagtgcaacatctgtggttatcacagccaggaccggtacgaattctcttcccacattgtccggggggagcataaggtgggctagcaacctctccctctctcctcagtccaccactccactgccctgactacaggcattgatccctgtccccaccatttcccaaggagttttgctttgtagccctcactactggccacctgacctcacacctgaccctgacccctcctcacctattctcttcctctatcctgaccgatgtaagcattgtgatgaaacagatcttttgcttatgtttttcctttttatcttctctcatcccagcatactgagttatttattaattagttgatttatttttgcctttttaaattttaacttatatcagtcacttgccactcccccaccctcctgtccacaactcctttccactttaggccaatttttctctctt

SEQ ID NO: 141970 - DNA, 420 bp, Homo sapiens
  Payload ID: 7912
  Gene Symbol: IKZF4
  Gene Name: IKAROS family zinc finger 4 (Eos)
  ENST ID: ENST00000552689
  CDS Start-End: 391-420
tggccattcctaggatgacctgggaatttatcccctctgcactgctccccaagcacttggataatgaagctgagctgtcttcaactgtattatatgtagacagaaggtcaccatctacagcctggtgaaaaatgagtcagacctttccactgtaaagacaaacacatgagctgagctaagaatctctttaaaatggacatagaagactgcaatggccgctcctatgtgtctggaccaatgaaggaattattggcatgcactaaaggagatagcaagatgggtcagacacacatatgagagtcattggcaacacccgggtaatgtaaggaatccacgcttcctggaaggtgagtggctgggctcacccctgcctgccactgagacgcagacatgcatacaccacccgcactccctcgccgt

SEQ ID NO: 141971 - DNA, 3683 bp, Homo sapiens
  Payload ID: 7912
  Gene Symbol: IKZF4
  Gene Name: IKAROS family zinc finger 4 (Eos)
  ENST ID: ENST00000551103
  CDS Start-End: 447-593
cttgcctctctcaggcatttgttgtgcagttcctctttgtctgctgggcacgaggggcaacagcatctgcctttccctccctgtgcacacacccaccacccacccccttcactgtcttggaaaagggatgctgtagcctagcatctcccccactatatacacatatacattctctccagccccctccccaagcacatccaagcgtgctctcccctctccttctctccctctctctctctctctctctcacacacacacacacacacacactcaacacacatacaccctgggctgagctgctcttgctggctgcagccgtgggcctctgctcaccgtgccgctgctgctgcctgcgaaatgacggcggttcccctcacttccaggaatccacgcttcctggaaggtgagtggctgggctcacccctgcctgccactgagacgcagacatgcatacaccacccgcactccctcgccgtttccaaggcggcggccgcgttcgcaccccagggtctcaccggcaagggaaggataatgtagcggggactcatctctggagaaggagttcctcggggccccagtggggccctcggtgagcacccccaacagccagcactcttctcctagccgctcactcagtgccaactccatcaaggtggagatgtacagcgatgaggagtcaagcagactgctggggccagatgagcggctcctggaaaaggacgacagcgtgattgtggaagattcattgtctgagcccctgggctactgtgatgggagtgggccagagcctcactcccctgggggcatccggctgcccaatggcaagctcaagtgtgacgtctgcggcatggtctgtattggacccaacgtgctcatggtgcacaagcgcagtcacactggtgaaaggcccttccattgcaaccagtgtggtgcctccttcacccagaaggggaacctgctgcgccacatcaagctgcactctggggagaagccctttaaatgtcccttctgcaactatgcctgccgccggcgtgatgcactcactggtcacctccgcacacactcagtctcctctcccacagtgggcaagccctacaagtgtaactactgtggccggagctacaaacagcagagtaccctggaggagcacaaggagcggtgccataactacctacagagtctcagcactgaagcccaagctttggctggccaaccaggtgacgaaatacgtgacctggagatggtgccagactccatgctgcactcatcctctgagcggccaactttcatcgatcgtctggccaatagcctcaccaaacgcaagcgttccacaccccagaagtttgtaggcgaaaagcagatgcgcttcagcctctcagacctcccctatgatgtgaactcgggtggctatgaaaaggatgtggagttggtggcacaccacagcctagagcctggctttggaagttccctggcctttgtgggtgcagagcatctgcgtcccctccgccttccacccaccaattgcatctcagaactcacgcctgtcatcagctctgtctacacccagatgcagcccctccctggtcgactggagcttccaggatcccgagaagcaggtgagggacctgaggacctggctgatggaggtcccctcctctaccggccccgaggccccctgactgaccctggggcatcccccagcaatggctgccaggactccacagacacagaaagcaaccacgaagatcgggttgcgggggtggtatccctccctcagggtcccccaccccagccacctcccaccattgtggtgggccggcacagtcctgcctacgccaaagaggaccccaagccacaggaggggttattgcggggcaccccaggcccctccaaggaagtgcttcgggtggtgggcgagagtggtgagcctgtgaaggccttcaagtgtgagcactgccgtatcctcttcctggaccacgtcatgttcactatccacatgggctgccatggcttcagagacccttttgagtgcaacatctgtggttatcacagccaggaccggtacgaattctcttcccacattgtccggggggagcataaggtgggctagcaacctctccctctctcctcagtccaccactccactgccctgactacaggcattgatccctgtccccaccatttcccaaggagttttgctttgtagccctcactactggccacctgacctcacacctgaccctgacccctcctcacctattctcttcctctatcctgaccgatgtaagcattgtgatgaaacagatcttttgcttatgtttttcctttttatcttctctcatcccagcatactgagttatttattaattagttgatttatttttgcctttttaaattttaacttatatcagtcacttgccactcccccaccctcctgtccacaactcctttccactttaggccaatttttctctcttagatcttccagcagccccaggggtaggaagctcctcttagtactaagagacttcaagcttcttgctttaagtcctcaccctttacattatctaattcttcagttttgatgctgatacctgcccccggccctaccttagctctgtggcattatatctcctctctgggactcttcaacctggtactccatacctcttgtgccctctcactttaggcagcttgcactattcttgaatgaatgaagaattatttcctcatttggaagtaggagggactgaagaaattctccccaggcactgtgggactgagagtcctattcccctagtaataggtcatattcccctagtaatatgagttctcaaagcctacattcaggatctccctctaggatgtgatagatctggtccctctccttgaactacccctccacacgctctagtcccttcaacctaccggtctattaagtggtggcttttctctccttggagtgccccaattttatattctcaggggccaaggctaggtctgcaaccctctgtctctgacagattgggagccacaggtgcctaattgggaaccagggcatgggaaaggagtgggtcaaaattcttctctttctcctccacctctcaaacttcttcactatagtgaccttcctaggctctcaggggctccttcagtccccatcctatgagaaactagtgggttgctgcctgatgacaaggggttgtttcagcccctcagtcatgctgccttctgctgctccctcccagcaggattcaccctctcattcccgggctcctgggccctgttcttaggatcagtggcagggagaaacgggtatctcttttctctcttctaattttcagtataaccaaaaattatcccagcatgagcacgggcacgtgcccttcaccccattccacccttgttccagcaagactgggatgggtacaactgaactggggtcttcctttactacccccttctacactcagctcccagacacagggtaggaggggggactgctggctactgcagagacccttggctatttgagtaacctaggattagtgagaaggggcagaaggagatacaactccactgcaagtggaggtttctttctacaagagttttctgcccaaggccacagccatcccactctctgcttccttgagattcaaaccaaaggctgtttttctatgttt

SEQ ID NO: 141972 - DNA, 1712 bp, Homo sapiens
  Payload ID: 7912
  Gene Symbol: IKZF4
  Gene Name: IKAROS family zinc finger 4 (Eos)
  ENST ID: ENST00000547791
  CDS Start-End: 90-1712
actcaacacacatacaccctgggctgagctgctcttgctggctgcagccgtgggcctctgctcaccgtgccgctgctgctgcctgcgaaatgacggcggttcccctcacttccaggaatccacgcttcctggaaggtagcggggactcatctctggagaaggagttcctcggggccccagtggggccctcggtgagcacccccaacagccagcactcttctcctagccgctcactcagtgccaactccatcaaggtggagatgtacagcgatgaggagtcaagcagactgctggggccagatgagcggctcctggaaaaggacgacagcgtgattgtggaagattcattgtctgagcccctgggctactgtgatgggagtgggccagagcctcactcccctgggggcatccggctgcccaatggcaagctcaagtgtgacgtctgcggcatggtctgtattggacccaacgtgctcatggtgcacaagcgcagtcacactggtgaaaggcccttccattgcaaccagtgtggtgcctccttcacccagaaggggaacctgctgcgccacatcaagctgcactctggggagaagccctttaaatgtcccttctgcaactatgcctgccgccggcgtgatgcactcactggtcacctccgcacacactcagtctcctctcccacagtgggcaagccctacaagtgtaactactgtggccggagctacaaacagcagagtaccctggaggagcacaaggagcggtgccataactacctacagagtctcagcactgaagcccaagctttggctggccaaccaggtgacgaaatacgtgacctggagatggtgccagactccatgctgcactcatcctctgagcggccaactttcatcgatcgtctggccaatagcctcaccaaacgcaagcgttccacaccccagaagtttgtaggcgaaaagcagatgcgcttcagcctctcagacctcccctatgatgtgaactcgggtggctatgaaaaggatgtggagttggtggcacaccacagcctagagcctggctttggaagttccctggcctttgtgggtgcagagcatctgcgtcccctccgccttccacccaccaattgcatctcagaactcacgcctgtcatcagctctgtctacacccagatgcagcccctccctggtcgactggagcttccaggatcccgagaagcaggtgagggacctgaggacctggctgatggaggtcccctcctctaccggccccgaggccccctgactgaccctggggcatcccccagcaatggctgccaggactccacagacacagaaagcaaccacgaagatcgggttgcgggggtggtatccctccctcagggtcccccaccccagccacctcccaccattgtggtgggccggcacagtcctgcctacgccaaagaggaccccaagccacaggaggggttattgcggggcaccccaggcccctccaaggaagtgcttcgggtggtgggcgagagtggtgagcctgtgaaggccttcaagtgtgagcactgccgtatcctcttcctggaccacgtcatgttcactatccacatgggctgccatggcttcagagacccttttgagtgcaacatctgtggttatcacagccaggaccggtacgaattctcttcccacattgtccggggggagcataaggtgggctag

SEQ ID NO: 141973 - DNA, 4555 bp, Homo sapiens
  Payload ID: 7913
  Gene Symbol: IKZF5
  Gene Name: IKAROS family zinc finger 5 (Pegasus)
  Uniprot ID: Q9H5V7
  ENST ID: ENST00000368886
  CDS Start-End: 322-1581
gggcgggaagggagtcggagacacaacaaagatggcggcggcgactgtgacggtgacgaagacggcggcggcggcgacggcatttaacaaggcggtgtggtttactccatgcagttgtcaggagacctctgtatggcttttcaattttagttgaaattctctctccatggccttttggagtcccttgctgtatctccgaagtaaatttcaattactctacatttcatcaatgttggagtggcaagaaaaaggaggaacagatttggggtgaaaagttttgttttctaggtctaacaaactgtaaatgttaaaaaagcaaagatgggtgaaaaaaaaccagagcctttggacttcgtgaaagattttcaggaatacctgactcagcagacccatcacgtgaacatgatttctggatcagttagtggggacaaagaagcagaggctcttcagggagctggaacagatggtgatcaaaatggacttgatcacccatctgttgaagtttccttggatgaaaactcaggaatgttagtagacgggtttgaaaggacctttgatgggaagcttaagtgtcggtactgcaactatgccagcaaaggaacagcccggcttattgaacacatcagaatccacacaggtgaaaaacctcatcgatgtcatctttgtccatttgcatctgcttatgagcgtcatctggaagcccatatgcgttctcatactggagaaaaaccatacaaatgtgaattatgttccttccgctgcagtgatcgaagtaacttgtcccatcatcgaaggcgcaagcataaaatggtaccaattaaaggtactaggtcttccttaagcagcaagaaaatgtggggggttttacagaagaaaacaagcaatctgggctatagcagaagagcactaatcaacttaagtccaccttccatggtggttcagaaaccagactaccttaacgattttacccacgaaatcccaaatatccagactgactcctatgaaagtatggcaaaaaccacaccaactggtggccttccaagggacccccaagaactcatggttgataaccctttgaatcagctctcgactctagcagggcagttgtccagtctgccacccgaaaaccaaaaccctgcatcccctgatgtagttccctgccctgatgaaaagcctttcatgattcagcagccctctacccaagcagtagtttctgccgtatcagcaagtattcctcagagctcctctcccacaagcccagaacctcggccatcccatagtcaaaggaactatagtccagtggcaggtccaagcagtgagccaagtgcccacacgagcactcccagcataggaaacagccagccaagcaccccagccccagccctgccggtccaggaccctcagcttctgcaccactgccagcactgtgatatgtactttgcagacaacatcctttacactattcatatgggatgtcatgggtatgaaaatccttttcagtgtaatatatgtggatgcaaatgtaaaaacaagtatgattttgcctgtcattttgcaagagggcaacataaccaacattgattgaaaatagtcatattttacttagttttgctgtttttgtggtttggttttttttgttttttgttttggtcatccctaataaagtgtctgctaattcaaggcttatacattatatttatagaatataaatttgtcagtggaataaaatttcccctttttttcataaaaatctggtcagggtcatttatatattagaacagttagacacattggtgtctcttttttcctttcctttcgacattggagaattggagtgcagtcataatcttacaagatgttcatttgaatttctcacatttatggtccataaaaacttcaaggcttatccatacttttgatgtttcaatatgcattgaactggatgttatttctgccatatttcaaaatggtagaataaattacagaatttattactactcatttcagtgtttagtacagaaattgccttaaaaattgctattaattgaaatatcatttagttcacattccttaagttgaatcggtagtttcatttcaactgataatagtaaagctatttcagtttagtaaaaattttcttttttccacaagaggaaatgtaaaacagttaagacttgaaattgaaaattcttttaatatttaaaataacttgtttattcaatgtctaaacacatgtcagttttccactggatttttattttcacaggtaaatacactagagtgctagatgcctttttcccctgtcagtttgactttcatttaaatccttcattctgatatcattactgttaggtgaggtggataactataatgagaatctcttattcttcctattcctttgatgaccaaagagataaagtgaagtcatccttattattaaaatgcagcctccaaacaaatttctcaagattccttttccttccttctatccattttctgcccataatttccaagaaaaggtgggtatggaaacacatgagagaatgtgatagtgaagtcatatttacaaaactgagaacatgtccaaaatggattcttgtctcctcttcagaattagccatttaaaatattttctgtgacttcaaattgtaattcttatttgcagttttaccagtcttcatgtacagtgacgaaactgtgtagaaactaaatcatcgctttagtaagaaaggataaaaaggtgtggaagtgaatataaaatgcatctaaacatgacatttaatttgtttataaaaataagacttactaaatatagagtaattcattttgaataggaggctattgtttttatattgtgtaataactcacgtactctgaagagagcttggtcaaacaataaaatacattgttactaacttggtttcttttctgtgtactttgcaaaaattctatttttaattttgttcatatgttgaatgtgcccctaattggcatcttaaagagaatagtaagcatctattaaccaaaaaagaactctaatagtaaaggaaagggaaatattggtggtatgtacccacaaaacccccaagtgccaagttaatggaatctctgctttccctttcagatgctagaaagccactgtaatgagttcttgcagtttagcatccagtctaagctactgcattgtttaaagagcagcatcaaggacactttctccaaactggaactctcttctttgtcaaatcttgtactttaaaattctacaattctgttacattgttgtttaaatcacagactgctcagatccattttactgcagtagtttccaagtgtgtaacttggctttagtatttatcagttgccagaaagaaacaggttgtcatttggaagtttttgtggttattttttcccatttttattcttcagataaaagcagtaccccaaaatagaaaatgaaaattttcatgaaacaaagagaactcccttgttaaaaccagcttattaactctgtattctgtcaaatgcatttttttctaacaactgaccatggatgttgtgaaggtgcattttaatttaaacatggaaaagatttttttcataattacatactagaatgtaaaattataattttgccatgacttaaagagcacagttgatatcccaaaggttttgatgctaagaagctacagttattctaaatgcactaaaatgtttgaggcaaatctaccttagaggcttttttggtatggtattttttaaaatatttagattttatttaaatttcctgtgagttattctgtatttgaaaagatgttcgtgtcttcccctctgtattgaatgtttcactcattttatttttaatcaaatattttatagaaatgagttgttgggaagagtttaacatgcactatttatagtactttgccgttaacaggcaatgttctgaaactaaatttatttttgttcagtgaacataagtttagatttttaaagttggtagataatttatctccactaatatttttttaagaaactgtgaagagattaactgggaataattttatttcagattttactaatgtagtatgtagctacaacttcttgaacttcaagttaaggctagacatttactttgaaaaaattccactgggtgtttccagggctatttcattttagaaataagtgtttgccattcttctgcaaaaactggacaaggggaatactacaaaaaatactcagagataaaatcctcatttcaagttctacaaaatatttatcaaatgaatgttaatttttttttaattccctgctaaagacgttttcattagtcttagagggtatatgctttctagaacttgtttttgttaacatgtgctttgatgtaaagaacatattttgtatgcaaaacataacttgcattatggttgtacaatacactatattgtttagggattccggaaagcagtttaatgcagaaataactatatctagtatgcagttcatattgtgaatgaagctttgcttttgtaataaataaataagactttctaatgac

SEQ ID NO: 141974 - DNA, 4542 bp, Homo sapiens
  Payload ID: 7913
  Gene Symbol: IKZF5
  Gene Name: IKAROS family zinc finger 5 (Pegasus)
  Uniprot ID: Q9H5V7
  ENST ID: ENST00000617859
  CDS Start-End: 311-1570
agcaggctgccggctcggacggcggcgacgcggcaggacagggcggataagaaggagcggccggagactggagctgggttcgtggcgggccggctgatccggacggagactcaacctctgtatggcttttcaattttagttgaaattctctctccatggccttttggagtcccttgctgtatctccgaagtaaatttcaattactctacatttcatcaatgttggagtggcaagaaaaaggaggaacagatttggggtgaaaagttttgttttctaggtctaacaaactgtaaatgttaaaaaagcaaagatgggtgaaaaaaaaccagagcctttggacttcgtgaaagattttcaggaatacctgactcagcagacccatcacgtgaacatgatttctggatcagttagtggggacaaagaagcagaggctcttcagggagctggaacagatggtgatcaaaatggacttgatcacccatctgttgaagtttccttggatgaaaactcaggaatgttagtagacgggtttgaaaggacctttgatgggaagcttaagtgtcggtactgcaactatgccagcaaaggaacagcccggcttattgaacacatcagaatccacacaggtgaaaaacctcatcgatgtcatctttgtccatttgcatctgcttatgagcgtcatctggaagcccatatgcgttctcatactggagaaaaaccatacaaatgtgaattatgttccttccgctgcagtgatcgaagtaacttgtcccatcatcgaaggcgcaagcataaaatggtaccaattaaaggtactaggtcttccttaagcagcaagaaaatgtggggggttttacagaagaaaacaagcaatctgggctatagcagaagagcactaatcaacttaagtccaccttccatggtggttcagaaaccagactaccttaacgattttacccacgaaatcccaaatatccagactgactcctatgaaagtatggcaaaaaccacaccaactggtggccttccaagggacccccaagaactcatggttgataaccctttgaatcagctctcgactctagcagggcagttgtccagtctgccacccgaaaaccaaaaccctgcatcccctgatgtagttccctgccctgatgaaaagcctttcatgattcagcagccctctacccaagcagtagtttctgccgtatcagcaagtattcctcagagctcctctcccacaagcccagaacctcggccatcccatagtcaaaggaactatagtccagtggcaggtccaagcagtgagccaagtgcccacacgagcactcccagcataggaaacagccagccaagcaccccagccccagccctgccggtccaggaccctcagcttctgcaccactgccagcactgtgatatgtactttgcagacaacatcctttacactattcatatgggatgtcatgggtatgaaaatccttttcagtgtaatatatgtggatgcaaatgtaaaaacaagtatgattttgcctgtcattttgcaagagggcaacataaccaacattgattgaaaatagtcatattttacttagttttgctgtttttgtggtttggttttttttgttttttgttttggtcatccctaataaagtgtctgctaattcaaggcttatacattatatttatagaatataaatttgtcagtggaataaaatttcccctttttttcataaaaatctggtcagggtcatttatatattagaacagttagacacattggtgtctcttttttcctttcctttcgacattggagaattggagtgcagtcataatcttacaagatgttcatttgaatttctcacatttatggtccataaaaacttcaaggcttatccatacttttgatgtttcaatatgcattgaactggatgttatttctgccatatttcaaaatggtagaataaattacagaatttattactactcatttcagtgtttagtacagaaattgccttaaaaattgctattaattgaaatatcatttagttcacattccttaagttgaatcggtagtttcatttcaactgataatagtaaagctatttcagtttagtaaaaattttcttttttccacaagaggaaatgtaaaacagttaagacttgaaattgaaaattcttttaatatttaaaataacttgtttattcaatgtctaaacacatgtcagttttccactggatttttattttcacaggtaaatacactagagtgctagatgcctttttcccctgtcagtttgactttcatttaaatccttcattctgatatcattactgttaggtgaggtggataactataatgagaatctcttattcttcctattcctttgatgaccaaagagataaagtgaagtcatccttattattaaaatgcagcctccaaacaaatttctcaagattccttttccttccttctatccattttctgcccataatttccaagaaaaggtgggtatggaaacacatgagagaatgtgatagtgaagtcatatttacaaaactgagaacatgtccaaaatggattcttgtctcctcttcagaattagccatttaaaatattttctgtgacttcaaattgtaattcttatttgcagttttaccagtcttcatgtacagtgacgaaactgtgtagaaactaaatcatcgctttagtaagaaaggataaaaaggtgtggaagtgaatataaaatgcatctaaacatgacatttaatttgtttataaaaataagacttactaaatatagagtaattcattttgaataggaggctattgtttttatattgtgtaataactcacgtactctgaagagagcttggtcaaacaataaaatacattgttactaacttggtttcttttctgtgtactttgcaaaaattctatttttaattttgttcatatgttgaatgtgcccctaattggcatcttaaagagaatagtaagcatctattaaccaaaaaagaactctaatagtaaaggaaagggaaatattggtggtatgtacccacaaaacccccaagtgccaagttaatggaatctctgctttccctttcagatgctagaaagccactgtaatgagttcttgcagtttagcatccagtctaagctactgcattgtttaaagagcagcatcaaggacactttctccaaactggaactctcttctttgtcaaatcttgtactttaaaattctacaattctgttacattgttgtttaaatcacagactgctcagatccattttactgcagtagtttccaagtgtgtaacttggctttagtatttatcagttgccagaaagaaacaggttgtcatttggaagtttttgtggttattttttcccatttttattcttcagataaaagcagtaccccaaaatagaaaatgaaaattttcatgaaacaaagagaactcccttgttaaaaccagcttattaactctgtattctgtcaaatgcatttttttctaacaactgaccatggatgttgtgaaggtgcattttaatttaaacatggaaaagatttttttcataattacatactagaatgtaaaattataattttgccatgacttaaagagcacagttgatatcccaaaggttttgatgctaagaagctacagttattctaaatgcactaaaatgtttgaggcaaatctaccttagaggcttttttggtatggtattttttaaaatatttagattttatttaaatttcctgtgagttattctgtatttgaaaagatgttcgtgtcttcccctctgtattgaatgtttcactcattttatttttaatcaaatattttatagaaatgagttgttgggaagagtttaacatgcactatttatagtactttgccgttaacaggcaatgttctgaaactaaatttatttttgttcagtgaacataagtttagatttttaaagttggtagataatttatctccactaatatttttttaagaaactgtgaagagattaactgggaataattttatttcagattttactaatgtagtatgtagctacaacttcttgaacttcaagttaaggctagacatttactttgaaaaaattccactgggtgtttccagggctatttcattttagaaataagtgtttgccattcttctgcaaaaactggacaaggggaatactacaaaaaatactcagagataaaatcctcatttcaagttctacaaaatatttatcaaatgaatgttaatttttttttaattccctgctaaagacgttttcattagtcttagagggtatatgctttctagaacttgtttttgttaacatgtgctttgatgtaaagaacatattttgtatgcaaaacataacttgcattatggttgtacaatacactatattgtttagggattccggaaagcagtttaatgcagaaataactatatctagtatgcagttcatattgtgaatgaagctttgcttttgtaataaataaataagactttctaatg

SEQ ID NO: 141975 - DNA, 3189 bp, Homo sapiens
  Payload ID: 7914
  Gene Symbol: IKBIP
  Gene Name: IKBKB interacting protein
  Uniprot ID: Q70UQ0
  ENST ID: ENST00000299157
  CDS Start-End: 375-1508
ggactcgggcagcggcggcgcgcccgacgtggcgcgcgcgaccccttcgtcctgcccctcctcctcgggtcccgtcggcctgcgcgcgcccgggagtttgaatttcctcggatttggagcaatatcgcagtggaaggcgctgtgggttgaggtcgccgcccacctctcctaggggaactatggagctggcagctgaaagactcagtgaagcaacgaggatgccggggagagggaaggggctgggctctgggcggtgccaagtctgtgagggggcgcggtcaccgcccagggttcccacgaacgccaaggcggccacgtcctgctccccctggtgaagaagctgccctgggcttgtcgtcctagggtctccagacatgtctgaggtgaagagccggaagaagtcggggcccaagggagcccctgctgcggagcccgggaagcggagcgagggcgggaagacccccgtggcccggagcagcggaggcgggggctgggcagacccccgaacgtgcctgagcctgctgtcgctggggacgtgcctgggcctggcctggtttgtatttcagcagtcagaaaaatttgcaaaggtggaaaaccaataccagttactgaaactagaaaccaatgaattccaacaacttcaaagtaaaatcagtttaatttcagaaaagcttgagtctactgaaagcatcctgcaggaagctacatcatccatgtctttgatgacccagtttgagcaggaagtatccaacctccaagatatcatgcatgacattcaaaataatgaagaggtgctcactcaaaggatgcaaagccttaatgagaaatttcagaatattacggatttctggaagagaagcctagaagaaatgaacattaatacagacattttcaaatcagaagcaaaacatatacattctcaagtaactgtccaaattaactcagctgagcaggaaataaaattgctcactgaacggctaaaagatttggaagatagcacactaagaaatattagaacagtaaaaagacaagaagaagaagatctcctgcgagtagaggagcagctaggctctgatacaaaggcaattgaaaagttagaagaggaacagcatgccctctttgccagagatgaagatctgactaataaactttccgactacgaacccaaagttgaagaatgcaagacacatttgccaacaattgaaagtgctattcactctgttctcagagtctctcaggatctgatagaaacagaaaagaaaatggaagacttgactatgcagatgtttaatatggaagatgatatgctgaaagcagtgtctgaaataatggagatgcagaaaacccttgaaggaattcagtatgataatagcatattaaagatgcaaaatgaactggatattctaaaagaaaaagttcatgattttatagcatactcaagtacaggagaaaagggaactttaaaagaatataatatagaaaataaaggaattggtggtgatttttaaattcatgacatttattctgatgaaccatatcattatacataaattgattagtccattgattttgagttactttgatacgcctcatcttatcctacattattggaaaataaatgagatgtccacacaaatggattatccacataatcaaagcttatctttttaagcactaaaacttacttcattgtaactatttgaaatagaaatagttctttaaaaatatttctctacttttaaaacaagatacttaatatttttaatgttttttaaagcattaatgaacatcatcattaatttcacctattatattgtacccacatatattgatgtctccaggggctaataaagagtatttaccacttcactaaatgaccccaatttgccattttcaaacctatgtctcataccttttctgtcacctgaacttactgtcaggttggttggtaatgtgcctgcctcagccagttcactttcttaggtaattcactgcaggttaagaatccacacaaccaagttcatgggaattttgtgtaaaataaaagataacatgcctgagggagagcctggtgcctttgctatgaattaatatgcactttctgaaaactctaaagcctgggaaacattttagtttttgttaaggttctaaactgtgttacagatacttgtaagacttttaaaatcagagtaagtatgttcttacataaggcctttcttaggaattatgtgtatataaatctttgaaatatctttatatacctgagttttaggttccaactgtgttagacatgagtttgctagatccatggtctctagatggtttacttaaataggccaggcgcagtggctcacacctgtaatcctagcactttgggaggccgaggtgggcagatcacgaagtcaggagatcaagaccatctggctaacagggtgaaaccctgtctctactaaaaaatacaaaaaattagccaggcgtggtggtgggtgcctgtagtcccagctactcaggaggctgaggcaggagaatggtgtgaacccgggaggcagagcttgcagtgagccgagatcgcgccactgcactccagcctgagtggcaaagtgagactctgtctcaataaataaataaataaataaaaataagcctgtggcctgttttgagggaaaagtaacataactctgataattaattatgataataactatgatagttaaaaatacgtcattttaaagatttcccaaaccacaccactaaatttgttttatgaattgattttattttatttgaaattatataatgtagtcaactgcaatatggaagtttgttcttgtttctttgtcaataaccttaccagttttataatgcagtttttgatggaattaaacacaaagaacttgaaagcagtcagttacaaaaaggtagttgtggtcaagtagttttaatatgtaaatttgcaagtttttggagaacccccaaactccttctccactggagttaggagggcctgtggtagacagcgtgaatcatgaaaataagcctggagagttctgttattaaggggcatagcattaatttttgcagtcttaaaattacacttcttgacttctgaatgtctcttatttgcgtgcactgacaaaattctatttgtttacttttatattaatggtaataaaatagattataaagtaa

SEQ ID NO: 141976 - DNA, 1645 bp, Homo sapiens
  Payload ID: 7914
  Gene Symbol: IKBIP
  Gene Name: IKBKB interacting protein
  Uniprot ID: Q70UQ0
  ENST ID: ENST00000342502
  CDS Start-End: 413-1465
gctaagcctcagggacgcgccgcgttcccaccaatgccggactcgggcagcggcggcgcgcccgacgtggcgcgcgcgaccccttcgtcctgcccctcctcctcgggtcccgtcggcctgcgcgcgcccgggagtttgaatttcctcggatttggagcaatatcgcagtggaaggcgctgtgggttgaggtcgccgcccacctctcctaggggaactatggagctggcagctgaaagactcagtgaagcaacgaggatgccggggagagggaaggggctgggctctgggcggtgccaagtctgtgagggggcgcggtcaccgcccagggttcccacgaacgccaaggcggccacgtcctgctccccctggtgaagaagctgccctgggcttgtcgtcctagggtctccagacatgtctgaggtgaagagccggaagaagtcggggcccaagggagcccctgctgcggagcccgggaagcggagcgagggcgggaagacccccgtggcccggagcagcggaggcgggggctgggcagacccccgaacgtgcctgagcctgctgtcgctggggacgtgcctgggcctggcctggtttgtatttcagcagtcagaaaaatttgcaaaggtggaaaaccaataccagttactgaaactagaaaccaatgaattccaacaacttcaaagtaaaatcagtttaatttcagaaaagtggcagaaatctgaagctatcatggaacaattgaagtcttttcaaataattgctcatctaaagcgtctacaggaagaaattaatgaggtaaaaacttggtccaataggataactgaaaaacaggatatactgaacaacagtctgacgacgctttctcaagacattacaaaagtagaccaaagtacaacttccatggcaaaagatgttggtctcaagattacaagtgtaaaaacagatatacgacggatttcaggtttagtaactgatgtaatatcattgacagattctgtgcaagaactagaaaataaaatagagaaagtagaaaaaaatacagtaaaaaatataggtgatcttctttcaagcagtattgatcgaacagcaacgctccgaaagacagcatctgaaaattcacaaagaattaactctgttaagaagacgctaaccgaactaaagagtgacttcgacaaacatacagatagatttctaagcttagaaggtgacagagccaaagttctgaagacagtgacttttgcaaatgatctaaaaccaaaggtgtataatctaaagaaggacttttcccgtttagaaccattagtaaatgatttaacactacgcattgggagattggttaccgacttactacaaagagagaaagaaattgctttcttaagtgaaaaaatatctaatttaacaatagtccaagctgagattaaggatattaaagatgaaatagcacacatttcagatatgaattagtttgacattattgagattagactaaggtaatttttttaatgggacctctcatgagaagactggtaaatcaaaaataatgatattttggagcaaaagtcattttatatttaatcctattttgtacagtaaaaataaaactttaaaacaggttgattttccaaaataaatatgctaaaacct

SEQ ID NO: 141977 - DNA, 1368 bp, Homo sapiens
  Payload ID: 7914
  Gene Symbol: IKBIP
  Gene Name: IKBKB interacting protein
  Uniprot ID: Q70UQ0
  ENST ID: ENST00000393042
  CDS Start-End: 254-466
atatcgcagtggaaggcgctgtgggttgaggtcgccgcccacctctcctaggggaactatggagctggcagctgaaagactcagtgaagcaacgaggatgccggggagagggaaggggctgggctctgggcggtgccaagtctgtgagggggcgcggtcaccgcccagggttcccacgaacgccaaggcggccacgtcctgctccccctggtgaagaagctgccctgggcttgtcgtcctagggtctccagacatgtctgaggtgaagagccggaagaagtcggggcccaagggagcccctgctgcggagcccgggaagcggagcgagggcgggaagacccccgtggcccggagcagcggaggcgggggctgggcagacccccgaacgtgcctgagcctgctgtcgctggggacgtgcctgggcctggcctgtggcagaaatctgaagctatcatggaacaattgaagtcttttcaaataattgctcatctaaagcgtctacaggaagaaattaatgaggtaaaaacttggtccaataggataactgaaaaacaggatatactgaacaacagtctgacgacgctttctcaagacattacaaaagtagaccaaagtacaacttccatggcaaaagatgttggtctcaagattacaagtgtaaaaacagatatacgacggatttcaggtttagtaactgatgtaatatcattgacagattctgtgcaagaactagaaaataaaatagagaaagtagaaaaaaatacagtaaaaaatataggtgatcttctttcaagcagtattgatcgaacagcaacgctccgaaagacagcatctgaaaattcacaaagaattaactctgttaagaagacgctaaccgaactaaagagtgacttcgacaaacatacagatagatttctaagcttagaaggtgacagagccaaagttctgaagacagtgacttttgcaaatgatctaaaaccaaaggtgtataatctaaagaaggacttttcccgtttagaaccattagtaaatgatttaacactacgcattgggagattggttaccgacttactacaaagagagaaagaaattgctttcttaagtgaaaaaatatctaatttaacaatagtccaagctgagattaaggatattaaagatgaaatagcacacatttcagatatgaattagtttgacattattgagattagactaaggtaatttttttaatgggacctctcatgagaagactggtaaatcaaaaataatgatattttggagcaaaagtcattttatatttaatcctattttgtacagtaaaaataaaactttaaaacaggttgattttccaaaataaatatgctaaaacct

SEQ ID NO: 141978 - DNA, 4528 bp, Homo sapiens
  Payload ID: 7915
  Gene Symbol: ITK
  Gene Name: IL2-inducible T-cell kinase
  Uniprot ID: Q08881
  ENST ID: ENST00000422843
  CDS Start-End: 153-2015
gttgatagaaagataacgttgaaggcaagttgcccttgagcagctctctgaagatcaactgcctccacattgcattctttgccccaaaactctttcctttggttgtgctaagaggtgatgcccaaggtgcaccacctttcaagaactggatcatgaacaactttatcctcctggaagaacagctcatcaagaaatcccaacaaaagagaagaacttctccctcgaactttaaagtccgcttctttgtgttaaccaaagccagcctggcatactttgaagatcgtcatgggaagaagcgcacgctgaaggggtccattgagctctcccgaatcaaatgtgttgagattgtgaaaagtgacatcagcatcccatgccactataaatacccgtttcaggtggtgcatgacaactacctcctatatgtgtttgctccagatcgtgagagccggcagcgctgggtgctggcccttaaagaagaaacgaggaataataacagtttggtgcctaaatatcatcctaatttctggatggatgggaagtggaggtgctgttctcagctggagaagcttgcaacaggctgtgcccaatatgatccaaccaagaatgcttcaaagaagcctcttcctcctactcctgaagacaacaggcgaccactttgggaacctgaagaaactgtggtcattgccttatatgactaccaaaccaatgatcctcaggaactcgcactgcggcgcaacgaagagtactgcctgctggacagttctgagattcactggtggagagtccaggacaggaatgggcatgaaggatatgtaccaagcagttatctggtggaaaaatctccaaataatctggaaacctatgagtggtacaataagagtatcagccgagacaaagctgaaaaacttcttttggacacaggcaaagaaggagccttcatggtaagggattccaggactgcaggaacatacaccgtgtctgttttcaccaaggctgttgtaagtgagaacaatccctgtataaagcattatcacatcaaggaaacaaatgacaatcctaagcgatactatgtggctgaaaagtatgtgttcgattccatccctcttctcatcaactatcaccaacataatggaggaggcctggtgactcgactccggtatccagtttgttttgggaggcagaaagccccagttacagcagggctgagatacgggaaatgggtgatcgacccctcagagctcacttttgtgcaagagattggcagtgggcaatttgggttggtgcatctgggctactggctcaacaaggacaaggtggctatcaaaaccattcgggaaggggctatgtcagaagaggacttcatagaggaggctgaagtaatgatgaaactctctcatcccaaactggtgcagctgtatggggtgtgcctggagcaggcccccatctgcctggtgtttgagttcatggagcacggctgcctgtcagattatctacgcacccagcggggactttttgctgcagagaccctgctgggcatgtgtctggatgtgtgtgagggcatggcctacctggaagaggcatgtgtcatccacagagacttggctgccagaaattgtttggtgggagaaaaccaagtcatcaaggtgtctgactttgggatgacaaggttcgttctggatgatcagtacaccagttccacaggcaccaaattcccggtgaagtgggcatccccagaggttttctctttcagtcgctatagcagcaagtccgatgtgtggtcatttggtgtgctgatgtgggaagttttcagtgaaggcaaaatcccgtatgaaaaccgaagcaactcagaggtggtggaagacatcagtaccggatttcggttgtacaagccccggctggcctccacacacgtctaccagattatgaatcactgctggaaagagagaccagaagatcggccagccttctccagactgctgcgtcaactggctgaaattgcagaatcaggactttagtagagactgagtaccaggccacgggctgcagatcctgaatggaggaaggatatgtcctcattccatagagcattagaagctgccaccagcccaggaccctccagaggcagcctggcctgtggcatcagtccctgagtcaccatggaagcagcatcctgaccacagctggcagtcaagccacagctggagggtcagccaccaagctgggagctgagccagaacaggagtgatgtctctgcccttcctctagcctcttgtcacatgtggtgcacaaacctcaacctgacagctttcagacagcattcttgcacttcttagcaacagagagagacatgagtaagacccagattgctatttttattgttatttttaacatgaatctaaagtttatggttccagggactttttatttgacccaacaacacagtatcccaggatatggaggcaaggggaacaaagagcatgagtctttttccaagaaaactggtgagttaagtaagattagagtgagtgtgctctgttgctgtgatgctgtcagccacagcttcctgccgtagagaatgatagagcagctgctcacacaggaggccggatattctgagaagcagctttatgaggttttacagagtatgctgctacctctctccttgaagggagcatggcgagacccattggatggattggggtgaacagttcaggtcccatgcttggagcattgggtatctgatgtctgcaccagaacaagagaacctctgacggtggagaaccatgtggtgcaagaagagatcttaggtctcttcttttataccaagctcatcttttataccaagctgtgcaggtgactatgcctcctcttctgcacagaatgcttccaccagcatcctgagaagaaatgattacttctgaaaaacatccttttttccagcctctgggaatcagccccccctctctgcactatccgatcctcatcaacagagggcagcattgtgttggtcaatgttcccttggcgagcaattgaaacttgtttaggccctagggttgagcaattttaaggttgagactccaagtctcctaaaattctaggagagaaataaagagtctgtttttgctcaaaccatcaggatggaaacagtcaggcactgactggggtgcttccaagaggcatgagagtgcctactctggcttgagcacttctatatgcaaggtgaatatgtactgagctaggagacttccctgcaaaatctctgttcaccctgggttcacatccccatgaggtaatattattattcccattttacaaataatgtaactgaggctttaaaaagccaagacatctgcccaaagtgatggaactagaaagtctagagctggtattctagcccaaatctgtctgaccgcaatacacagattctttattcctattcgacactggcttctactgaaaatgaaacggattgcagagggaataaatacaaagatggaaagccagtaaagaagtcagtatagaaccactagcgaatagtgttgctctggcacagaccactgtggttgatggcatggccctccaacttggaataggattttccttttcctattctgtatccttaccttggtcatgttaatgactttggagttattcagttaatgaccctttaattctcacaaccaaccagtcatgttgcttgaagccatttatagacgagcttcaaagcaactttaaaagattcttctgtagaagtatgagttcttcctttaattatcattccaactttcagctgtagtcttcttgaacacttcatgaggagggacattccctgatataagagaggatggtgttgcaattggctctttctaaatcatgtgacgttttgactggcttgagattcagatgcataatttttaattataattattgtgaagtggagagcctcaagataaaactctgtcattcagaagatgattttactcagcttatccaaaattatctctgtttactttttagaattttgtacattatcttttgggatccttaattagagatgatttctggaacattcagtctagaaagaaaacattggaattgactgatctctgtggtttggtttagaaaattcccctgtgcatggtattacctttttcaagctcagattcatctaatcctcaactgtacatgtgtacattcttcacctcctggtgccctatcccgcaaaatgggcttcctgcctggtttttctcttctcacattttttaaatggtcccctgtgtttgtagagaactcccttatacagagttttggttctagttttatttcgtagattttgcattttgtaccttttgagactatgtatttatatttggatcagatgcatatttattaatgtacagtcactgctagtgttcaaaataaaaatgttacaaatacctgttatcctttgtagagcacacagagttaaaagttgaatatagcaatattaaagctgcattttaataaatatggtgcatagggcctcgg

SEQ ID NO: 141979 - DNA, 571 bp, Homo sapiens
  Payload ID: 7915
  Gene Symbol: ITK
  Gene Name: IL2-inducible T-cell kinase
  ENST ID: ENST00000521769
  CDS Start-End: 351-571
cctttaacgaaattctagctccgcctcagaccgatccctcgctgttgcgcctacgtcccccatggaggttttgaacgcactcattgaagagtagctgtgggctgtgtaataagaagaagcgcacgctgaaggggtccattgagctctcccgaatcaaatgtgttgagattgtgaaaagtgacatcagcatcccatgccactataaatacccgtttcaggtggtgcatgacaactacctcctatatgtgtttgctccagatcgtgagagccggcagcgctgggtgctggcccttaaagaagaaacgaggaataataacagtttggtgcctaaatatcatcctaatttctggatggatgggaagtggaggtgctgttctcagctggagaagcttgcaacaggctgtgcccaatatgatccaaccaagaatgcttcaaagaagcctcttcctcctactcctgaagacaacaggcgaccactttgggaacctgaagaaactgtggtcattgccttatatgactaccaaaccaatgatcctcaggaactcgcactgcggcgcaacgaagagtactg

SEQ ID NO: 141980 - DNA, 587 bp, Homo sapiens
  Payload ID: 7915
  Gene Symbol: ITK
  Gene Name: IL2-inducible T-cell kinase
  ENST ID: ENST00000517779
  CDS Start-End: 112-462
agctctctgaagatcaactgcctccacattgcattctttgccccaaaactctttcctttggttgtgctaagaggtgatgcccaaggtgcaccacctttcaagaactggatcatgaacaactttatcctcctggaagaacagctcatcaagaaatcccaacaaaagagaagaacttctccctcgaactttaaagtccgcttctttgtgttaaccaaagccagcctggcatactttgaagatcgtcatgggaagaagcgcacgctgaaggggtccattgagctctcccgaatcaaatgtgttgagattgtgaaaagtgacatcagcatcccatgccactataaatacccgtttcaggtggtgcatgacaactacctcctatatgtgtttgctccagatcgtgagagccggcagcgctgggtgctggcccttaaagaagaaaaggggtctcgctatgttgcctaggctaatctagaactcctggactcaagtgatcctcttgcctcggcctacgaaagtactgggattacaagcatgagccactacacccaactctgttctgtgccttataaacgaggaataataacagt

SEQ ID NO: 141981 - DNA, 2304 bp, Homo sapiens
  Payload ID: 7916
  Gene Symbol: ILVBL
  Gene Name: ilvB (bacterial acetolactate synthase)-like
  Uniprot ID: A1L0T0
  ENST ID: ENST00000263383
  CDS Start-End: 141-2039
tgcgcatcgggccggactacggggcgccgctgagccaagtgggccacccgggcacggccacgctcccgggtcacgtgacacggagggggccgaattctgctggaggcagcgccatatcctggaggtgaaggtaccacctcatggagacccccgcggccgccgcccccgctgggagcttattcccctccttcctgctcctggcctgcgggacgctggtggccgccttgctgggcgccgctcaccgcctggggctcttctatcagctgctgcacaaggtggacaaggcaagcgtccggcatggcggagagaacgtggccgctgtgctgagggcccatggtgtgcggttcatcttcacgctggtcggtgggcacatttccccgctgctggtggcctgtgagaaactgggcatccgtgtggtggacacacgccatgaggtcacggccgtctttgctgctgatgctatggcccgcctgtccgggacggtgggcgtggcggcagtgacagcaggccctggcctcaccaacacggtgactgcggtgaagaatgctcagatggctcagtccccaatcctgcttctgggtggggctgccagcactctgctgcagaaccggggtgcgctccaggctgttgatcagctgtcccttttccggccactctgtaagttttgtgtgtctgtgcggagggtgcgggacattgtgcccaccctgagggccgcgatggctgccgcccagtcgggcaccccaggtccggtgtttgtggagctgcccgttgacgtgctgtacccctacttcatggtccagaaggagatggtgccagccaagccacccaagggcctcgtgggccgagtggtctcctggtatttagagaattacctggccaacctctttgcaggagcctgggagcctcagcccgagggaccgctgcccctggacatcccccaggcttccccgcagcaggttcagcgctgtgtggagatcctgagccgggccaagaggcctctgatggtgctggggagtcaggccctgctcaccccaacgtctgccgacaagcttcgggctgccgtggagaccttgggtgttccctgcttccttggagggatggcacgggggctgttaggccgcaaccaccccctccacatccgggagaaccgcagtgcggccctgaagaaggcggatgtcattgtcctagcaggaactgtgtgtgacttccgcctatcctatggccgtgtcctcagccacagcagcaagatcatcatcgtcaatcgtaatcgggaagagatgttgctcaactcagacatcttctggaagccccaggaggctgtgcagggagatgtgggttccttcgtgctgaagttagtggagggccttcagggccagacctgggccccagactgggtggaggagctgcgggaagccgaccggcagaaggagcagacctttcgggagaaggcagcgatgcctgtggcccagcacctgaacccagtgcaggtgctgcagctggtggaggaaacgctacctgacaactcaattctggtggtggatggcggggacttcgtgggcactgctgcccatctggtacagccccgcggccccctgcgctggctcgatcctggggcctttgggactctgggagttggtgcaggatttgcacttggggccaagctgtgccggccagatgctgaggtctggtgcctgtttggggacggagcttttggctacagcctcatcgaatttgatacattcgtcagacacaagatcccagtgatggccttggtagggaatgatgctggctggacacagatttctcgggagcaggtgccctctctgggcagcaacgtggcctgtggcctggcctacactgattatcacaaggcagccatgggtctgggggcccggggcttgctgctctcacgggagaacgaggatcaggtggtcaaggtgctgcacgatgcccagcagcagtgccgagacggccacccggttgtggtcaacatcctcattgggaggacggacttccgcgatggctccattgctgtatagggccttgtgggtcaggacgcttggctgccttcctgcccctggactgtgtccagctggtttggagtctcatcattgcttgccctgggcctatcccatgaggcccagtgactccacaacctccctgaggaggggatggaggggtcaaatctcagagaggctctcttgtgagctcttggaccctcctcttcacggacccaactgtgccgtttgtcccctctcttatggagactgaataaaccacctctggcccatgtaggcccaagta

SEQ ID NO: 141982 - DNA, 788 bp, Homo sapiens
  Payload ID: 7916
  Gene Symbol: ILVBL
  Gene Name: ilvB (bacterial acetolactate synthase)-like
  ENST ID: ENST00000533747
  CDS Start-End: 291-788
gaaggtgaatagcgtcgggggtcgagctggtgtgggagaaccacatcctgatgcgatgtgacctcgacccagcctggcccggggtcggggatcaggctcgggcccgtgcgctctttaagggagaggcgtgggttgcgtggagggtcgcgcccgctaacccgggggcgtgacctcgtgcctcttggtgacgtaacatggggcgggctcactactggggctgagatttggggtccggttgtggaaagagaggcggggcttccgcctgtccattgacaagtaggtaccacctcatggagacccccgcggccgccgcccccgctgggagcttattcccctccttcctgctcctggcctgcgggacgctggtggccgccttgctgggcgccgctcaccgcctggggctcttctatcagctgctgcacaaggtggacaaggcaagcgtccggcatggcggagagaacgtggccgctgtgctgagggcccatggtgtgcggttcatcttcacgctggtcggtgggcacatttccccgctgctggtggcctgtgagaaactgggcatccgtgtggtggacacacgccatgaggtcacggccgtctttgctgctgatgctatggcccgcctgtccgggacggtgggcgtggcggcagtgacagcaggccctggcctcaccaacacggtgactgcggtgaagaatgctcagatggctcagtccccaatcctgcttctgggtggggctgccagcactctgctgcagaaccggggtgcgctccaggctgttgatcagctg

SEQ ID NO: 141983 - DNA, 1309 bp, Homo sapiens
  Payload ID: 7916
  Gene Symbol: ILVBL
  Gene Name: ilvB (bacterial acetolactate synthase)-like
  ENST ID: ENST00000533148
  CDS Start-End: 265-423
ctggtgtgggagaaccacatcctgatgcgatgtgacctcgacccagcctggcccggggtcggggatcaggctcgggcccgtgcgctctttaagggagaggcgtgggttgcgtggagggtcgcgcccgctaacccgggggcgtgacctcgtgcctcttggtgacgtaacatggggcgggctcactactggggctgagatttggggtccggttgtggaaagagaggcggggcttccgcctgtccattgacaagtaggtaccacctcatggagacccccgcggccgccgcccccgctgggagcttattcccctccttcctgctcctggcctgcgggacgctggtggccgccttgctgggcgccgctcaccgcctggggctcttctatcagctgctgcacaagggacggtgggcgtggcggcagtgacagcaggccctggcctcaccaacacggtgactgcggtgaagaatgctcagatggctcagtccccaatcctgcttctgggtggggctgccagcactctgctgcagaaccggggtgcgctccaggctgttgatcagctgtcccttttccggccactctgtaagttttgtgtgtctgtgcggagggtgcgggacattgtgcccaccctgagggccgcgatggctgccgcccagtcgggcaccccaggtccggtgtttgtggagctgcccgttgacgtgctgtacccctacttcatggtccagaaggagatggtgccagccaagccacccaagggcctcgtgggccgagtggtctcctggtatttagagaattacctggccaacctctttgcaggagcctgggagcctcagcccgagggaccgctgcccctggacatcccccaggcttccccgcagcaggttcagcgctgtgtggagatcctgagccgggccaagaggcctctgatggtgctggggagtcaggccctgctcaccccaacgtctgccgacaagcttcgggctgccgtggagaccttgggtgttccctgcttccttggagggatggcacgggggctgttaggccgcaaccaccccctccacatccgggagaaccgcagtgcggccctgaagaaggcggatgtcattgtcctagcaggaactgtgtgtgacttccgcctatcctatggccgtgtcctcagccacagcagcaagatcatcatcgtcaatcgtaatcgggaagagatgttgctcaactcagacatcttctggaagccccaggaggctgtgcagggagatgtgggttccttcgtgctgaagttagtggagggccttcagggccagacctgggcccc

SEQ ID NO: 141984 - DNA, 1090 bp, Homo sapiens
  Payload ID: 7916
  Gene Symbol: ILVBL
  Gene Name: ilvB (bacterial acetolactate synthase)-like
  ENST ID: ENST00000527093
  CDS Start-End: 304-1090
gtgtggtgctgtcgtcgccaccttgacttgtggtggctagtttgggtgggagtggtggtgatgtaaaggactggggctagccccgcgaggggcgtgaccttgtcacggagaggcatggcttcaccccgagcctaggcgcacaaagggcgtggtctggcagggttgggggcgtggccgcacagaaactggcggcaagggtcgtggccctggatcctgctgcgagaaggggcgcgatttcttccggagaggttccctgtcgcgcccaagtctgggaagtgccctttctctcttaggtaccacctcatggagacccccgcggccgccgcccccgctgggagcttattcccctccttcctgctcctggcctgcgggacgctggtggccgccttgctgggcgccgctcaccgcctggggctcttctatcagctgctgcacaaggtggacaaggcaagcgtccggcatggcggagagaacgtggccgctgtgctgagggcccatggtgtgcggttcatcttcacgctggtcggtgggcacatttccccgctgctggtggcctgtgagaaactgggcatccgtgtggtggacacacgccatgaggtcacggccgtctttgctgctgatgctatggcccgcctgtccgggacggtgggcgtggcggcagtgacagcaggccctggcctcaccaacacggtgactgcggtgaagaatgctcagatggctcagtccccaatcctgcttctgggtggggctgccagcactctgctgcagaaccggggtgcgctccaggctgttgatcagctgtcccttttccggccactctgtaagttttgtgtgtctgtgcggagggtgcgggacattgtgcccaccctgagggccgcgatggctgccgcccagtcgggcaccccaggtccggtgtttgtggagctgcccgttgacgtgctgtacccctacttcatggtccagaaggagatggtgccagccaagccacccaagggcctcgtgggccgagtggtctcctggtatttagagaattacctggccaacctctttgcaggagcctgggagcctcagcccgagggaccgctgcccc

SEQ ID NO: 141985 - DNA, 747 bp, Homo sapiens
  Payload ID: 7916
  Gene Symbol: ILVBL
  Gene Name: ilvB (bacterial acetolactate synthase)-like
  ENST ID: ENST00000598709
  CDS Start-End: 59-747
tggaggtgaaggtccggtgtttgtggagctgcccgttgacgtgctgtacccctacttcatggtccagaaggagatggtgccagccaagccacccaagggcctcgtgggccgagtggtctcctggtatttagagaattacctggccaacctctttgcaggagcctgggagcctcagcccgagggaccgctgcccctggacatcccccaggcttccccgcagcaggttcagcgctgtgtggagatcctgagccgggccaagaggcctctgatggtgctggggagtcaggccctgctcaccccaacgtctgccgacaagcttcgggctgccgtggagaccttgggtgttccctgcttccttggagggatggcacgggggctgttaggccgcaaccaccccctccacatccgggagaaccgcagtgcggccctgaagaaggcggatgtcattgtcctagcaggaactgtgtgtgacttccgcctatcctatggccgtgtcctcagccacagcagcaagatcatcatcgtcaatcgtaatcgggaagagatgttgctcaactcagacatcttctggaagccccaggaggctgtgcagggagatgtgggttccttcgtgctgaagttagtggagggccttcagggccagacctgggccccagactgggtggaggagctgcgggaagccgaccggcagaaggagcagacctttcgggagaaggcagcgatgcctgtggcccagcacctgaaccc

SEQ ID NO: 141986 - DNA, 2067 bp, Homo sapiens
  Payload ID: 7916
  Gene Symbol: ILVBL
  Gene Name: ilvB (bacterial acetolactate synthase)-like
  ENST ID: ENST00000534378
  CDS Start-End: 254-1831
tcccgggtcacgtgacacggagggggccgaattctgctggaggcagcgccatatcctggaggtgaaggtggacaaggcaagcgtccggcatggcggagagaacgtggccgctgtgctgagggcccatggtgtgcggttcatcttcacgctggtcggtgggcacatttccccgctgctggtggcctgtgagaaactgggcatccgtgtggtggacacacgccatgaggtcacggccgtctttgctgctgatgctatggcccgcctgtccgggacggtgggcgtggcggcagtgacagcaggccctggcctcaccaacacggtgactgcggtgaagaatgctcagatggctcagtccccaatcctgcttctgggtggggctgccagcactctgctgcagaaccggggtgcgctccaggctgttgatcagctgtcccttttccggccactctgtaagttttgtgtgtctgtgcggagggtgcgggacattgtgcccaccctgagggccgcgatggctgccgcccagtcgggcaccccaggtccggtgtttgtggagctgcccgttgacgtgctgtacccctacttcatggtccagaaggagatggtgccagccaagccacccaagggcctcgtgggccgagtggtctcctggtatttagagaattacctggccaacctctttgcaggagcctgggagcctcagcccgagggaccgctgcccctggacatcccccaggcttccccgcagcaggttcagcgctgtgtggagatcctgagccgggccaagaggcctctgatggtgctggggagtcaggccctgctcaccccaacgtctgccgacaagcttcgggctgccgtggagaccttgggtgttccctgcttccttggagggatggcacgggggctgttaggccgcaaccaccccctccacatccgggagaaccgcagtgcggccctgaagaaggcggatgtcattgtcctagcaggaactgtgtgtgacttccgcctatcctatggccgtgtcctcagccacagcagcaagatcatcatcgtcaatcgtaatcgggaagagatgttgctcaactcagacatcttctggaagccccaggaggctgtgcagggagatgtgggttccttcgtgctgaagttagtggagggccttcagggccagacctgggccccagactgggtggaggagctgcgggaagccgaccggcagaaggagcagacctttcgggagaaggcagcgatgcctgtggcccagcacctgaacccagtgcaggtgctgcagctggtggaggaaacgctacctgacaactcaattctggtggtggatggcggggacttcgtgggcactgctgcccatctggtacagccccgcggccccctgcgctggctcgatcctggggcctttgggactctgggagttggtgcaggatttgcacttggggccaagctgtgccggccagatgctgaggtctggtgcctgtttggggacggagcttttggctacagcctcatcgaatttgatacattcgtcagacacaagatcccagtgatggccttggtagggaatgatgctggctggacacagatttctcgggagcaggtgccctctctgggcagcaacgtggcctgtggcctggcctacactgattatcacaaggcagccatgggtctgggggcccggggcttgctgctctcacgggagaacgaggatcaggtggtcaaggtgctgcacgatgcccagcagcagtgccgagacggccacccggttgtggtcaacatcctcattgggaggacggacttccgcgatggctccattgctgtatagggccttgtgggtcaggacgcttggctgccttcctgcccctggactgtgtccagctggtttggagtctcatcattgcttgccctgggcctatcccatgaggcccagtgactccacaacctccctgaggaggggatggaggggtcaaatctcagagaggctctcttgtgagctcttggaccctcctcttcacggacccaactgtgccgtttgtcccctctcttatggagactgaataa

SEQ ID NO: 141987 - DNA, 709 bp, Homo sapiens
  Payload ID: 7916
  Gene Symbol: ILVBL
  Gene Name: ilvB (bacterial acetolactate synthase)-like
  ENST ID: ENST00000600984
  CDS Start-End: 213-709
tctgggaagtgccctttctctcttaggtggacaaggcaagcgtccggcatggcggagagaacgtggccgctgtgctgagggcccatggtgtgcggttcatcttcacgctggtcggtgggcacatttccccgctgctggtggcctgtgagaaactgggcatccgtgtggtggacacacgccatgaggtcacggccgtctttgctgctgatgctatggcccgcctgtccgggacggtgggcgtggcggcagtgacagcaggccctggcctcaccaacacggtgactgcggtgaagaatgctcagatggctcagtccccaatcctgcttctgggtggggctgccagcactctgctgcagaaccggggtgcgctccaggctgttgatcagctgtcccttttccggccactctgtaagttttgtgtgtctgtgcggagggtgcgggacattgtgcccaccctgagggccgcgatggctgccgcccagtcgggcaccccaggtccggtgtttgtggagctgcccgttgacgtgctgtacccctacttcatggtccagaaggagatggtgccagccaagccacccaagggcctcgtgggccgagtggtctcctggtatttagagaattacctggccaacctctttgcaggagcctgggagcctcagcccgagggaccgctgcccctggacatcccccaggcttccccgcagcaggt

SEQ ID NO: 141988 - DNA, 890 bp, Homo sapiens
  Payload ID: 7917
  Gene Symbol: ICT1
  Gene Name: immature colon carcinoma transcript 1
  Uniprot ID: Q14197
  ENST ID: ENST00000301585
  CDS Start-End: 14-634
gcaagacctgagcatggcggccaccaggtgcctgcgctggggcctgagccgagccggagtctggctgctcccaccgcccgcacggtgcccacgccgggcgctgcacaagcagaaagacggcactgagttcaagagcatctacagcctggacaagctctaccccgaatctcagggctcggacaccgcctggagggtcccgaatggtgcaaagcaagccgacagtgacatccctctagatcgcttgacaatatcttattgtcggagtagtggtcctggggggcagaatgtgaacaaagtgaattccaaggcagaagtcaggttccatttggcaactgccgagtggatcgcggagcccgtgcggcagaagatagccatcacgcataaaaacaagatcaacaggttaggagagttgatcctcacctctgagagcagccgctatcagttccggaatctggcagattgcctgcagaaaattcgagacatgatcactgaggccagccagacaccgaaggagccaacaaaagaagatgttaaacttcatagaatcaggatagaaaacatgaatcgggaaaggctgagacaaaagagaattcattctgctgtaaagacaagcaggagggtcgacatggactgaaatcaccctctgcagctgggagggctcttctgggcgtccgggcagctgcagctgagaggactttcacaccataaggagatttctgtttttctttttggctgttaatgcttgtctataacattggagccatcacaagaatgttcatttggaatgaaggctgcaggcactggttgcagacgtctttataggcagtcaccatgttgtcaaaccttaataatgcacctcatgtattagtcacaataaaaatcagaactca

SEQ ID NO: 141989 - DNA, 593 bp, Homo sapiens
  Payload ID: 7917
  Gene Symbol: ICT1
  Gene Name: immature colon carcinoma transcript 1
  ENST ID: ENST00000584208
  CDS Start-End: 18-593
agtcgcaagacctgagcatggcggccaccaggtgcctgcgctggggcctgagccgagccggagtctggctgctcccaccgcccgcacggtgcccacgccgggcgctgcacaagcagaaagacggcactgagttcaagagcatctacagcctggacaagctctaccccgaatctcagggctcggacaccgcctggagggtcccgaatggtgcaaagcaagccgacagtgacatccctctagatcgcttgacaatatcttattgtcggagtagtggtcctggggggcagaatgtgaacaaagtgaattccaaggcagaagtcaggttccatttggcaactgccgagtggatcgcggagcccgtgcggcagaagatagccatcacgtttttcatttgttctctgcagcataaaaacaagatcaacaggttaggagagttgatcctcacctctgagagcagccgctatcagttccggaatctggcagattgcctgcagaaaattcgagacatgatcactgaggccagccagacaccgaaggagccaacaaaagaagatgttaaacttcatagaatcaggatagaaaacatgaatcgg

SEQ ID NO: 141990 - DNA, 513 bp, Homo sapiens
  Payload ID: 7917
  Gene Symbol: ICT1
  Gene Name: immature colon carcinoma transcript 1
  ENST ID: ENST00000580800
  CDS Start-End: 1-214
gctgctcccaccgcccgcacggtgcccacgccgggcgctgcacaagcagaaagacggcactgagttcaagagcatctacagcctggacaagctctaccccgaatctcagggctcggacaccgcctggagggtcccgaatggtgcaaagcaagccgacagtgacatccctctagagagatatctatatctgaaaggaacaccctggatacagtgactgcctggaggaatagagagataagacaaacttggtggctgagagacaagagtgaaagacatttccatatcgcttgacaatatcttattgtcggagtagtggtcctggggggcagaatgtgaacaaagtgaattccaaggcagaagtcaggttccatttggcaactgccgagtggatcgcggagcccgtgcggcagaagatagccatcacgcataaaaacaagatcaacaggttaggagagttgatcctcacctctgagagcagccgctatcagttccggaatctggcagattgcctgc

SEQ ID NO: 141991 - DNA, 2085 bp, Homo sapiens
  Payload ID: 7918
  Gene Symbol: IER2
  Gene Name: immediate early response 2
  Uniprot ID: Q9BTL4
  ENST ID: ENST00000292433
  CDS Start-End: 364-1035
gggggcggtgtcggagttctgtctgggcctattcgggtccgagttcggaatttcggttcaaggcccagttcctcggattgttcctgcgcaacttcagtttcccttccaggcacgggcaatgagtgtttggccgcgacgagttggaaagcccggatgcgtccttcggttgggcggggtgtctcagtgacgtcactgggggtataaaagggcctgggtggcgggcgcctgggcagagcgtcctagcagtgtcactgcgtgggttggtttgtgtagagaggcgtgagcgagcccgttgtccggagtgcacctgctgcctgttctgtccctcccgggagcccccgccgctgtcgccgtcgagtcgccatggaagtgcagaaagaggcacagcgcatcatgaccctgtcggtgtggaagatgtatcactcccgcatgcagcgcggtggcctgcggctgcaccggagtctgcagctgtcgctggtcatgcgcagcgcccgggagctctacctctcggccaaggtggaggccctcgagcccgaggtgtcgttgccggccgccctcccctctgaccctcgcctgcacccgccccgagaagccgagtccacggccgagacagcgacccccgacggtgagcacccgtttccggagccaatggacacgcaggaggcgccgacagccgaggagacctccgcctgctgtgccccgcgccccgccaaagtcagccgcaaacgacgcagcagcagcctgagcgacggcggggacgctggactggtcccgagcaagaaagcccgtctggaagaaaaggaagaagaggagggagcgtcatccgaagtcgccgatcgcctgcagccccctccggcgcaagcggagggcgcctttcccaacctggcccgcgtcctgcagaggcgcttctccggcctcctgaactgcagccccgcggcccctccgacggcgccgcccgcgtgcgaggcaaagcccgcttgccgcccggcggacagcatgctcaacgtgctcgtgcgggccgtggtggccttctgaggaccccgagcggcgctgccggagcccagagcgcgcgtcgaaccgtcggcccgagggcgcagacctgaggcgaggccacccccctccatcctgggggaagcgcccgcgaaaaccgtggagagaagccgccgcccgggctgctgagaggcccggagagggactctgtccccggggagccatcgccttcagtgtgcagggacggcaccgaggagtctgagccgggggcgcgggcgccttccgcagagacctgcgcccacaggtgctgtcttagtggactgggacgtgaacctttcgctctccttctggactgggagaagggaggcttgggtgttgtgttttttgttttgtttgtttgtttgtttttaaagatctcctcagggtcggacttcattttgtactgtgggctgtgctggccctttcaaggtttttcaagagttggttttgcgtttccaacctcggagaattccaggcactccccttccccctccgctgacatacttgtataagcggtcatcgttgcgtcatggggcaggcgtggggagcttcctgtcgccttgcgtgggtgtggggcctgggaggaggtcctggggcgtgcacccgccctgggcagtggggaggagagtggcctgagttacttcacccccgcgtgctgctggttaatgtcccgcgtctctgcaccttcgggtgggagcggggactgatctactttcacattctcaagtttttctcatctgcattagaggtgcccagtaggttcccaggttccagcgtgcccctccctcagacacacggacacaatcagccgagaagttcctggtctgaatcacgagaatgtggaggggtggggggtgtcagtggaaaggcataaggctgagctgagaccagttgctggtgaaactgggccaatctggggaggggaacatccttgccagggagtttctgagggtctgctttgtttacctttcgtgcggtggattctttttaactccgtctacctggcgttttgttagaaatgtcagataggaaaataaaaaccatttgagtaaaaaa

SEQ ID NO: 141992 - DNA, 2934 bp, Homo sapiens
  Payload ID: 7918
  Gene Symbol: IER2
  Gene Name: immediate early response 2
  Uniprot ID: Q9BTL4
  ENST ID: ENST00000588173
  CDS Start-End: 1213-1884
gggggcggggggcgcaccaccccttaaagggcccgcaccaggaatgaatggagccattcgaacaattctgcatcctatttttggaggaagtggaattagtatttcttggagagacggcgcgtagcggagggtagggcggagattttctatctgctctgtctctgcattgctgggtttccagctcccaacctaaccccgcctccccgaacgcggagacggaactcggcccccttgtttggggggcggcagccacgtgttcacggggactgtcgtgcgcgccgggttcgcagccgtgcgagctctgaacccacccgtggagctcctgtcgcgggaaactgcgggggaatggcttggtacgaatcacgggaacccgtagcccggggcgggtcaccgcctacaagcaagggctggcgtacgctagagaccgaagagctggaggccccagtggccccctttcacagcagtagcaaatattgtttgtttagtaaatattggcctagtgactctgccttggtttccccacttgaaggaagcagatagaacagtatcctccgaggagtggaggctggggatcggtgaattattgataaaaggagagctcttaacctagcctggcacgttgtaagcgctgttagcatgattattggtgcagaaaacactcattagacacacctggtaaatgctaagaacagtggccacaggggatgttcaggctggaaccagggtcttcccctgtgtgaagggaaacttgctgcccacgacccactggggcctccagacgggagcatgtgggtaggccgtgagctccacccccggcccccctcccttgggccaaggcgctgatgcatcggcggggctcagagaaaggagcccacccagaaagctcagcgtggagtcgggggacgctcctcctcgccagggttcccgtcccctttccctgctgggtaaatcgcattctgtctctttaaggagtgtttggccgcgacgagttggaaagcccggatgcgtccttcggttgggcggggtgtctcagtgacgtcactgggggtataaaagggcctgggtggcgggcgcctgggcagagcgtcctagcagtgtcactgcgtgggttggtttgtgtagagaggcgtgagcgagcccgttgtccggagtgcacctgctgcctgttctgtccctcccgggagcccccgccgctgtcgccgtcgagtcgccatggaagtgcagaaagaggcacagcgcatcatgaccctgtcggtgtggaagatgtatcactcccgcatgcagcgcggtggcctgcggctgcaccggagtctgcagctgtcgctggtcatgcgcagcgcccgggagctctacctctcggccaaggtggaggccctcgagcccgaggtgtcgttgccggccgccctcccctctgaccctcgcctgcacccgccccgagaagccgagtccacggccgagacagcgacccccgacggtgagcacccgtttccggagccaatggacacgcaggaggcgccgacagccgaggagacctccgcctgctgtgccccgcgccccgccaaagtcagccgcaaacgacgcagcagcagcctgagcgacggcggggacgctggactggtcccgagcaagaaagcccgtctggaagaaaaggaagaagaggagggagcgtcatccgaagtcgccgatcgcctgcagccccctccggcgcaagcggagggcgcctttcccaacctggcccgcgtcctgcagaggcgcttctccggcctcctgaactgcagccccgcggcccctccgacggcgccgcccgcgtgcgaggcaaagcccgcttgccgcccggcggacagcatgctcaacgtgctcgtgcgggccgtggtggccttctgaggaccccgagcggcgctgccggagcccagagcgcgcgtcgaaccgtcggcccgagggcgcagacctgaggcgaggccacccccctccatcctgggggaagcgcccgcgaaaaccgtggagagaagccgccgcccgggctgctgagaggcccggagagggactctgtccccggggagccatcgccttcagtgtgcagggacggcaccgaggagtctgagccgggggcgcgggcgccttccgcagagacctgcgcccacaggtgctgtcttagtggactgggacgtgaacctttcgctctccttctggactgggagaagggaggcttgggtgttgtgttttttgttttgtttgtttgtttgtttttaaagatctcctcagggtcggacttcattttgtactgtgggctgtgctggccctttcaaggtttttcaagagttggttttgcgtttccaacctcggagaattccaggcactccccttccccctccgctgacatacttgtataagcggtcatcgttgcgtcatggggcaggcgtggggagcttcctgtcgccttgcgtgggtgtggggcctgggaggaggtcctggggcgtgcacccgccctgggcagtggggaggagagtggcctgagttacttcacccccgcgtgctgctggttaatgtcccgcgtctctgcaccttcgggtgggagcggggactgatctactttcacattctcaagtttttctcatctgcattagaggtgcccagtaggttcccaggttccagcgtgcccctccctcagacacacggacacaatcagccgagaagttcctggtctgaatcacgagaatgtggaggggtggggggtgtcagtggaaaggcataaggctgagctgagaccagttgctggtgaaactgggccaatctggggaggggaacatccttgccagggagtttctgagggtctgctttgtttacctttcgtgcggtggattctttttaactccgtctacctggcgttttgttagaaatgtcagataggaaaataaaaaccatttgagtaaaaaa

SEQ ID NO: 141993 - DNA, 1291 bp, Homo sapiens
  Payload ID: 7918
  Gene Symbol: IER2
  Gene Name: immediate early response 2
  Uniprot ID: Q9BTL4
  ENST ID: ENST00000587885
  CDS Start-End: 229-900
ctctcgtgccgcaccgtagggggcggtgtcggagttctgtctgggcctattcgggtccgagttcggaatttcggttcaaggcccagttcctcggattgttcctgcgcaacttcagtttcccttccaggcacgggcaatagaggcgtgagcgagcccgttgtccggagtgcacctgctgcctgttctgtccctcccgggagcccccgccgctgtcgccgtcgagtcgccatggaagtgcagaaagaggcacagcgcatcatgaccctgtcggtgtggaagatgtatcactcccgcatgcagcgcggtggcctgcggctgcaccggagtctgcagctgtcgctggtcatgcgcagcgcccgggagctctacctctcggccaaggtggaggccctcgagcccgaggtgtcgttgccggccgccctcccctctgaccctcgcctgcacccgccccgagaagccgagtccacggccgagacagcgacccccgacggtgagcacccgtttccggagccaatggacacgcaggaggcgccgacagccgaggagacctccgcctgctgtgccccgcgccccgccaaagtcagccgcaaacgacgcagcagcagcctgagcgacggcggggacgctggactggtcccgagcaagaaagcccgtctggaagaaaaggaagaagaggagggagcgtcatccgaagtcgccgatcgcctgcagccccctccggcgcaagcggagggcgcctttcccaacctggcccgcgtcctgcagaggcgcttctccggcctcctgaactgcagccccgcggcccctccgacggcgccgcccgcgtgcgaggcaaagcccgcttgccgcccggcggacagcatgctcaacgtgctcgtgcgggccgtggtggccttctgaggaccccgagcggcgctgccggagcccagagcgcgcgtcgaaccgtcggcccgagggcgcagacctgaggcgaggccacccccctccatcctgggggaagcgcccgcgaaaaccgtggagagaagccgccgcccgggctgctgagaggcccggagagggactctgtccccggggagccatcgccttcagtgtgcagggacggcaccgaggagtctgagccgggggcgcgggcgccttccgcagagacctgcgcccacaggtgctgtcttagtggactgggacgtgaacctttcgctctccttctggactgggagaagggaggcttgggtgttgtgttttttgttttgtttgtttgtttgtttttaaagatctcctcagggtcggacttcat

SEQ ID NO: 141994 - DNA, 1244 bp, Homo sapiens
  Payload ID: 7919
  Gene Symbol: IER3
  Gene Name: immediate early response 3
  Uniprot ID: P46695
  ENST ID: ENST00000259874
  CDS Start-End: 37-507
gaccctcacttggccttacactccgctcggctcaccatgtgtcactctcgcagctgccacccgaccatgaccatcctgcaggccccgaccccggccccctccaccatcccgggaccccggcggggctccggtcctgagatcttcaccttcgaccctctcccggagcccgcagcggcccctgccgggcgccccagcgcctctcgcgggcaccgaaagcgcagccgcagggttctctaccctcgagtggtccggcgccagctgccagtcgaggaaccgaacccagccaaaaggcttctctttctgctgctcaccatcgtcttctgccagatcctgatggctgaagagggtgtgccggcgcccctgcctccagaggacgcccctaacgccgcatccctggcgcccacccctgtgtccgccgtcctcgagccctttaatctgacttcggagccctcggactacgctctggacctcagcactttcctccagcaacacccggccgccttctaactgtgactccccgcactccccaaaaagaatccgaaaaaccacaaagaaacaccaggcgtacctggtgcgcgagagcgtatccccaactgggacttccgaggcaacttgaactcagaacactacagcggagacgccacccggtgcttgaggcgggaccgaggcgcacagagaccgaggcgcatagagaccgaggcacagcccagctggggctaggcccggtgggaaggagagcgtcgttaatttatttcttattgctcctaattaatatttatatgtatttatgtacgtcctcctaggtgatggagatgtgtacgtaatatttattttaacttatgcaagggtgtgagatgttccccctgctgtaaatgcaggtctcttggtatttattgagctttgtgggactggtggaagcaggacacctggaactgcggcaaagtaggagaagaaatggggaggactcgggtgggggaggacgtcccggctgggatgaagtctggtggtgggtcgtaagtttaggaggtgactgcatcctccagcatctcaactccgtctgtctactgtgtgagacttcggcggaccattaggaatgagatccgtgagatccttccatcttcttgaagtcgcctttagggtggctgcgaggtagagggttgggggttggtgggctgtcacggagcgactgtcgagatcgcctagtatgttctgtgaacacaaataaaattgatttactgtctgca

SEQ ID NO: 141995 - DNA, 1350 bp, Homo sapiens
  Payload ID: 7919
  Gene Symbol: IER3
  Gene Name: immediate early response 3
  ENST ID: ENST00000376377
  CDS Start-End: 31-447
cacttggccttacactccgctcggctcaccatgtgtcactctcgcagctgccacccgaccatgaccatcctgcaggccccgaccccggccccctccaccatcccgggaccccggcggggctccggtcctgagatcttcaccttcgaccctctcccggagcccgcagcggcccctgccgggcgccccagcgcctctcgcgggcaccgaaagcgcagccgcagggttctctaccctcgagtggtgagtatcgccgaagtgggcattcgcggggtgcgctgccctggagtcactggggaacgacccgactccagaggcctcgacctgacctgtctcctgttttgtctccccttaggtccggcgccagctgccagtcgaggaaccgaacccagccaaaaggcttctctttctgctgctcaccatcgtcttctgccagatcctgatggctgaagagggtgtgccggcgcccctgcctccagaggacgcccctaacgccgcatccctggcgcccacccctgtgtccgccgtcctcgagccctttaatctgacttcggagccctcggactacgctctggacctcagcactttcctccagcaacacccggccgccttctaactgtgactccccgcactccccaaaaagaatccgaaaaaccacaaagaaacaccaggcgtacctggtgcgcgagagcgtatccccaactgggacttccgaggcaacttgaactcagaacactacagcggagacgccacccggtgcttgaggcgggaccgaggcgcacagagaccgaggcgcatagagaccgaggcacagcccagctggggctaggcccggtgggaaggagagcgtcgttaatttatttcttattgctcctaattaatatttatatgtatttatgtacgtcctcctaggtgatggagatgtgtacgtaatatttattttaacttatgcaagggtgtgagatgttccccctgctgtaaatgcaggtctcttggtatttattgagctttgtgggactggtggaagcaggacacctggaactgcggcaaagtaggagaagaaatggggaggactcgggtgggggaggacgtcccggctgggatgaagtctggtggtgggtcgtaagtttaggaggtgactgcatcctccagcatctcaactccgtctgtctactgtgtgagacttcggcggaccattaggaatgagatccgtgagatccttccatcttcttgaagtcgcctttagggtggctgcgaggtagagggttgggggttggtgggctgtcacggagcgactgtcgagatcgcctagtatgttctgtgaacacaaataaaattgatttactgtctgca

SEQ ID NO: 141996 - DNA, 1244 bp, Homo sapiens
  Payload ID: 7919
  Gene Symbol: IER3
  Gene Name: immediate early response 3
  Uniprot ID: P46695
  ENST ID: ENST00000383560
  CDS Start-End: 37-507
gaccctcacttggccttacactccgctcggctcaccatgtgtcactctcgcagctgccacccgaccatgaccatcctgcaggccccgaccccggccccctccaccatcccgggaccccggcggggctccggtcctgagatcttcaccttcgaccctctcccggagcccgcagcggcccctgccgggcgccccagcgcctctcgcgggcaccgaaagcgcagccgcagggttctctaccctcgagtggtccggcgccagctgccagtcgaggaaccgaacccagccaaaaggcttctctttctgctgctcaccatcgtcttctgccagatcctgatggctgaagagggtgtgccggcgcccctgcctccagaggacgcccctaacgccgcatccctggcgcccacccctgtgtcccccgtcctcgagccctttaatctgacttcggagccctcggactacgctctggacctcagcactttcctccagcaacacccggccgccttctaactgtgactccccgcactccccaaaaagaatccgaaaaaccacaaagaaacaccaggcgtacctggtgcgcgagagcgtatccccaactgggacttccgaggcaacttgaactcagaacactacagcggagacgccacccggtgcttgaggcgggaccgaggcgcacagagaccgaggcgcatagagaccgaggcacagcccagctggggctaggcccggtgggaaggagagcgtcgttaatttatttcttattgctcctaattaatatttatatgtatttatgtacgtcctcctaggtgatggagatgtgtacgtaatatttattttaacttatgcaagggtgtgagatgttccctctgctgtaaatgcaggtctcttggtatttattgagctttgtgggactggtggaagcaggacacctggaactgcggcaaagtaggagaagaaatggggaggactcgggtgggggaggacgtcccggctgggatgaagtctggtggtgggtcgtaagtttaggaggtgactgcatcctccagcatctcaactccgtctgtctactgtgtgagacttcggcggaccattaggaatgagatccgtgagatccttccatcttcttgaagtcgcctttagggtggctgcgaggtagagggttgggggttggtgggctgtcacggagcgactgtcgagatcgcctagtatgttctgtgaacacaaataaaattgatttactgtctgca

SEQ ID NO: 141997 - DNA, 1350 bp, Homo sapiens
  Payload ID: 7919
  Gene Symbol: IER3
  Gene Name: immediate early response 3
  ENST ID: ENST00000400509
  CDS Start-End: 31-447
cacttggccttacactccgctcggctcaccatgtgtcactctcgcagctgccacccgaccatgaccatcctgcaggccccgaccccggccccctccaccatcccgggaccccggcggggctccggtcctgagatcttcaccttcgaccctctcccggagcccgcagcggcccctgccgggcgccccagcgcctctcgcgggcaccgaaagcgcagccgcagggttctctaccctcgagtggtgagtatcgccgaagtgggcattcgcggggtgcgctgccctggagtcactggggaacgacccgactccagaggcctcgacctgacctgtctcctgttttgtctccccttaggtccggcgccagctgccagtcgaggaaccgaacccagccaaaaggcttctctttctgctgctcaccatcgtcttctgccagatcctgatggctgaagagggtgtgccggcgcccctgcctccagaggacgcccctaacgccgcatccctggcgcccacccctgtgtcccccgtcctcgagccctttaatctgacttcggagccctcggactacgctctggacctcagcactttcctccagcaacacccggccgccttctaactgtgactccccgcactccccaaaaagaatccgaaaaaccacaaagaaacaccaggcgtacctggtgcgcgagagcgtatccccaactgggacttccgaggcaacttgaactcagaacactacagcggagacgccacccggtgcttgaggcgggaccgaggcgcacagagaccgaggcgcatagagaccgaggcacagcccagctggggctaggcccggtgggaaggagagcgtcgttaatttatttcttattgctcctaattaatatttatatgtatttatgtacgtcctcctaggtgatggagatgtgtacgtaatatttattttaacttatgcaagggtgtgagatgttccctctgctgtaaatgcaggtctcttggtatttattgagctttgtgggactggtggaagcaggacacctggaactgcggcaaagtaggagaagaaatggggaggactcgggtgggggaggacgtcccggctgggatgaagtctggtggtgggtcgtaagtttaggaggtgactgcatcctccagcatctcaactccgtctgtctactgtgtgagacttcggcggaccattaggaatgagatccgtgagatccttccatcttcttgaagtcgcctttagggtggctgcgaggtagagggttgggggttggtgggctgtcacggagcgactgtcgagatcgcctagtatgttctgtgaacacaaataaaattgatttactgtctgca

SEQ ID NO: 141998 - DNA, 1350 bp, Homo sapiens
  Payload ID: 7919
  Gene Symbol: IER3
  Gene Name: immediate early response 3
  ENST ID: ENST00000446599
  CDS Start-End: 31-447
cacttggccttacactccgctcggctcaccatgtgtcactctcgcagctgccacccgaccatgaccatcctgcaggccccgaccccggccccctccaccatcccgggaccccggcggggctccggtcctgagatcttcaccttcgaccctctcccggagcccgcagcggcccctgccgggcgccccagcgcctctcgcgggcaccgaaagcgcagccgcagggttctctaccctcgagtggtgagtatcgccgaagtgggcattcgcggggtgcgctgccctggagtcactggggaacgacccgactccagaggcctcgacctgacctgtctcctgttttgtctccccttaggtccggcgccagctgccagtcgaggaaccgaacccagccaaaaggcttctctttctgctgctcaccatcgtcttctgccagatcctgatggctgaagagggtgtgccggcgcccctgcctccagaggacgcccctaacgccgcatccctggcgcccacccctgtgtcccccgtcctcgagccctttaatctgacttcggagccctcggactacgctctggacctcagcactttcctccagcaacacccggccgccttctaactgtgactccccgcactccccaaaaagaatccgaaaaaccacaaagaaacaccaggcgtacctggtgcgcgagagcgtatccccaactgggacttccgaggcaacttgaactcagaacactacagcggagacgccacccggtgcttgaggcgggaccgaggcgcacagagaccgaggcgcatagagaccgaggcacagcccagctggggctaggcccggtgggaaggagagcgtcgttaatttatttcttattgctcctaattaatatttatatgtatttatgtacgtcctcctaggtgatggagatgtgtacgtaatatttattttaacttatgcaagggtgtgagatgttccccctgctgtaaatgcaggtctcttggtatttattgagctttgtgggactggtggaagcaggacacctggaactgcggcaaagtaggagaagaaatggggaggactcgggtgggggaggacgtcccggctgggatgaagtctggtggtgggtcgtaagtttaggaggtgactgcatcctccagcatctcaactccgtctgtctactgtgtgagacttcggcggaccattaggaatgagatccgtgagatccttccatcttcttgaagtcgcctttagggtggctgcgaggtagagggttgggggttggtgggctgtcacggagcgactgtcgagatcgcctagtatgttctgtgaacacaaataaaattgatttactgtctgca

SEQ ID NO: 141999 - DNA, 1244 bp, Homo sapiens
  Payload ID: 7919
  Gene Symbol: IER3
  Gene Name: immediate early response 3
  Uniprot ID: P46695
  ENST ID: ENST00000439190
  CDS Start-End: 37-507
gaccctcacttggccttacactccgctcggctcaccatgtgtcactctcgcagctgccacccgaccatgaccatcctgcaggccccgaccccggccccctccaccatcccgggaccccggcggggctccggtcctgagatcttcaccttcgaccctctcccggagcccgcagcggcccctgccgggcgccccagcgcctctcgcgggcaccgaaagcgcagccgcagggttctctaccctcgagtggtccggcgccagctgccagtcgaggaaccgaacccagccaaaaggcttctctttctgctgctcaccatcgtcttctgccagatcctgatggctgaagagggtgtgccggcgcccctgcctccagaggacgcccctaacgccgcatccctggcgcccacccctgtgtcccccgtcctcgagccctttaatctgacttcggagccctcggactacgctctggacctcagcactttcctccagcaacacccggccgccttctaactgtgactccccgcactccccaaaaagaatccgaaaaaccacaaagaaacaccaggcgtacctggtgcgcgagagcgtatccccaactgggacttccgaggcaacttgaactcagaacactacagcggagacgccacccggtgcttgaggcgggaccgaggcgcacagagaccgaggcgcatagagaccgaggcacagcccagctggggctaggcccggtgggaaggagagcgtcgttaatttatttcttattgctcctaattaatatttatatgtatttatgtacgtcctcctaggtgatggagatgtgtacgtaatatttattttaacttatgcaagggtgtgagatgttccccctgctgtaaatgcaggtctcttggtatttattgagctttgtgggactggtggaagcaggacacctggaactgcggcaaagtaggagaagaaatggggaggactcgggtgggggaggacgtcccggctgggatgaagtctggtggtgggtcgtaagtttaggaggtgactgcatcctccagcatctcaactccgtctgtctactgtgtgagacttcggcggaccattaggaatgagatccgtgagatccttccatcttcttgaagtcgcctttagggtggctgcgaggtagagggttgggggttggtgggctgtcacggagcgactgtcgagatcgcctagtatgttctgtgaacacaaataaaattgatttactgtctgca

SEQ ID NO: 142000 - DNA, 1350 bp, Homo sapiens; identical to SEQ ID NO: 141998
  Payload ID: 7919
  Gene Symbol: IER3
  Gene Name: immediate early response 3
  ENST ID: ENST00000429592
  CDS Start-End: 31-447

SEQ ID NO: 142001 - DNA, 1244 bp, Homo sapiens; identical to SEQ ID NO: 141999
  Payload ID: 7919
  Gene Symbol: IER3
  Gene Name: immediate early response 3
  Uniprot ID: P46695
  ENST ID: ENST00000450236
  CDS Start-End: 37-507

SEQ ID NO: 142002 - DNA, 1244 bp, Homo sapiens; identical to SEQ ID NO: 141999
  Payload ID: 7919
  Gene Symbol: IER3
  Gene Name: immediate early response 3
  Uniprot ID: P46695
  ENST ID: ENST00000416884
  CDS Start-End: 37-507

SEQ ID NO: 142003 - DNA, 1350 bp, Homo sapiens; identical to SEQ ID NO: 141998
  Payload ID: 7919
  Gene Symbol: IER3
  Gene Name: immediate early response 3
  ENST ID: ENST00000416336
  CDS Start-End: 31-447

SEQ ID NO: 142004 - DNA, 1244 bp, Homo sapiens; identical to SEQ ID NO: 141999
  Payload ID: 7919
  Gene Symbol: IER3
  Gene Name: immediate early response 3
  Uniprot ID: P46695
  ENST ID: ENST00000435856
  CDS Start-End: 37-507

SEQ ID NO: 142005 - DNA, 1350 bp, Homo sapiens; identical to SEQ ID NO: 141998
  Payload ID: 7919
  Gene Symbol: IER3
  Gene Name: immediate early response 3
  ENST ID: ENST00000436988
  CDS Start-End: 31-447

SEQ ID NO: 142006 - DNA, 3525 bp, Homo sapiens
  Payload ID: 7920
  Gene Symbol: IER3IP1
  Gene Name: immediate early response 3 interacting protein 1
  Uniprot ID: Q9Y5U9
  ENST ID: ENST00000256433
  CDS Start-End: 98-346
atcggcttccgtaggaaggcgccggccgtggaggcgccacgtcccttgcggcggcgggagagaaatcgcttggacttcggggcggcctcggacggccatggcctttaccctgtactcactgctgcaggcagccctgctctgcgtcaacgccatcgcagtgctgcacgaggagcgattcctcaagaacattggctggggaacagaccagggaattggtggatttggagaagagccgggaattaaatcacagctaatgaaccttattcgatctgtaagaaccgtgatgagagtgccattgataatagtaaactcaattgcaattgtgttacttttattatttggatgaatatcagtggagaaaatggagactcagaagaggacatgccagtagaagttattactttggtcattattggaatatttatatcttagctggctgaccttgcacttgtcaaaaatgtaaagctgaaaataaaaccagggtttctatttatctgtttttttttttaatgttgcacttgtagtttcattacaaaagatcagatcatgaaaggcagtaactctccaggactggaatatctgattgctcagtgttaatagtagttcatgctgtggtgagattgttaaaagggtgcaagactgttgcttctctttttttagatatttttctatctctcacttctcagggatgaaattctttttcaaagttttgaagttccttgcaacttagccatgatgtgagtggttatccctagataaaattaaaaggatttttaaaaagtaattactgcacataaaatgataaataggtaatttgaataattttattttaagctccttggttaattattttgtctattgtctcagctataaattcaaatttatacatactattgagtattaatattctctgatttcagggagaattctgtcagtcacatgatgattatgtttttgtttaacattctttccatgcacttgttattttattaatttgcctgaatgatgagaccagaccagtgtctacagattttcattgtcagaaaaatctataagtctgccctttttacaatgatgatttaaaaaaaacaacagcgtaaatattagcccacaagagcagtcctaaacaatcacaattacactgtactacccaagaagactgtttattgtgaagcatttacctttcaaaaaatcattacatttctatttcttggtggagcagcacattgtggagtgtgattcttaattcttcattgagtttgtcaataggacattgatgctggataggttgtcttttgtttttatgtctcagaccatcttgtgagattgtttgcctatctcataatacagttttatgcagaaaggttgaaactatgtaaatggtttttatggaaattatcagttacaatattttaaaggtgtagaatggcatctttgtttataggagaacatttgtaaataaagttaaatttctaagtcaagcacttgtttttgtaccttagtataaacctgtcagtgttaactgcattaatctccattttgggtgaacacctcttattatatgttctttgctgtaaaattgccgagtatagagttaatgaaagtaaatatttacatgtatttttttttcttcagtgaattaactgaattgctgacatacatccagaagactcatgagcaccttttatttcatgacttcagttacttctaaaactatggagcaggtattaagtaccttttggcctttcctaagttagagatcagtgatctttggactataggcttgcagctagtccaaggaaagtaccaaggattcttagttgattacttggctcatgtgaatgactaatttggtacttagaggccgtgttcttttagccttacaaagaactgatgcctgagttcaagtttgagctactgaaaagattcaaaagaagcagttacttgagggcaggcccatttccccatatggtatgagcagtacaaaattttttaaaatgaaagaaaagagagaccttgatctgatgttatttttcatataagacattacagcataccttcatcttaattcagtgttgggattttgtccaaatattccatcagggagcagtcacagaagggccaggatcaaagtattctgtagccaagtagttctgaggaaagtgaagcactgaactgaacatcaaaatatgtcatatctggaggccacttcataattccagtttgtggctgaagaggggtctgtaagctttcactggtcagccctggtttccccagagcagttgtgattcagtaaacagagtgtgttattttagtagacagtaacttaagtgcctgttggcctgcccatgtcctcccctttatctattaccaggattaacaatttgtgatgattctggactccaaataccgatgatgtttatagtccttatgtattctggccctgtgtttgcatgtctctgaactgtgcgaaggttcttggctctagtctgtagatattaaccaaattcatcgctaatcaagtacagtggttttcaaacttttatagttaacagcagaaccagattttcaaaggaattctgacacagaactgtaacattcccgtatctaaaccagatgagagtaggtccatttatttgtttttagttgaagtagagctgggattcaaaggctcactattcagcctccactgcactcttgtcaggcttcccaaggcatttccataaaaccctaaattttcaaaaatatagctaaaaagtatcttataaaaatccctgctttagccataaaaaagaattagataataccttctgtgggaacatggatggagctggaagccatcatccttaacaaactaatgtaggaacagaaaaccaaataccacatgttattacttataagtgggagctaaatgataagacctcatggacataaggagggggacaacagacactgggggctatttgagggtggagggtgagaaagagtgccagaaaaattactgggtactaggcttagcacctggataacgaaataatctgtgccaaacccccgtgacacaagtttacctatttaacaaatgtactgtacccctaaaagttaaaaaagtaaaaatataaaaaaataaaatccctgctttagggagggtgggagggggtgagggaaacagaaactacatactgagtacaatgtacagtagtccagtgatgggtgcactaaaatttcagactttacaccactatacaattcatccatgtaaccagaaaccacttgtacccctaaagctattgaaataaaaagctaaatgagttcccccaccttcctctccccatcaaaatccttgctttagatacaataagagtaggcaatctgtgttctatatgtgttagatgtgtattactggtgaaatgacaagagaaagcaagatatttgactagtaaaaagactaggaggcaagatatttctaatatatcaagcaaaccttttaccatgtgactgaaagcaaataaacttcctaagacctca

SEQ ID NO: 142007 - DNA, 4188 bp, Homo sapiens
  Payload ID: 7921
  Gene Symbol: IER5
  Gene Name: immediate early response 5
  Uniprot ID: Q5VY09
  ENST ID: ENST00000367577
  CDS Start-End: 192-1175
gacccgaaacggggaagttgtcttgtttggagaggttagtagagcagcgcgcgcgtcaccagagtcgtttctcttcggagtcttaggtgatcgagggtgtgcccagggggcggacttgtttgcgcctcccgttccctcccaatttccaaacgtgtcaccccggcgccgacggccctgtgcaggggaagcagatggagttcaagctggaggctcatcgcatcgtcagcatctctctgggcaagatctacaactcgcgggtccagcgcggcggcatcaagctgcataagaacctcctggtctcgctggtgctgcgcagcgcccgccaagtctacctgagcgacccgtgccccggcctctacctggccggtcccgctgggaccccggcgccgccaccgcagcagcagcccggggagccggcggccgggccacccgccggctggggagagccgcccccgcccgccgctcgtgcctcttggccggagaccgagccgcagccggagcgctcctccgtctcagacgcgccgcgggtaggggacgaggtgccggtggccacggtgactggagtcggggacgtttttcagggcggagaggcggacgcgacggaagctgcctggagccgcgtggaggggccgcgccaggcggcggccagagaagccgagggtaccgccggaggctggggcgtcttccccgaggtatctcgtgccgcgcgccgcccctgcggctgccccctaggcggggaggacccgccgggtacaccggccgcgaccccccgcgctgcctgctgctgcgcgccgcaaccagcggaggacgagccccccgcgccgcccgcggtgtgccccaggaagcgctgcgcggcgggggtgggcggcggcccagcgggctgcccggcgcccggctcgaccccgctcaagaagccccgccggaacttagagcagccgccgagtggaggagaggacgacgacgcggaggagatggagaccgggaacgtggctaacctcatcagcatcttcggttccagtttctcgggactcctacggaaaagccccgggggcggcagagaggaagaggagggagaggagagcggtccggaagccgccgagcccgggcagatctgctgcgataagccggtgctgagagacatgaacccctggagcacagccatcgtggccttctgagcccttggcccccctgcggggaggaggtggagcagcgggcgtccccgaagtgagggccaggcccttcccggctgcgaggacgcccagagaccgcgggcgctgagcgcgttgggcagactggttgcctctgggcatcgcaaactgcccccgggcgcatctggcttatctggagacctgggagcttgaggctcattggaagaggacgatcgttaacttttgtgtttgtgtatgtctgtgtatgtaagtttgtcttgtggcattaagactattttgctcttctggaatgcaccactccttccccagggtttaagagattgggggcagacagggactttcctctgccggctgcgtggagaaggaagcggctaaaaggtttgggccggggagttccccattcgttctccggggagggagggactttacacctacccctcaccggaaagctagacccgcttcagggccaggagtggcgtttccgcacaggatttcctaagacgagagggatttagccaagagcacagacttggattccttctgtccctccccacctttctctcccaatgaagaaacgtttatatcctgtgattactctaggaaaggggcgtattaacggtcctttgcttccccgcaggggagaaaaagcttgacgaacttcacagaagagttcaagcttggaaataatggagtttatagagaaaagatatatttttaaaagctctaggtcagaagtactacacagtgcttttaaaaagtgtttaatgagagtttacagacagaagcccgaagtggaaagaccttatggttttgtagatatggtgactccagtctttgttgtataaaggttgggggagctgataaggtttttgtacagtattttctccttcgttgtattgatttttgtataaaaatgtaacttctacgtgtctaacacgtattaaatattttgaagcaacgtaactgcctgcttgtctgtaataacctgcctgggttgggagggaagtgggaggagggaaaccagggcctgagctagaaaattgaaggtgtggttcttagtatcagtcattcgcagactgaggacattgtttactgactccactaagtatcaagagagacacgtttaatttttcctcctagatcagaggactgctattagatactaatatcggcgacctgtcaggttctagaaacctgccactacaactgccttttctaaggtcagtttagaccaatttgtcacccaatatgtgggtgtctaatactaagtaatttaaccaacttttgaagccccgcttatccacaaaaatgtttttcagcaaaactttgtttcctgttaagctattaatacgggtcatcttttagctttgtaattgaaaaaaaaaaagtttagatagtagtttaccttaaaagcccattcgaactgacataggaagatgaaagagactgacttgtccaaattgtcaggtccacctctgcatcacagtggatgtcaggatgtaaattttcagtttttctcttacatctagaaagtaaatatattgctgagagggaaattgtttgcatcaaaccagataaggaaggagggctaggcaaatttagttctcatttagcaaaacttcctgatttgttttgttacttaaatggtgacatcagtgtttggtcatggtagacacttaggtgatgatagccaaaacatccatcgattttactaaaatcactgccattaagagagttttttgtctcttcatgttcaatgtttgaaaggtattcagtaatctatttcagaagcaaatcaattagggaatggtgtttattaaaatacggtacagttgccaggactttaaaagatggtactggtttctaacaacttacgagtatatagggtatttaaaagatgggagagattgaagaaagacaaaggtttaaaggtcatagccttcgagcataagaggcatatgaatggtgtcttggccttaactcccaattatacgaacttctgttttagctgaataggccagtgcctcgtgccttgatatttcggcaaatctattagtggttccttaagcatagggaactttgtactttatgctctgtcgccataataatgtatttatagaattaaacattctcaaattagggtcttgttaaactgactttttctttcagaaagtagctacttaaattctgttacagctacaaaagatccatcaagtgctgactgcttaaactgaagaaggtgtccagggccttaattctgcaaacatttcctgttgttagaaagtatgatgcttgaacagcgatctcagtgtattttatgttttaaagggggtaacgtttggtgtgtttaagagagctgatgtgttttggatgagactaaagttgatccttggttttacattaagatgaacctgggtccatgtgtctgcttaaagaatgtaaattggcatacttgataggaggataaagctttgtaggaattagaaaagatcattctcttttttgttgcagaagcagtatagtatagtagttagagcatgggccctggagccaggctgcttggtgtcttcctttatttatttatttatttaattataaaaagtaaatataaagtgagctatgttgaccaggttcgtcttgaactcctggcctcaagcaatcctcctgcctcagcctcccaaagtgctgggattacaggcatgagccaccacaacctggcctgcttgggtttttctatcttggctctgccacctagctgtgggtccttggacaagttacttcatctctctgtgcctcaggtttttcaaatgtaaaattgggataattggatctgtctcatagggttgtgaaaattaatgagttaatgctcttagaagagtacctcatatgtaataagcacgcaactgttaattattgttaatgtagaagttaattctgtgtataaatcagatacactgtggtcaaagatttgtgtgtatttgtaagaaaagaggagaatggagaatctatttttaagtgg

SEQ ID NO: 142008 - DNA, 2711 bp, Homo sapiens
  Payload ID: 7922
  Gene Symbol: IER5L
  Gene Name: immediate early response 5-like
  Uniprot ID: Q5T953
  ENST ID: ENST00000372491
  CDS Start-End: 211-1425
gactcattgctttggcgccgtctggggagcgcgagcccgcgggtggcgcgcggcgcatggtggcggctcctttcggagcgcagccgaacctctgacccggactccgttacccctgcccggcgcgccccggcggccggctggaggcagaaacagcagaagcgttaacagcagcagcggcggcggctgctccgccgccgtctccgcgggagcatggagtgcgccctggacgcccagagcctgatcagcatctccctgcgcaagatccacagctcccgaacccagcgcggcggcatcaagctgcacaagaacctcctggtgtcctacgtgctccgcaacgcgcgccagctctacctgagcgagcgctacgccgagctctaccggcgccagcagcagcagcaacagcagcagccgccccaccaccagcaccagcacctagcgtacgcggcgccgggcatgccggccagcgcggccgacttcggcccgctccaacttggcggcggcggggacgcggaggcgcgcgagccggccgcccggcaccagctgcaccagctccaccagctccaccagctgcacctccagcagcagctgcaccagcaccagcacccggcgcccaggggctgcgcggcggcggcggcggccggagcgcccgcgggcggcgcgggggcgctctcggagctgcccgggtgcgccgcgctccagccgccgcacggcgcgccccaccgcgggcagcccttggagcctctgcagccgggtcctgcgccgctgccgctgccgctgccgccgcccgcgcccgctgcgctctgcccgcgggaccctcgcgccccggccgcctgctccgcgcccccaggggccgcccctccggccgccgccgcttctccgcccgcctccccggcccccgcctcctcccccggcttctaccggggcgcataccctaccccttcggacttcggcttgcactgcagcagccagaccaccgtgctggacctagacactcacgtggtgaccacggtggagaacggctacttgcaccaggactgctgcgcctccgcccactgcccctgctgtggccagggcgctccgggaccgggcctggcgtccgccgccggctgcaagcgcaagtattaccctggccaggaggaggaggaagacgacgaggaggatgcgggcgggctgggggccgagccccccgggggcgccccgttcgccccctgcaagcgcgcccgcttcgaggacttctgcccggactcgtccccggacgcgtccaacatctcaaacttgatctccatctttggctccggcttctcggggctggtgagccgacagccggactcctcggagcagccgccgccgctcaacgggcagctgtgcgccaagcaggcgctcgccagcctcggcgcctggactcgagccattgtcgccttctagggacccccgagggcacagggacccggggccccgcggggctggggccagacaaagactcggcaaaggggcgagaggagggaacgagcgggcgccgggccactcggggctgagctgggggcgagcgggggcaggcggctgatgttttataaattgtaaaataaaaaaaaaagaaatctaaaatcttggactttatttttgcagagagaaaaagcgcctatttaagtatgctttgtgtttctcctactcctttttttctttttattgtagtgattgcagtggtgtttagcgaggagcctaccacgtgagggagggctgctgcccggaggaggtgccgggcagccgggggcgaggcagggcgccctggccgccggggcgcgccgggggcgcagctcaggagggcgccggacctgggaagccgattccaatcagttgtcagacccgggaagcccgacgttccgctctcccgagtccctctgtggggtgaggaatgggtcttgtgaaattctgagcaaaaacaaaggcaaactctatctccgaaagggacgtttgggtcacatttcctctctgggggcggactccaaagttctcaaaatgagaaggcagaaatgaaaacacttcaactttttttttcttttcttcccggggcgggtgtcttgaacccctcttctccccgcccctctggctccgttctcctcccctcctccacccgtctcccggactcgggggtggcgcctgacaccccgacactctcggacactgggtaaggggtggggggcgggcacggcggactacatttcccatcatgcctagcactgcggtcctcactaaacaaaaaaggaagtcaattccttcacctggatccccggcggccccgggggagggaggggccgggaccgccgactgcgttggagactttgcactaagttcctggtcagctgtggtgtttgtgtgtgtgcttctaagttgcactgccttggttcagccttcggttgcatttcatgaaaccagcattgttcgagcctgtgagaaccccgtcctgtgtcttcagctcgatagatttgtttaatttaaaagccttttgttgtaaaaaggtggggttcgtctgcagcccctctggttctctgccatcagcaccgtgtggactccaaaacgagttgccaatccttcctttctcggcccttttccctcattaccctgtatttttgtgcatactgaattgtatatcaccgggtaaaactgttcagattgtttaaatttataatcttaataaaaagtcgattacagaa

SEQ ID NO: 142009 - DNA, 1662 bp, Homo sapiens
  Payload ID: 7923
  Gene Symbol: IRGC
  Gene Name: immunity-related GTPase family, cinema
  Uniprot ID: Q6NXR0
  ENST ID: ENST00000244314
  CDS Start-End: 200-1591
aggtctggctgaccaataagctgctgcttgctatgataatgggtcctagcaacggtgtctgaccttggctaagagggaaggagatcctatcagtggggagagtgtgaggggagagggagagcctgcagggcaggcgctgaggatcacgcatcctgtgactctcccctgtcccccgccaccctctgaaccactggccaccatggctacttcaaagttgcccgtggtgcctggggaggaggaaaacaccatccttatggccaaggaaaggctggaggccctgcgcacagcctttgagtcgggtgacctcccccaggccgcctctcacctccaggagctgctggcctccacggaaagcatccgcctggaggtgggcgtcacgggcgagtcgggcgcgggcaagtcctccctcatcaatgccctgcgtggcctggaggccgaggaccctggcgcggctctcacgggcgtcatggagaccacgatgcaaccgtcgccctatccacacccacagttccctgacgtgaccctctgggacctgccaggagccggctctccaggctgcccggctgacaagtacctaaagcaggtagacttcagccgctatgacttcttcctgctggtctccccccgccgctgcggggccgtcgagacccgcctggccgctgagatcctgtgccagggcaagaagttctactttgtgcgcaccaaggtggacgaggacctggcggccacgcgcacccagcggccgtcgggcttcagagaggccgctgtcctgcaggagatccgagaccactgtgccgagcggctgcgggaggccggcgtggctgaccctcgcatcttcctggtgtccaacctctcgccggcccgctacgactttcccacgctggtgtccacctgggagcacgacctgccctcccaccggcgccacgctggcctgctgtcgctccccgacatctcgctggaggccttgcagaagaagaaggccatgcttcaagagcaagtcctcaagaccgccctggtgttgggcgtcatccaggccctgccggtcccagggctggcggccgcctacgatgatgcgttgctcatccactcactgcgtggctaccaccgcagctttggtctggacgacgactcgctggccaagctggccgagcaggtgggcaaacaggcaggtgacctgcgctcggtcatccgctccccactggccaacgaggtctcgcctgagactgtcctgcggctctattcccagtcgtccgacggcgccatgcgggtggcccgcgcctttgagaggggcatccctgtgtttgggacgctggtggctggcggcatcagctttggcgctgtctacaccatgctccagggctgcctcaacgagatggctgaggacgcccagcgtgtccgcatcaaggccctggaggatgacgagccgcagccggaggtcagcttggaagtggccagtgacaatggcgtggaaaaggggggctccggggagggaggtggggaggaagccccactctcaacctgcaggaagctcggcctccttcttaagtacattctggacagctggaagaaacacgactcagaagagaaataaagagtgcagccccgcccccctgcctcacccacaaactaagtcttaacaaaatccaaattaccaacaaaaaa

SEQ ID NO: 142010 - DNA, 926 bp, Homo sapiens
  Payload ID: 7923
  Gene Symbol: IRGC
  Gene Name: immunity-related GTPase family, cinema
  ENST ID: ENST00000596627
  CDS Start-End: 102-926
agtgtgaggggagagggagagcctgcagggcaggaaaaagagagctgtgggcttccagggcgactcccttcacatccgtggtatctgtctctccctgccccatgccaaggcccaggaggtgtgaatggctcccttctcctctgcaggcgctgaggatcacgcatcctgtgactctcccctgtcccccgccaccctctgaaccactggccaccatggctacttcaaagttgcccgtggtgcctggggaggaggaaaacaccatccttatggccaaggaaaggctggaggccctgcgcacagcctttgagtcgggtgacctcccccaggccgcctctcacctccaggagctgctggcctccacggaaagcatccgcctggaggtgggcgtcacgggcgagtcgggcgcgggcaagtcctccctcatcaatgccctgcgtggcctggaggccgaggaccctggcgcggctctcacgggcgtcatggagaccacgatgcaaccgtcgccctatccacacccacagttccctgacgtgaccctctgggacctgccaggagccggctctccaggctgcccggctgacaagtacctaaagcaggtagacttcagccgctatgacttcttcctgctggtctccccccgccgctgcggggccgtcgagacccgcctggccgctgagatcctgtgccagggcaagaagttctactttgtgcgcaccaaggtggacgaggacctggcggccacgcgcacccagcggccgtcgggcttcagagaggccgctgtcctgcaggagatccgagaccactgtgccgagcggctgcgggaggccggcgtggctgaccctcgcatcttcctggtgtccaacctctcgccggcccgctacgactttcccacgctggtgtccacctgggagcacgacctgccctcc

SEQ ID NO: 142011 - DNA, 1659 bp, Homo sapiens
  Payload ID: 7924
  Gene Symbol: IRGM
  Gene Name: immunity-related GTPase family, M
  Uniprot ID: A1A4Y4
  ENST ID: ENST00000522154
  CDS Start-End: 1114-1659
taacctgctcaggtccccttccatgctgtggaagctttgtttttttgcactttgcagtaaatcttgctgctgctcattctttgggtccacactgcctttatgagctgtaacactcaccgtgaaggtctgcagcatcactcctgaaacctgtgaaacaacgaaccccccggggagaaacgaacaactccagactcgccgcctgaagagctgtaactctcacttcgaaggtctgcagcttcgctcctgagtcagtgaaaccacgaacccaccggaaggaagaaactctgaacacatccaaacatcagaaggaacaaactccggacacgcagcctttaagaattgtaacactcaccgcgagggtccgtggcttcattcttgaagtcagtgagacgaagaacccaccaattccggtaggagtaggaaatcacatcaccttcttttaatcagtctcaaatacctggccccttgtggaacctgcaagagccaggtttggcgaatgcaatgataagcaattgtctaatcactgccttgaaaaagagcagagcatttgagtatgctgtctcctcctctccctcacttcagttgggcccaacatgacagtcttaatggaagctcgggggtcaaaggctggtggcttacttcacgtatattgcagcatttcagtactgctctgcacgtgtgctcccccgcctgatgagcttactccagtgcccacagatacgacagagtgtcccaagtgcccctcacactctattagctgcatccttaacctctttttgccacaccataagcattgggttttgtttgttttgagatggagtcttgctctgttgccaggctggagtgcaatggcgtgatctcagctcactgcaatatctgcgtccagggttcaagcgattcccctgcctcagcctcctgtattagctgggactacaggcgcacaccaccacgcgcagctaatttttttgtattttagtagagaaggtttcacgatgttggccaggatggtctcaatctcctgacctcgtgatctgctcgcctcggccttccaaagtgctgggattacaggcatgagccacggcgcctggccagcattggggtattttattgaagatggaagccatgaatgttgagaaagcctcagcagatgggaacttgccagaggtgatctctaacatcaaggagactctgaagatagtgtccaggacaccagttaacatcactatggcaggggactctggcaatgggatgtccaccttcatcagtgcccttcgaaacacaggacatgagggtaaggcctcacctcctactgagctggtaaaagctacccaaagatgtgcctcctatttctcttcccacttttcaaatgtggtgttgtgggacctgcctggcacagggtctgccaccacaaccctggagaactacctgatggaaatgcagttcaaccggtatgacttcatcatggttgcatctgcacaattcagcatgaatcatgtgatgcttgccaaaaccgctgaggacatgggaaagaagttctacattgtctggaccaagctagacatggacctcagcacaggtgccctcccagaagtgcagctactgcagatcagagaaaatgtcctggaaaatctccagaaggagcgggtatgtgaatactaa

SEQ ID NO: 142012 - DNA, 503 bp, Homo sapiens
  Payload ID: 7924
  Gene Symbol: IRGM
  Gene Name: immunity-related GTPase family, M
  ENST ID: ENST00000520549
  CDS Start-End: 1-215
tgaatcatgtgatgcttgccaaaaccgctgaggacatgggaaagaagttctacattgtctggaccaagctagacatggacctcagcacaggtgccctcccagaagtgcagctactgcagatcagagaaaatgtcctggaaaatctccagaaggagcggagctctagaaaccaacaagtgtacccaaaccacagccacgtacctcttgcttgctgaaaggatcctgagagaaaagcaagacaaagaaatacagatcagctccgcaagccctagaaatagcaaggcccagctcagctggcctgccatgagaaatacctcaagagtactccagagaattccacaaggcccagaaatattccttccagaagaaaactatacgtaaatctgctcaggatattcaacagctagccagtgcatatgacatatactgggtacttaagaaacgtttgttaaatgaatcatgattataaagaaaaaataaattaaaacttatgtttagttaaa

SEQ ID NO: 142013 - DNA, 9685 bp, Homo sapiens
  Payload ID: 7925
  Gene Symbol: IRGQ
  Gene Name: immunity-related GTPase family, Q
  Uniprot ID: Q8WZA9
  ENST ID: ENST00000422989
  CDS Start-End: 157-2028
caggttaaagctaccgggacgggtcccggcatctctaaatcaccgctccctggcctcttcggcctccgtccgccgcggcccaggggccgggcttctcagctgctgacctactgccaccgactgcgctctctcccgtgggtcggctttttgctcgccatgcctccgccgcagggtgacgtgaccgccttgttcctggggcctccgggcttggggaagtccgcgctgatcgcagcgctgtgcgacaaggatgtggagacgctcgaggcccccgagggacggccggactccggggttcccagcctaagagctgcgggcccaggcctttttctgggcgagctgagctgcccacccgcagcgccggggccctgggcggcggaagccaacgtgctggtactggtgctgcccggacccgaggggaacggggaaccgttggctccagccctgggagaggcagcgctggccgccctggcccgagggaccccgctactggctgtgcggaacctccgtcctggggattcacagactgccgcccaggcccgtgatcagacagcagctctgctgaacagcgcggggttaggagctgcggatctgtttgtgctaccggcgaactgcggcagcagcgacggctgcgaggagctagagcgcctccgggcggcgctgcagagccaggcagaagcgctgcggaggctcctgccaccggcgcaggatggcttcgaggtgttgggtgcagcagagctagaggctgtgcgtgaggcctttgagaccggcggccttgaggctgcgctgtcgtgggtgcgctcaggcctggagcgcctgggcagcgcacggctagacctggccgtggctggcaaggctgacgtgggccttgtggtggacatgctgcttggattggatcctggcgacccaggcgctgcgcctgcttcggtccccacagcacccactcccttcccagccccagagcgcccgaatgtggtgctctggaccgtgcctctgggccacacgggcactgccaccaccgcggccgccgcctctcacccaacgcactacgacgccctcatcctcgtcacccctggggcccccactgagaaggactgggcccaggtccaggccttgctgctaccagatgcgcctcttgtctgcgtgcgcacagacggcgagggcgaggatccggagtgtctgggagaaggcaagatggagaatcccaagggcgagagcttaaagaacgcaggtggagggggattggagaatgcactcagtaagggaagggagaaatgtagcgctggatcgcagaaagcaggcagcggggaaggtcctgggaaagctggcagcgagggtttgcagcaggttgtcggcatgaagaaatcaggtggtggcgactcagagcgggccgctgcgttaagcccggaggacgagacgtgggaggtgctggaggaggcgccgccgccagtgttccccctacggcctggcggactcccagggctatgcgaatggctgcggcgagcgctccccccagcccaggcaggggcactgctgctggcgttgccaccagcatctcccagcgctgcccgaaccaaggctgcggcgttgcgagccggggcgtggaggccagctctgctggctagtctggcggcggcggcggcaccactcccagggctgggctgggcatgcgacgtggcacttctgcggggtcagctggcggagtggcgacggggcctggggctggaacccacggcactggctcgacgtgagcgtgccctgggcctggcttctggagagctggcagcgcgcgctcatttcccaggcccggtgacgcgcgccgaggtggaagcaagactgggcgcctgggcgggcgagggcactgctgggggcgcagcactgggggctctctccttcctgtggcctgcgggtggtgcagcggcgacaggtggcctgggctaccgagcggctcacggcgtcctgctgcaggctctcgatgagatgcgggctgatgctgaggctgtgctggcaccccctgagcctgcccagtgaggagtgggagggggcttgggagtccagactctgacaggggatgcctgggcttaatcctgggtgcttgaaggggatgtggactcttgacttccagctgggatgtgtgacttcttatcacctggattcagagagtctgggggacaggaatcctgatttttttttttttttttcttttttttgtgagacgaagtctcttgttgcccaggctggagtgcaatggcgcgacctcggctcactgcaacctccgcctcccgggttcaagcgattctcctgcctcagcgtccggagtagctgggattacaggtgcctgccaccacacctggctaatttttgtatttttagtagagacggggtttcaccatgttggccaggctggcctcgaactcctgacctcaggcgatcgacccgctccggcctcccaaagtgctaggattacaggcgtgagccaccgcccctggccaggaatcctgatacctttgggaaccatggtgaatgacatctagacccttctgtcctgaagggagttggtggcccagactctagcagggactatgtctttgtctcctagggagtagaaactggagttactggatgtttagtcctccagggaggctggtagaagtcctgtttcctaattggtggggaggtgtccatgactgggacctgaactccagtataggggagggagacctgagcgccccagggagctggaactcttgggcttcagagcctcagagggaaacagggtctacatttctctgggagaaaaagcctgcacacaggtccccaaggagcagtgggctttgaatcttgatggggtggcggaggcccctggggtctgagacttccggggttctaagatggctgtggaccttggttcctaaatattgggtaaggggaggtctgcatctggaggagggatcgggggcttgtgcgagaaagctggagacttcttgatctctcctggggagtggatgggtttctataattgccctccaaaagcatgtagggagggtggtcccacaaaaatgaggtgaggtgggtaagaggtctgggcatggtgggctctgggagtagccagggaccaggaatgaggtcttttgggtgtggaagggcagtaaagcatacctcagagacagctcctccaaaccttgtattgggatcccggcaactgcctctgtgagtgtgactgggaagggatatgactgccttcatcttctaggtgctgagcaattcaggtgatctctggggagtctgtttctctgtctcttttctttaggagtttctatctttttttggcctttttctcctggtatttaaccataaccctttatggccttggtgttttgtgcaccttccttttcagaagagcagctgtactgctgcactggtccaaacacttctgtatggacacctcgggtatccccaagaggctctgctttctgatgtacatagagggtgctgcattgagccaggggcccaccaaatgggtggtcaggcacttgagaccatgggaatatgccaggagtgaatgaagcaaaggcagaaaccacagtgcctggaatgttctaggctgctagccacatgtgggggaaaagttgcaggttacagaattcttcagtgtcaaaaacagaaaaggaggatctgagaatccaagcgatagaatcccttttgtcgtagacagaaagagcaaagtccagagagggcaggcttgaggcccaacagcacacagtaaggccctgtgggtctggcccttgcctattctcattcactgccccttcccactcctgtccagcctgatagactttccttctttttttttttgaaatggagtctcaccttgtcacccagtctggagtacagggatgtgatgactgtagctgagatgacaggcatgtgccaccacacctggctaatttttgtagtttagtagagaagggatttcaccctgttggtcaggctggtctcgaactcctgacctcaggtgatccacccgactcagactcccaaagtgctgggattacaggtgtgagccatcatggccgcctgactctttctgatgcctgagtggctaccttgagtcctgcctggggacccatgcacctgctgttctctttccttcaaggctctactcacaacttcctgttctactctcaaaccttcctgtgacgggctcagtcagatctcagctcacgtatcccctcagagaggacttcccctccctgaccaccctatctgaagtagctcacattcccccactattcatttcggccagttgagtttccttgtagcaattattactgtcaaaaatgatcttatttatttacctgtttattggcttttgacccgttgcctgtcctgttctctgttgtttccccagcatctagaacaataggtgcctgacacaataggtgcttcgtaaatatttattattattattattattttagagacagggtcttgctctgttgccccggctggaatacagtgggatgatcatggctcactgccatctccaactcctgggctcaaacgatcctcccacctccgcctacagagtagctgggactataggtacacagcaccaaattttctgtagagacgggggtcttgctttgtagcccacactagtgttgaactcctggcctcaagtgatcctcctgccttgatgggattacaggtgtgagccaccacacccagcctaaatgtttatttcattggtcagtgtcagaactaggattggaatttagattgttaatctcttgccacaagataggaaaatggagcaagatgaggagaaaaaagcatttaatgggagagaacacccttgtctgaggtcagggacctgggaagcaagcacgactttgccactgtcactgtgtgttacttggacagtgccttattttcccatctgtgaaataaaagagctggataagaaccttagttttgagatcctgtctcccttaaaagctgaagacaaaggtaactgatccaagggcagacaagggatggtaccatcatctccagcttggactcccactgctgacaaaatttgtcccttcaaagttgagatagctaccatggggaagagcacttagttctatactgaatggctccaggcattttcatgaaagctctttcagctttggggaagaatattcatccatatctttaccccatcatattagtgtctaagccctgcaatcaggcatgtcagccacgtgatggaatgggagggctgcagggcagcactgtccagtagaaacgaaatgcaagccacatatgtcattttaagttttctttttttgagatggagtttcactccatcacccaggctggagtgcagtggcacgatctcgcctcactgcaacctccgcctcccaggttcatgtgattctcctgcctcagcctcctgagtagctgggattacaggcatatgccaccatgcctggctaatttttgtatttttagtagagatggggtttcaccatgttgatcaggctggtctggaactactgacctcaggccacccgccttggcctcccaaagtgctgggattacaggcatgagccaccgcgcccagctaatttttgtatttttattttatttatttatttattttttgggagacggagtcttgctctgtcacccaggctggagtgcagttgtgcgatcttggctcactgcaacctcagcctcccaagtagctgggattacaggcatgcaccatcatgcccagctaatttttgtatttttagtagagatggggtttcactgtgttggccaggctggtcttgaactcctgacctcaggtgatccaccggcctcagcctcccaaagtgctgggattataggcgtgagccactgcacccgtcctaatttttgtatttttagtagagatggggtttcaccatgttggctaagctggtctggaactcatggcctcaagttatctgcccacctcagcctcccaaagtgctgagtaagccaagttttctaatagccacattagacaagtaaaaggaaacaggttaaattcattttaacatgttttacttaacccaatgtatccaaaatagcatttcaacatgtcatcggttttttagttttttttttttttgagatagtgcttcgctttgttgcccaggctggagtgcagtggcacaatctcggctcactgcaacctccaccttccaggttcaagtgattctcctgcctcagcctcccgagtagctgggattacaggcacccgccaccatgcccactaatttttgtatttttggttagagatggggtttcgccatgttggccaggctagtctcaaactcctgacctcaggtgatccacccacctcggcctcccaaagtgctaggattacaggcgtgaggcaccgtgcctggcgtcatcggtattatttaaatgaattatgttacgttcttttgtgctgtcttcaaaatctgttatatattttacacttacaccaaatctcaattaccatggtacatttttatctgaaatgcttgacctttattttgatttcataaaattcatagttggagaagtagattcacatatccaagttgttccaattatataatagttttccaaaaactgagatgggtgtccattttttttttaagtaaagatgcaggtctggttatgttgaccaagttgctgggttgttttgttttgttttgagacagagtctcactttgtcacccaggctggagtgcagtggcatgacctcagctcactgcaacctctgcctcccaggttcaactgattctcttgcatcatcctcctgagtagctgggactacaggtgtatgccaccatgcctggctaattttggtatttttctcagagacggggtttcaccatgttgggcatgctggtcttgaactgctgacctcaggtgatccgcccacctcggcctcccaaagtgctggtattacaggcatgggccaccacacctggcctcagctgttcaattaaaagtaaatacaacttaaaattctatgtttcattggcagtagtgcaacattaatactgagtagccacatgtgattagtggctatggtattggacagggaaggtacagaatacttccatcaacatagaaaattctatcagtctagctctaggggcagatagtccttccactgacttgggcaagtcactctacaaatggcatctacctcacatggttatggtgagaattcagcgtatgtatgtacatgcaggcacacaatatgcacacagacacataacatagtacaccctttcctgaaaagcctgacacatggagctcaaacatgagtgccacccacccctgggcagcaccaagatggctctagtctgggtgcctttgtctcacccccatgcctttgctcggagtgtgctcctcatttttctgccactttgaccctgtctctgatttggtcctgtctgacatcactgctatatgctttgctcctctcaatttcctctgccctcatgccagcaggagtcatgccagagatcatatctgagaaagcaagacaattttgtgtgtgtgtctgtgcccatagaggagtgctggttgtgttgatatagttgtagattggttgtgtttacacagttgtatatattgacacccttgagtgttatgacttcttttgggggtggtcgccttttaaatcataacttttaatgggattccattttagtctttgtgaagacataaggttgttggcaggcatctgtccctgggagcatccaagcagaaaagactaagactcccttgtagacagatcactggccgccactgaagtgtgtctgcatggcaccacagggctggaagacccttgaaggcaggaattcaaggaaatgtatgatgaattttggcattgccatcaaaagcagaacaggcatggaaaacttgggtgagtgggcgagacaacctcctcaccacagcagagttccatccatgcctggataatgatggagggatttgtgtccactgcagtggggaaccatgaaggacacatcaagggtgtggttggcctgtggtgctctttggaggaatgaataaaaatgaatagaaatcctattgcgtgtctgttcttttggagtttgagggaaaagaaagatccttgagattttgactgggctggaaacctagactccagcgtctggggataggagggatggtggggaatccgctgggaaaaactgggctgtgatcaagagaatttatcagtatctgagtttttccaccctggaaggagtgcgggcagacttactgtttaaacattgggagcttatgatggtaaagcgccttagttctggagccaggtatacccattaatgaccccaactgggccagcctttctgtagccatgcccttggattgttgctctccttctaggtttgactatgtggtttgcttcagccactagaacaatagcaaacatgatacaagcagaggcttggaaagtgcttatgcggccgggtgtggtggctcacacctataatcccagcactttgggaggccagggcgggcagatcacaaggtcaggagatcgagaccatcctggctaacacagtgaaaccccgtctctctactaaaaatacaaaaaattagctgggtgtggtggtgcacacctgtagtcccagctactcgggaggctgaggcaggagaatagcttgaacctgggaggcggaggttgtagtgagctgagactgcgccgctgcactccagcctgggcaacagagcgagacttctctcaaaaaaaaaaaaccaaagtgcttatgcactgggacttcctctcttgctccccttgggacccctaccaccactgccacatccaaaccccgggctggctgagcatggtggcatatgggtataaacccataatcccagcacttagggaggcaaaggtggaagaatttcatgagcccaggagatcgagactagcctgagcaacatggcaagacccccatctctacaaaaaagcaacaacaacagaattagccagatgtggtggtgtgcacctgtggtcccaactacatgggggaggctgaggcaagtggattgtttgagcccaggaagtcgaggctgaagtgagctatgatggctccactgcactccagcctgggtgacagagcaagacaatgtctaaaaaaataaaaagaaggaaagaaaaggaaaagatctgggctaacctgctgggtaataaagggaaaagagacacatggctccgtcatccttgatccctgccacccatagccaaccaacctctgaaacagagctccctagctgataggcagctgaacccagctgagaccagcaaaagaactgcccagctgatcccagaccaagttgcaacccagagaatcattaactaaataggtgattgttctaaaccactaaattttggagtggtttgttatgtagcaaaagcaactaatacagacttgttctctctgtgtgtgatgtggtctctttctccccaacaacatgacccaatgattaaaatcttaaattctgccactttttagctgtgtgactgccaatgtgacagccttctgagcctctgatgtctcctgaaaacagagatgtgaataatagtgcctatgacatagagttgtgaaaataaaatgaaaaacagcttctt

SEQ ID NO: 142014 - DNA, 564 bp, Homo sapiens
  Payload ID: 7925
  Gene Symbol: IRGQ
  Gene Name: immunity-related GTPase family, Q
  ENST ID: ENST00000598324
  CDS Start-End: 157-564
caggttaaagctaccgggacgggtcccggcatctctaaatcaccgctccctggcctcttcggcctccgtccgccgcggcccaggggccgggcttctcagctgctgacctactgccaccgactgcgctctctcccgtgggtcggctttttgctcgccatgcctccgccgcagggtgacgtgaccgccttgttcctggggcctccgggcttggggaagtccgcgctgatcgcagcgctgtgcgacaaggatgtggagacgctcgaggcccccgagggacggccggactccggggttcccagcctaagagctgcgggcccaggcctttttctgggcgagctgagctgcccacccgcagcgccggggccctgggcggcggaagccaacgtgctggtactggtgctgcccggacccgaggggaacggggaaccgttggctccagccctgggagaggcagcgctggccgccctggcccgagggaccccgctactggctgtgcggaacctccgtcctggggattcacagactgccgcccaggcccgtgatcagacagcagctctgctgaac

SEQ ID NO: 142015 - DNA, 2210 bp, Homo sapiens
  Payload ID: 7925
  Gene Symbol: IRGQ
  Gene Name: immunity-related GTPase family, Q
  Uniprot ID: Q8WZA9
  ENST ID: ENST00000602269
  CDS Start-End: 187-2058
aggacgcctgggattctgggggaatagggtctgggctctggattttttaggtcctggagagtgacactcaagaaccgaaggggacagggtgaaggactgaggcctgggttccgagtggggcggctaggaaaggaaaaggctaggtgctccctgacccaggtcttctctacccgttgctttccagccatgcctccgccgcagggtgacgtgaccgccttgttcctggggcctccgggcttggggaagtccgcgctgatcgcagcgctgtgcgacaaggatgtggagacgctcgaggcccccgagggacggccggactccggggttcccagcctaagagctgcgggcccaggcctttttctgggcgagctgagctgcccacccgcagcgccggggccctgggcggcggaagccaacgtgctggtactggtgctgcccggacccgaggggaacggggaaccgttggctccagccctgggagaggcagcgctggccgccctggcccgagggaccccgctactggctgtgcggaacctccgtcctggggattcacagactgccgcccaggcccgtgatcagacagcagctctgctgaacagcgcggggttaggagctgcggatctgtttgtgctaccggcgaactgcggcagcagcgacggctgcgaggagctagagcgcctccgggcggcgctgcagagccaggcagaagcgctgcggaggctcctgccaccggcgcaggatggcttcgaggtgttgggtgcagcagagctagaggctgtgcgtgaggcctttgagaccggcggccttgaggctgcgctgtcgtgggtgcgctcaggcctggagcgcctgggcagcgcacggctagacctggccgtggctggcaaggctgacgtgggccttgtggtggacatgctgcttggattggatcctggcgacccaggcgctgcgcctgcttcggtccccacagcacccactcccttcccagccccagagcgcccgaatgtggtgctctggaccgtgcctctgggccacacgggcactgccaccaccgcggccgccgcctctcacccaacgcactacgacgccctcatcctcgtcacccctggggcccccactgagaaggactgggcccaggtccaggccttgctgctaccagatgcgcctcttgtctgcgtgcgcacagacggcgagggcgaggatccggagtgtctgggagaaggcaagatggagaatcccaagggcgagagcttaaagaacgcaggtggagggggattggagaatgcactcagtaagggaagggagaaatgtagcgctggatcgcagaaagcaggcagcggggaaggtcctgggaaagctggcagcgagggtttgcagcaggttgtcggcatgaagaaatcaggtggtggcgactcagagcgggccgctgcgttaagcccggaggacgagacgtgggaggtgctggaggaggcgccgccgccagtgttccccctacggcctggcggactcccagggctatgcgaatggctgcggcgagcgctccccccagcccaggcaggggcactgctgctggcgttgccaccagcatctcccagcgctgcccgaaccaaggctgcggcgttgcgagccggggcgtggaggccagctctgctggctagtctggcggcggcggcggcaccactcccagggctgggctgggcatgcgacgtggcacttctgcggggtcagctggcggagtggcgacggggcctggggctggaacccacggcactggctcgacgtgagcgtgccctgggcctggcttctggagagctggcagcgcgcgctcatttcccaggcccggtgacgcgcgccgaggtggaagcaagactgggcgcctgggcgggcgagggcactgctgggggcgcagcactgggggctctctccttcctgtggcctgcgggtggtgcagcggcgacaggtggcctgggctaccgagcggctcacggcgtcctgctgcaggctctcgatgagatgcgggctgatgctgaggctgtgctggcaccccctgagcctgcccagtgaggagtgggagggggcttgggagtccagactctgacaggggatgcctgggcttaatcctgggtgcttgaaggggatgtggactcttgacttccagctgggatgtgtgacttcttatcacctggattcagagagtctgggggacaggaatcctg

SEQ ID NO: 142016 - DNA, 1943 bp, Homo sapiens
  Payload ID: 7926
  Gene Symbol: IGSF21
  Gene Name: immunoglobin superfamily, member 21
  Uniprot ID: Q96ID5
  ENST ID: ENST00000251296
  CDS Start-End: 384-1787
aggaggggggtgctcgcgccgccgggagaggcgagcgcgaggcagagagcgcgattcggctccaaactccggcgctgcagccgatcggactctgggccgcggtgggcaccgcgcgcagctagggagccgagaaccgcggcgagccccgaggacgcccagagcgcgagggtcgctgcgcctcgcagagccggagccgagtcgagccgggcgcccgggctgcctggccgcggcggcatgggggcgcccccgcggctctccgcgctgcccgccaccgcctcggccagtggccggaggcaggagcgcgtctgagcccatggcgaggggacccgccgccaccgcctccacccccgccgccccgccaccgccgccagctcccgggcaccatgcgaaccgccccgagcctccgccgctgcgtctgcctgctgctcgccgcgatcctggacctggcgcgcggctacctgacagtcaacattgagcctctcccccctgtggtggctggagacgccgtgactttgaagtgtaacttcaagacagatgggcgcatgcgggagatcgtgtggtaccgggtgacggatggtggcaccatcaagcaaaagatcttcaccttcgacgccatgttctccaccaactactcacacatggagaactaccgcaagcgagaggacctggtgtaccagtccactgtgaggctgcccgaggtccggatctcagacaatggtccctatgagtgccatgtgggcatctacgaccgcgccaccagggagaaggtggtcctggcatcaggcaacatcttcctcaacgtcatggctcctcccacctccattgaagtggtggctgctgacacaccagcccccttcagccgctaccaagcccagaacttcacgctggtctgcatcgtgtctggaggaaaaccagcacccatggtttatttcaaacgagatggggaaccaatcgacgcagtgcccctatcagagccaccagctgcgagctccggccccctacaggacagcaggcccttccgcagccttctgcaccgtgacctggatgacaccaagatgcagaagtcactgtccctcctggacgccgagaaccggggtgggcgaccctacacggagcgcccctcccgtggcctgaccccagatcccaacatcctcctccagccaaccacagagaacataccagagacggtcgtgagccgtgagtttccccgctgggtccacagcgccgagcccacctacttcctgcgccacagccgcaccccgagcagtgacggcactgtggaagtacgtgccctgctcacctggaccctcaacccacagatcgacaacgaggccctcttcagctgcgaggtcaagcacccagctctgtcgatgcccatgcaggcagaggtcacgctggttgcccccaaaggacccaaaattgtgatgacgcccagcagagcccgggtaggggacacagtgaggattctggtccatgggtttcagaacgaagtcttcccggagcccatgttcacgtggacgcgggttgggagccgcctcctggacggcagcgctgagttcgacgggaaggagctggtgctggagcgggttcccgccgagctcaatggctccatgtatcgctgcaccgcccagaacccactgggctccaccgacacgcacacccggctcatcgtgtttgaaaacccaaatatcccaagaggaacggaggactctaatggttccattggccccactggtgcccggctcaccttggtgctcgccctgacagtgattctggagctgacgtgaaggcacccgccccggccactccatcaggcactgacatctccacgaccggttttcatttcttttctaaactatttccagtcttgttcttagtctctttccatctgtgtcttggcttcttcagtcggtttaattaaaacaaacagaacaattttcccc

SEQ ID NO: 142017 - DNA, 1666 bp, Homo sapiens
  Payload ID: 7927
  Gene Symbol: IGBP1
  Gene Name: immunoglobulin (CD79A) binding protein 1
  Uniprot ID: P78318
  ENST ID: ENST00000356413
  CDS Start-End: 304-1323
cgaccggatcttcaaaccgtgggagtggtgcggcggctagagtccctggactcctcaacctagggagctactcgcgagatgcctacgacttgtaacgggctgcctggtaaaatgagtctatggaaacggttgccagggccggctaacagcggctcccggaagtcctttgatgctttgttaacagtgaagctactggaccaatgaggtgcttcttccggttttgtccgcgctcgcctaattcttctttatcaaggttgcctttgaccccggaaaagagatcttccgggttcctctctccccaagatggctgctgaggacgagttacagctgccgcggctccccgagctgttcgaaactggtagacagttactggacgaagtagaagtggcgactgaacccgccggttcccggatagtccaggagaaggtgttcaagggcttggacctccttgagaaggctgccgaaatgttatcgcagctcgacttgttcagccgaaatgaagatttggaagagattgcttccaccgacctgaagtaccttttggtgccagcgtttcaaggagccctcaccatgaaacaagtcaaccccagcaagcgtctagatcatttgcagcgggctcgagaacactttataaactacttaactcagtgccattgctatcatgtggcagagtttgagctgcccaaaaccatgaacaactctgctgaaaatcacactgccaattcctccatggcttatcctagtctcgttgctatggcatctcaaagacaggctaaaatacagagatacaagcagaagaaggagttggagcataggttgtctgcaatgaaatctgctgtggaaagtggtcaagcagatgatgagcgtgttcgtgaatattatcttcttcaccttcagaggtggattgatatcagcttagaagagattgagagcattgaccaggaaataaagatcctgagagaaagagactcttcaagagaggcatcaacttctaactcatctcgccaggagaggcctccagtgaaacccttcattctcactcggaacatggctcaagccaaagtatttggagctggttatccaagtctgccaactatgacggtgagtgactggtatgagcaacatcggaaatatggagcattaccggatcagggaatagccaaggcagcaccagaggaattcagaaaagcagctcagcaacaggaagaacaagaagaaaaggaggaagaggatgatgaacaaacactccacagagcccgggagtgggatgactggaaggacacccatcctaggggctatgggaaccgacagaacatgggctgatcttcccacaacaccacaggactgcagggtgcacaactcccctgccaaggaaaaccatgcagtcctcccctccctggtctcctgcttcagctctgtacaacgagggcaaagatgctaaatcttgctttgcattcagtaaagtgtcaagtgattaagtgtgtatttgtaccctagatgatatgaaccagcagtcttgttttggcatcatcctcatcatgttgtattccagcttcttaagtggaaggaaaagagtgctgagaaatggctctgtataatctatggctatccgaattctctgaaaaaataataaaagtcccctctattatatgagcctgtacagaaa

SEQ ID NO: 142018 - DNA, 1862 bp, Homo sapiens
  Payload ID: 7927
  Gene Symbol: IGBP1
  Gene Name: immunoglobulin (CD79A) binding protein 1
  Uniprot ID: P78318
  ENST ID: ENST00000342206
  CDS Start-End: 500-1519
acttcgcgctcaagcgaccggatcttcaaaccgtgggagtggtgcggcggctagagtccctggactcctcaacctagggagctactcgcgaggtaaggggcgcgccagactggctcctaaaacgcactcgctcgtccgcactcctcgcgctccgaattcagcctcgcctcacccgggcttcagagcccacagaacttctcagccccgtgtcggcgacgaggagctcatggtaaaacagcgcctagggttttgcttgtttgtttgcttttaacagatgcctacgacttgtaacgggctgcctggtaaaatgagtctatggaaacggttgccagggccggctaacagcggctcccggaagtcctttgatgctttgttaacagtgaagctactggaccaatgaggtgcttcttccggttttgtccgcgctcgcctaattcttctttatcaaggttgcctttgaccccggaaaagagatcttccgggttcctctctccccaagatggctgctgaggacgagttacagctgccgcggctccccgagctgttcgaaactggtagacagttactggacgaagtagaagtggcgactgaacccgccggttcccggatagtccaggagaaggtgttcaagggcttggacctccttgagaaggctgccgaaatgttatcgcagctcgacttgttcagccgaaatgaagatttggaagagattgcttccaccgacctgaagtaccttttggtgccagcgtttcaaggagccctcaccatgaaacaagtcaaccccagcaagcgtctagatcatttgcagcgggctcgagaacactttataaactacttaactcagtgccattgctatcatgtggcagagtttgagctgcccaaaaccatgaacaactctgctgaaaatcacactgccaattcctccatggcttatcctagtctcgttgctatggcatctcaaagacaggctaaaatacagagatacaagcagaagaaggagttggagcataggttgtctgcaatgaaatctgctgtggaaagtggtcaagcagatgatgagcgtgttcgtgaatattatcttcttcaccttcagaggtggattgatatcagcttagaagagattgagagcattgaccaggaaataaagatcctgagagaaagagactcttcaagagaggcatcaacttctaactcatctcgccaggagaggcctccagtgaaacccttcattctcactcggaacatggctcaagccaaagtatttggagctggttatccaagtctgccaactatgacggtgagtgactggtatgagcaacatcggaaatatggagcattaccggatcagggaatagccaaggcagcaccagaggaattcagaaaagcagctcagcaacaggaagaacaagaagaaaaggaggaagaggatgatgaacaaacactccacagagcccgggagtgggatgactggaaggacacccatcctaggggctatgggaaccgacagaacatgggctgatcttcccacaacaccacaggactgcagggtgcacaactcccctgccaaggaaaaccatgcagtcctcccctccctggtctcctgcttcagctctgtacaacgagggcaaagatgctaaatcttgctttgcattcagtaaagtgtcaagtgattaagtgtgtatttgtaccctagatgatatgaaccagcagtcttgttttggcatcatcctcatcatgttgtattccagcttcttaagtggaaggaaaagagtgctgagaaatggctctgtataatctatggctatccgaattctctgaaaaaataataaaagtcccctctattatatgagcctgtacagaaa

SEQ ID NO: 142019 - DNA, 1112 bp, Homo sapiens
  Payload ID: 7928
  Gene Symbol: IGHA1
  Gene Name: immunoglobulin heavy constant alpha 1
  Uniprot ID: P01876
  ENST ID: ENST00000390547
  CDS Start-End: 1-1062
gcatccccgaccagccccaaggtcttcccgctgagcctctgcagcacccagccagatgggaacgtggtcatcgcctgcctggtccagggcttcttcccccaggagccactcagtgtgacctggagcgaaagcggacagggcgtgaccgccagaaacttcccacccagccaggatgcctccggggacctgtacaccacgagcagccagctgaccctgccggccacacagtgcctagccggcaagtccgtgacatgccacgtgaagcactacacgaatcccagccaggatgtgactgtgccctgcccagttccctcaactccacctaccccatctccctcaactccacctaccccatctccctcatgctgccacccccgactgtcactgcaccgaccggccctcgaggacctgctcttaggttcagaagcgaacctcacgtgcacactgaccggcctgagagatgcctcaggtgtcaccttcacctggacgccctcaagtgggaagagcgctgttcaaggaccacctgagcgtgacctctgtggctgctacagcgtgtccagtgtcctgccgggctgtgccgagccatggaaccatgggaagaccttcacttgcactgctgcctaccccgagtccaagaccccgctaaccgccaccctctcaaaatccggaaacacattccggcccgaggtccacctgctgccgccgccgtcggaggagctggccctgaacgagctggtgacgctgacgtgcctggcacgcggcttcagccccaaggatgtgctggttcgctggctgcaggggtcacaggagctgccccgcgagaagtacctgacttgggcatcccggcaggagcccagccagggcaccaccaccttcgctgtgaccagcatactgcgcgtggcagccgaggactggaagaagggggacaccttctcctgcatggtgggccacgaggccctgccgctggccttcacacagaagaccatcgaccgcttggcgggtaaacccacccatgtcaatgtgtctgttgtcatggcggaggtggacggcacctgctactgagccgcccgcctgtccccacccctgaataaactccatgctcccccaagcag

SEQ ID NO: 142020 - DNA, 1112 bp, Homo sapiens; identical to SEQ ID NO: 142019
  Payload ID: 7928
  Gene Symbol: IGHA1
  Gene Name: immunoglobulin heavy constant alpha 1
  Uniprot ID: P01876
  ENST ID: ENST00000633714
  CDS Start-End: 1-1062

SEQ ID NO: 142021 - DNA, 1071 bp, Homo sapiens
  Payload ID: 7929
  Gene Symbol: IGHA2
  Gene Name: immunoglobulin heavy constant alpha 2 (A2m marker)
  ENST ID: ENST00000390539
  CDS Start-End: 1-1023
gcatccccgaccagccccaaggtcttcccgctgagcctcgacagcaccccccaagatgggaacgtggtcgtcgcatgcctggtccagggcttcttcccccaggagccactcagtgtgacctggagcgaaagcggacagaacgtgaccgccagaaacttcccacctagccaggatgcctccggggacctgtacaccacgagcagccagctgaccctgccggccacacagtgcccagacggcaagtccgtgacatgccacgtgaagcactacacgaattccagccaggatgtgactgtgccctgccgagttcccccacctcccccatgctgccacccccgactgtcgctgcaccgaccggccctcgaggacctgctcttaggttcagaagcgaacctcacgtgcacactgaccggcctgagagatgcctctggtgccaccttcacctggacgccctcaagtgggaagagcgctgttcaaggaccacctgagcgtgacctctgtggctgctacagcgtgtccagtgtcctgcctggctgtgcccagccatggaaccatggggagaccttcacctgcactgctgcccaccccgagttgaagaccccactaaccgccaacatcacaaaatccggaaacacattccggcccgaggtccacctgctgccgccgccgtcggaggagctggccctgaacgagctggtgacgctgacgtgcctggcacgtggcttcagccccaaggatgtgctggttcgctggctgcaggggtcacaggagctgccccgcgagaagtacctgacttgggcatcccggcaggagcccagccagggcaccaccacctacgctgtaaccagcatactgcgcgtggcagctgaggactggaagaagggggagaccttctcctgcatggtgggccacgaggccctgccgctggccttcacacagaagaccatcgaccgcatggcgggtaaacccacccacatcaatgtgtctgttgtcatggcggaggcggatggcacctgctactgagccgcccgcctgtccccacccctgaataaactccatgctcccccaagc

SEQ ID NO: 142022 - DNA, 1071 bp, Homo sapiens
  Payload ID: 7929
  Gene Symbol: IGHA2
  Gene Name: immunoglobulin heavy constant alpha 2 (A2m marker)
  ENST ID: ENST00000622473
  CDS Start-End: 1-1023
gcatccccgaccagccccaaggtcttcccgctgagcctcgacagcaccccccaagatgggaacgtggtcgtcgcatgcctggtccagggcttcttcccccaggagccactcagtgtgacctggagcgaaagcggacagaacgtgaccgccagaaacttcccacctagccaggatgcctccggggacctgtacaccacgagcagccagctgaccctgccggccacacagtgcccagacggcaagtccgtgacatgccacgtgaagcactacacgaatcccagccaggatgtgactgtgccctgcccagttcccccacctcccccatgctgccacccccgactgtcgctgcaccgaccggccctcgaggacctgctcttaggttcagaagcgaacctcacgtgcacactgaccggcctgagagatgcctctggtgccaccttcacctggacgccctcaagtgggaagagcgctgttcaaggaccacctgagcgtgacctctgtggctgctacagcgtgtccagtgtcctgcctggctgtgcccagccatggaaccatggggagaccttcacctgcactgctgcccaccccgagttgaagaccccactaaccgccaacatcacaaaatccggaaacacattccggcccgaggtccacctgctgccgccgccgtcggaggagctggccctgaacgagctggtgacgctgacgtgcctggcacgtggcttcagccccaaggatgtgctggttcgctggctgcaggggtcacaggagctgccccgcgagaagtacctgacttgggcatcccggcaggagcccagccagggcaccaccaccttcgctgtgaccagcatactgcgcgtggcagccgaggactggaagaagggggacaccttctcctgcatggtgggccacgaggccctgccgctggccttcacacagaagaccatcgaccgcttggcgggtaaacccacccatgtcaatgtgtctgttgtcatggcggaggtggacggcacctgctactgagccgcccgcctgtccccacccctgaataaactccatgctcccccaagc

SEQ ID NO: 142023 - DNA, 1678 bp, Homo sapiens
  Payload ID: 7930
  Gene Symbol: IGHD
  Gene Name: immunoglobulin heavy constant delta
  ENST ID: ENST00000390556
  CDS Start-End: 1-1292
cacccaccaaggctccggatgtgttccccatcatatcagggtgcagacacccaaaggataacagccctgtggtcctggcatgcttgataactgggtaccacccaacgtccgtgactgtcacctggtacatggggacacagagccagccccagagaaccttccctgagatacaaagacgggacagctactacatgacaagcagccagctctccacccccctccagcagtggcgccaaggcgagtacaaatgcgtggtccagcacaccgccagcaagagtaagaaggagatcttccgctggccagagtctccaaaggcacaggcctcctcagtgcccactgcacaaccccaagcagagggcagcctcgccaaggcaaccacagccccagccaccacccgtaacacaggaagaggaggagaagagaagaagaaggagaaggagaaagaggaacaagaagagagagagacaaagacaccagagtgtccgagccacacccagcctcttggcgtctacctgctaacccctgcagtgcaggacctgtggctccgggacaaagccaccttcacctgcttcgtggtgggcagtgacctgaaggatgctcacctgacctgggaggtggctgggaaggtccccacagggggcgtggaggaagggctgctggagcggcacagcaacggctcccagagccagcacagccgtctgaccctgcccaggtccttgtggaacgcggggacctccgtcacctgcacactgaaccatcccagcctcccaccccagaggttgatggcgctgagagaacccgctgcgcaggcacccgtcaagctttccctgaacctgctggcctcgtctgaccctcccgaggcggcctcgtggctcctgtgtgaggtgtctggcttctcgccccccaacatcctcctgatgtggctggaggaccagcgtgaggtgaacacttctgggtttgcccccgcacgcccccctccacagcccaggagcaccacgttctgggcctggagtgtgctgcgtgtcccagccccgcccagccctcagccagccacctacacgtgtgtggtcagccacgaggactcccggactctgctcaacgccagccggagcctagaagtcagctacctggccatgacccccctgatccctcagagcaaggatgagaacagcgatgactacacgacctttgatgatgtgggcagcctgtggaccaccctgtccacgtttgtggccctcttcatcctcaccctcctctacagcggcattgtcactttcatcaaggtgaagtagccccagaagagcaggacgccctgtacctgcagagaagggaagcagcctctgtacctcatctgtggctaccagagagcagaaaggacccaccctggactcttctgtgtgcaggaagatgcgccagcccctgcccccggctcccctctgtccgccacagaacccagtcttctagaccagggggacgggcacccatcactccgcaggcgaatcagagcccccctgccccggccctaacccctgtgcctccttcccatgcttccccgagagccagctacacccctgccccggccctaacccccatgcctccttcctgtgcttcccccagagccagctagtcccacctgcagcccgctggcctccccataaacacactttggttcatttca

SEQ ID NO: 142024 - DNA, 1155 bp, Homo sapiens
  Payload ID: 7930
  Gene Symbol: IGHD
  Gene Name: immunoglobulin heavy constant delta
  ENST ID: ENST00000612319
  CDS Start-End: 1-1155
gcacccaccaaggctccggatgtgttccccatcatatcagggtgcagacacccaaaggataacagccctgtggtcctggcatgcttgataactgggtaccacccaacgtccgtgactgtcacctggtacatggggacacagagccagccccagagaaccttccctgagatacaaagacgggacagctactacatgacaagcagccagctctccacccccctccagcagtggcgccaaggcgagtacaaatgcgtggtccagcacaccgccagcaagagtaagaaggagatcttccgctggccagagtctccaaaggcacaggcctcctcagtgcccactgcacaaccccaagcagagggcagcctcgccaaggcaaccacagccccagccaccacccgtaacacaggaagaggaggagaagagaagaagaaggagaaggagaaagaggaacaagaagagagagagacaaagacaccagagtgtccgagccacacccagcctcttggcgtctacctgctaacccctgcagtgcaggacctgtggctccgggacaaagccaccttcacctgcttcgtggtgggcagtgacctgaaggatgctcacctgacctgggaggtggctgggaaggtccccacagggggcgtggaggaagggctgctggagcggcacagcaacggctcccagagccagcacagccgtctgaccctgcccaggtccttgtggaacgcggggacctccgtcacctgcacactgaaccatcccagcctcccaccccagaggttgatggcgctgagagaacccgctgcgcaggcacccgtcaagctttccctgaacctgctggcctcgtctgaccctcccgaggcggcctcgtggctcctgtgtgaggtgtctggcttctcgccccccaacatcctcctgatgtggctggaggaccagcgtgaggtgaacacttctgggtttgcccccgcacgcccccctccacagcccaggagcaccacgttctgggcctggagtgtgctgcgtgtcccagccccgcccagccctcagccagccacctacacgtgtgtggtcagccacgaggactcccggactctgctcaacgccagccggagcctagaagtcagctatgtaacagaccatggccccatgaaatga

SEQ ID NO: 142025 - DNA, 1155 bp, Homo sapiens; identical to SEQ ID NO: 142024
  Payload ID: 7930
  Gene Symbol: IGHD
  Gene Name: immunoglobulin heavy constant delta
  ENST ID: ENST00000613640
  CDS Start-End: 1-1155

SEQ ID NO: 142026 - DNA, 1678 bp, Homo sapiens; identical to SEQ ID NO: 142023
  Payload ID: 7930
  Gene Symbol: IGHD
  Gene Name: immunoglobulin heavy constant delta
  ENST ID: ENST00000633698
  CDS Start-End: 1-1292

SEQ ID NO: 142027 - DNA, 1412 bp, Homo sapiens
  Payload ID: 7931
  Gene Symbol: IGHE
  Gene Name: immunoglobulin heavy constant epsilon
  Uniprot ID: P01854
  ENST ID: ENST00000390541
  CDS Start-End: 1-1287
gcctccacacagagcccatccgtcttccccttgacccgctgctgcaaaaacattccctccaatgccacctccgtgactctgggctgcctggccacgggctacttcccggagccggtgatggtgacctgggacacaggctccctcaacgggacaactatgaccttaccagccaccaccctcacgctctctggtcactatgccaccatcagcttgctgaccgtctcgggtgcgtgggccaagcagatgttcacctgccgtgtggcacacactccatcgtccacagactgggtcgacaacaaaaccttcagcgtctgctccagggacttcaccccgcccaccgtgaagatcttacagtcgtcctgcgacggcggcgggcacttccccccgaccatccagctcctgtgcctcgtctctgggtacaccccagggactatcaacatcacctggctggaggacgggcaggtcatggacgtggacttgtccaccgcctctaccacgcaggagggtgagctggcctccacacaaagcgagctcaccctcagccagaagcactggctgtcagaccgcacctacacctgccaggtcacctatcaaggtcacacctttgaggacagcaccaagaagtgtgcagattccaacccgagaggggtgagcgcctacctaagccggcccagcccgttcgacctgttcatccgcaagtcgcccacgatcacctgtctggtggtggacctggcacccagcaaggggaccgtgaacctgacctggtcccgggccagtgggaagcctgtgaaccactccaccagaaaggaggagaagcagcgcaatggcacgttaaccgtcacgtccaccctgccggtgggcacccgagactggatcgagggggagacctaccagtgcagggtgacccacccccacctgcccagggccctcatgcggtccacgaccaagaccagcggcccgcgtgctgccccggaagtctatgcgtttgcgacgccggagtggccggggagccgggacaagcgcaccctcgcctgcctgatccagaacttcatgcctgaggacatctcggtgcagtggctgcacaacgaggtgcagctcccggacgcccggcacagcacgacgcagccccgcaagaccaagggctccggcttcttcgtcttcagccgcctggaggtgaccagggccgaatgggagcagaaagatgagttcatctgccgtgcagtccatgaggcagcaagcccctcacagaccgtccagcgagcggtgtctgtaaatcccggtaaatgacgtactcctgcctccctccctcccagggctccatccagctgtgcagtggggaggactggccagaccttctgtccactgttgcaatgaccccaggaagctacccccaataaactgtgcctgctcag

SEQ ID NO: 142028 - DNA, 1412 bp, Homo sapiens
  Payload ID: 7931
  Gene Symbol: IGHE
  Gene Name: immunoglobulin heavy constant epsilon
  Uniprot ID: P01854
  ENST ID: ENST00000610670
  CDS Start-End: 1-1287
gcctccacacagagcccatccgtcttccccttgacccgctgctgcaaaaacattccctccaatgccacctccgtgactctgggctgcctggccacgggctacttcccggagccggtgatggtgacctgggacacaggctccctcaacgggacaactatgaccttaccagccaccaccctcacgctctctggtcactatgccaccatcagcttgctgaccgtctcgggtgcgtgggccaagcagatgttcacctgccgtgtggcacacactccatcgtccacagactgggtcgacaacaaaaccttcagcgtctgctccagggacttcaccccgcccaccgtgaagatcttacagtcgtcctgcgacggcggcgggcacttccccccgaccatccagctcctgtgcctcgtctctgggtacaccccagggactatcaacatcacctggctggaggacgggcaggtcatggacgtggacttgtccaccgcctctaccacgcaggagggtgagctggcctccacacaaagcgagctcaccctcagccagaagcactggctgtcagaccgcacctacacctgccaggtcacctatcaaggtcacacctttgaggacagcaccaagaagtgtgcagattccaacccgagaggggtgagcgcctacctaagccggcccagcccgttcgacctgttcatccgcaagtcgcccacgatcacctgtctggtggtggacctggcacccagcaaggggaccgtgaacctgacctggtcccgggccagtgggaagcctgtgaaccactccaccagaaaggaggagaagcagcgcaatggcacgttaaccgtcacgtccaccctgccggtgggcacccgagactggatcgagggggagacctaccagtgcagggtgacccacccccacctgcccagggccctcatgcggtccacgaccaagaccagcggcccgcgtgctgccccggaagtctatgcgtttgcgacgccggagtggccggggagccgggacaagcgcaccctcgcctgcctgatccagaacttcatgcctgaggacatctcggtgcagtggctgcacaacgaggtgcagctcccggacgcccggcacagcacgacgcagccccgcaagaccaagggctccggcttcttcgtcttcagccgcctggaggtgaccagggccgaatgggagcagaaagatgagttcatctgccgtgcagtccatgaggcagcgagcccctcacagaccgtccagcgagcggtgtctgtaaatcccggtaaatgacgtactcctgcctccctccctcccagggctccatccagctgtgcagtggggaggactggccagaccttctgtccactgttgcaatgaccccaggaagctacccccaataaactgtgcctgctcag

SEQ ID NO: 142029 - DNA, 1022 bp, Homo sapiens
  Payload ID: 7932
  Gene Symbol: IGHG1
  Gene Name: immunoglobulin heavy constant gamma 1 (G1m marker)
  ENST ID: ENST00000390542
  CDS Start-End: 1-888
gcctccaccaagggcccatcggtcttccccctggcaccctcctccaagagcacctctgggggcacagcagccctgggctgcctggtcaaggactacttccccgaaccggtgacggtgtcgtggaactcaggcgccctgaccagcggcgtgcacaccttcccggctgtcctacagtcctcaggactctactccctcagcagcgtggtgaccgtgccctccagcagcttgggcacccagacctacatctgcaacgtgaatcacaagcccagcaacaccaaggtggacaagaaagttgagcccaaatcttgtgacaaaactcacacatgcccaccgtgcccagcacctgaactcctggggggaccgtcagtcttcctcttccccccaaaacccaaggacaccctcatgatctcccggacccctgaggtcacatgcgtggtggtggacgtgagccacgaagaccctgaggtcaagttcaactggtacgtggacggcgtggagtacaagtgcaaggtctccaacaaagccctcccagcccccatcgagaaaaccatctccaaagccaaagggcagccccgagaaccacaggtgtacaccctgcccccatcccgggatgagctgaccaagaaccaggtcagcctgacctgcctggtcaaaggcttctatcccagcgacatcgccgtggagtgggagagcaatgggcagccggagaacaactacaagaccacgcctcccgtgctggactccgacggctccttcttcctctacagcaagctcaccgtggacaagagcaggtggcagcaggggaacgtcttctcatgctccgtgatgcatgaggctctgcacaaccactacacacagaagagcctctccctgtctccgggtaaatgagtgccacggccggcaagcccccgctccccaggctctcggggtcgcgcgaggatgcttggcacgtaccccgtgtacatacttcccaggcacccagcatggaaataaagcacccagcgcttccctgggcccctgcg

SEQ ID NO: 142030 - DNA, 2619 bp, Homo sapiens
  Payload ID: 7932
  Gene Symbol: IGHG1
  Gene Name: immunoglobulin heavy constant gamma 1 (G1m marker)
  ENST ID: ENST00000390548
  CDS Start-End: 1-1200
gcctccaccaagggcccatcggtcttccccctggcaccctcctccaagagcacctctgggggcacagcagccctgggctgcctggtcaaggactacttccccgaaccggtgacggtgtcgtggaactcaggcgccctgaccagcggcgtgcacaccttcccggctgtcctacagtcctcaggactctactccctcagcagcgtggtgaccgtgccctccagcagcttgggcacccagacctacatctgcaacgtgaatcacaagcccagcaacaccaaggtggacaagaaagttgagcccaaatcttgtgacaaaactcacacatgcccaccgtgcccagcacctgaactcctggggggaccgtcagtcttcctcttccccccaaaacccaaggacaccctcatgatctcccggacccctgaggtcacatgcgtggtggtggacgtgagccacgaagaccctgaggtcaagttcaactggtacgtggacggcgtggaggtgcataatgccaagacaaagccgcgggaggagcagtacaacagcacgtaccgtgtggtcagcgtcctcaccgtcctgcaccaggactggctgaatggcaaggagtacaagtgcaaggtctccaacaaagccctcccagcccccatcgagaaaaccatctccaaagccaaagggcagccccgagaaccacaggtgtacaccctgcccccatcccgggatgagctgaccaagaaccaggtcagcctgacctgcctggtcaaaggcttctatcccagcgacatcgccgtggagtgggagagcaatgggcagccggagaacaactacaagaccacgcctcccgtgctggactccgacggctccttcttcctctacagcaagctcaccgtggacaagagcaggtggcagcaggggaacgtcttctcatgctccgtgatgcatgaggctctgcacaaccactacacacagaagagcctctccctgtctccggagctgcaactggaggagagctgtgcggaggcgcaggacggggagctggacgggctgtggacgaccatcaccatcttcatcacactcttcctgttaagcgtgtgctacagtgccaccgtcaccttcttcaaggtgaagtggatcttctcctcggtggtggacctgaagcagaccatcatccccgactacaggaacatgatcggacagggggcctagggccaccctctgcggggtgtccagggccgcccagaccccacacaccagccatgggccatgctcagccaccacccaggccacacctgcccccgacctcaccgccctcaaccccatgactctctggcctcgcagttgccctctgaccctgacacacctgacacgccccccttccagaccctgtgcatagcaggtctaccccagacctccgctgcttggtgcatgcagggcactgggggccaggtgtcccctcagcaggacgtccttgccctccggaccacaaggtgctcacacaaaaggaggcagtgaccggtatcccaggcccccacccaggcaggacctcgccctggagccaaccccgtccacgccagcctcctgaacacaggcgtggtttccagatggtgagtgggagcgtcagccgccaaggtagggaagccacagcaccatcaggccctgttggggaggcttccgagagctgcgaaggctcactcagacggccttcctcccagcccgcagccagccagcctccattccgggcactcccgtgaactcctgacatgaggaatgaggttgttctgatttcaagcaaagaacgctgctctctggctcctgggaacagtctcagtgccagcaccaccccttggctgcctgcccacactgctggattctcgggtggaactggacccgcagggacagccagccccagagtccgcactggggagagaaggggccaggcccaggacactgccacctcccacccactccagtccaccgagatcactcagagaagagcctgggccatgtggccgctgcaggagccccacagtgcaagggtgaggatagcccaaggaagggctgggcatctgcccagacaggcctcccagagaaggctggtgaccaggtcccaggcgggcaagactcagccttggtggggcctgaggacagaggaggcccaggagcatcggggagagaggtggagggacaccgggagagccaggagcgtggacacagccagaactcatcacagaggctggcgtccagccccgggtcacgtgcagcaggaacaagcagccactctgggggcaccaggtggagaggcaagacgacaaagagggtgcccgtgttcttgcgaaagcagggctgctggccacgagtgctggacagaggcccccacgctctgctgcccccatcacgccgttccgtgactgtcacgcagaatctgcagacaggaagggagactcgagcgggagtgcggccagcgcctgcctcggccgtcagggaggactcctgggctcactcgaaggaggtgccaccatttcagctttggtagcttttcttcttcttttaaattttctaaagctcattaattgtctttgatgtttcttttgtgatgacaataaaatatcctttttaagtcttgta

SEQ ID NO: 142031 - DNA, 1128 bp, Homo sapiens
  Payload ID: 7932
  Gene Symbol: IGHG1
  Gene Name: immunoglobulin heavy constant gamma 1 (G1m marker)
  Uniprot ID: P01857
  ENST ID: ENST00000390549
  CDS Start-End: 1-993
gcctccaccaagggcccatcggtcttccccctggcaccctcctccaagagcacctctgggggcacagcagccctgggctgcctggtcaaggactacttccccgaaccggtgacggtgtcgtggaactcaggcgccctgaccagcggcgtgcacaccttcccggctgtcctacagtcctcaggactctactccctcagcagcgtggtgaccgtgccctccagcagcttgggcacccagacctacatctgcaacgtgaatcacaagcccagcaacaccaaggtggacaagaaagttgagcccaaatcttgtgacaaaactcacacatgcccaccgtgcccagcacctgaactcctggggggaccgtcagtcttcctcttccccccaaaacccaaggacaccctcatgatctcccggacccctgaggtcacatgcgtggtggtggacgtgagccacgaagaccctgaggtcaagttcaactggtacgtggacggcgtggaggtgcataatgccaagacaaagccgcgggaggagcagtacaacagcacgtaccgtgtggtcagcgtcctcaccgtcctgcaccaggactggctgaatggcaaggagtacaagtgcaaggtctccaacaaagccctcccagcccccatcgagaaaaccatctccaaagccaaagggcagccccgagaaccacaggtgtacaccctgcccccatcccgggatgagctgaccaagaaccaggtcagcctgacctgcctggtcaaaggcttctatcccagcgacatcgccgtggagtgggagagcaatgggcagccggagaacaactacaagaccacgcctcccgtgctggactccgacggctccttcttcctctacagcaagctcaccgtggacaagagcaggtggcagcaggggaacgtcttctcatgctccgtgatgcatgaggctctgcacaaccactacacacagaagagcctctccctgtctccgggtaaatgagtgccacggccggcaagcccccgctccccaggctctcggggtcgcgcgaggatgcttggcacgtaccccgtgtacatacttcccaggcacccagcatggaaataaagcacccagcgcttccctgggcccctgcga

SEQ ID NO: 142032 - DNA, 1543 bp, Homo sapiens
  Payload ID: 7932
  Gene Symbol: IGHG1
  Gene Name: immunoglobulin heavy constant gamma 1 (G1m marker)
  ENST ID: ENST00000617630
  CDS Start-End: 21-1409
tggacctcctgcacaagaacatgaaacacctgtggttcttcctcctcctggtggcagctcccagatgggtcctgtctcaggtgcagctgcaggagtcgggcccaggactggtgaagccttcggggaccctgtccctcacctgcgctgtctctggtggctccatcagcagtagtaactggtggagttgggtccgccagcccccagggaaggggctggagtggattggggaaatctatcatagtgggagcaccaactacaacccgtccctcaagagtcgagtcaccatatcagtagacaagtccaagaaccagttctccctgaagctgagctctgtgaccgccgcggacacggccgtgtcacaatgtgacaactggttcgacccctggggccagggaaccctggtcaccgtctcctcagcctccaccaagggcccatcggtcttccccctggcaccctcctccaagagcacctctgggggcacagcagccctgggctgcctggtcaaggactacttccccgaaccggtgacggtgtcgtggaactcaggcgccctgaccagcggcgtgcacaccttcccggctgtcctacagtcctcaggactctactccctcagcagcgtggtgaccgtgccctccagcagcttgggcacccagacctacatctgcaacgtgaatcacaagcccagcaacaccaaggtggacaagaaagttgagcccaaatcttgtgacaaaactcacacatgcccaccgtgcccagcacctgaactcctggggggaccgtcagtcttcctcttccccccaaaacccaaggacaccctcatgatctcccggacccctgaggtcacatgcgtggtggtggacgtgagccacgaagaccctgaggtcaagttcaactggtacgtggacggcgtggaggtgcataatgccaagacaaagccgcgggaggagcagtacaacagcacgtaccgtgtggtcagcgtcctcaccgtcctgcaccaggactggctgaatggcaaggagtacaagtgcaaggtctccaacaaagccctcccagcccccatcgagaaaaccatctccaaagccaaagggcagccccgagaaccacaggtgtacaccctgcccccatcccgggatgagctgaccaagaaccaggtcagcctgacctgcctggtcaaaggcttctatcccagcgacatcgccgtggagtgggagagcaatgggcagccggagaacaactacaagaccacgcctcccgtgctggactccgacggctccttcttcctctacagcaagctcaccgtggacaagagcaggtggcagcaggggaacgtcttctcatgctccgtgatgcatgaggctctgcacaaccactacacacagaagagcctctccctgtctccgggtaaatgagtgccacggccggcaagcccccgctccccaggctctcggggtcgcgcgaggatgcttggcacgtaccccgtgtacatacttcccaggcacccagcatggaaataaagcacccagcgcttccctgggcccctgcg

SEQ ID NO: 142033 - DNA, 1628 bp, Homo sapiens
  Payload ID: 7932
  Gene Symbol: IGHG1
  Gene Name: immunoglobulin heavy constant gamma 1 (G1m marker)
  ENST ID: ENST00000613158
  CDS Start-End: 81-1502
agctctgggagaggagccccagccctgagattcccacgtgtttccattcagtgatcagcactgaacacagaggactcgccatggagtttgggctgagctgggttttccttgttgctattttaaaaggtgtccagtgtgaggtgcagctggtggagtctgggggaggtgtggtacggcctggggggtccctgagactctcctttgcagcctctggattcacctttgatgattatggcatgagctgggtccgccaagctccagggaaggggctggagtgggtctctggtattaattggaatggtggtagcacagactatgtggactctgtgaagggccgattcaccatctccagagacaacgccaagaactcactgtatctgcaaatgaacagcctgagagccgaggacacggccgtgtattactgtgcgagagacacagtgaggggaagtcagtactactactactacatggacgtctggggcaaagggaccacggtcaccgtctcctcagcctccaccaagggcccatcggtcttccccctggcaccctcctccaagagcacctctgggggcacagcagccctgggctgcctggtcaaggactacttccccgaaccggtgacggtgtcgtggaactcaggcgccctgaccagcggcgtgcacaccttcccggctgtcctacagtcctcaggactctactccctcagcagcgtggtgaccgtgccctccagcagcttgggcacccagacctacatctgcaacgtgaatcacaagcccagcaacaccaaggtggacaagaaagttgagcccaaatcttgtgacaaaactcacacatgcccaccgtgcccagcacctgaactcctggggggaccgtcagtcttcctcttccccccaaaacccaaggacaccctcatgatctcccggacccctgaggtcacatgcgtggtggtggacgtgagccacgaagaccctgaggtcaagttcaactggtacgtggacggcgtggaggtgcataatgccaagacaaagccgcgggaggagcagtacaacagcacgtaccgtgtggtcagcgtcctcaccgtcctgcaccaggactggctgaatggcaaggagtacaagtgcaaggtctccaacaaagccctcccagcccccatcgagaaaaccatctccaaagccaaagggcagccccgagaaccacaggtgtacaccctgcccccatcccgggatgagctgaccaagaaccaggtcagcctgacctgcctggtcaaaggcttctatcccagcgacatcgccgtggagtgggagagcaatgggcagccggagaacaactacaagaccacgcctcccgtgctggactccgacggctccttcttcctctacagcaagctcaccgtggacaagagcaggtggcagcaggggaacgtcttctcatgctccgtgatgcatgaggctctgcacaaccactacacacagaagagcctctccctgtctccgggtaaatgagtgccacggccggcaagcccccgctccccaggctctcggggtcgcgcgaggatgcttggcacgtaccccgtgtacatacttcccaggcacccagcatggaaataaagcacccagcgcttccctggg

SEQ ID NO: 142034 - DNA, 1595 bp, Homo sapiens
  Payload ID: 7932
  Gene Symbol: IGHG1
  Gene Name: immunoglobulin heavy constant gamma 1 (G1m marker)
  ENST ID: ENST00000615782
  CDS Start-End: 68-1462
gagccccagccctgagattcccacgtgtttccattcagtgatcagcactgaacacagaggactcgccatggagtttgggctgagctgggttttccttgttgctattttaaaaggtgtccagtgtgaggtgcagctggtggagtctgggggaggcttggtccagcctggggggtccctgagactctcctgtgcagcctctggattcacctttagtagctattggatgagctgggtccgccaggctccagggaaggggctggagtgggtcccagttattagtggtagtggtagtaccatgtactacgcagactctgtgaagggccgattcaccatttccagagacaatacgaaaaactcactgtatctgcaaatgaacagactgagggcagaggatgcagctgcatatgactgtgagagatacgactactttgactactggggccagggaaccctggtcaccgtctcctcagcctccaccaagggcccatcggtcttccccctggcaccctcctccaagagcacctctgggggcacagcagccctgggctgcctggtcaaggactacttccccgaaccggtgacggtgtcgtggaactcaggcgccctgaccagcggcgtgcacaccttcccggctgtcctacagtcctcaggactctactccctcagcagcgtggtgaccgtgccctccagcagcttgggcacccagacctacatctgcaacgtgaatcacaagcccagcaacaccaaggtggacaagaaagttgagcccaaatcttgtgacaaaactcacacatgcccaccgtgcccagcacctgaactcctggggggaccgtcagtcttcctcttccccccaaaacccaaggacaccctcatgatctcccggacccctgaggtcacatgcgtggtggtggacgtgagccacgaagaccctgaggtcaagttcaactggtacgtggacggcgtggaggtgcataatgccaagacaaagccgcgggaggagcagtacaacagcacgtaccgtgtggtcagcgtcctcaccgtcctgcaccaggactggctgaatggcaaggagtacaagtgcaaggtctccaacaaagccctcccagcccccatcgagaaaaccatctccaaagccaaagggcagccccgagaaccacaggtgtacaccctgcccccatcccgggatgagctgaccaagaaccaggtcagcctgacctgcctggtcaaaggcttctatcccagcgacatcgccgtggagtgggagagcaatgggcagccggagaacaactacaagaccacgcctcccgtgctggactccgacggctccttcttcctctacagcaagctcaccgtggacaagagcaggtggcagcaggggaacgtcttctcatgctccgtgatgcatgaggctctgcacaaccactacacacagaagagcctctccctgtctccgggtaaatgagtgccacggccggcaagcccccgctccccaggctctcggggtcgcgcgaggatgcttggcacgtaccccgtgtacatacttcccaggcacccagcatggaaataaagcacccagcgcttccctgggcccctgc

SEQ ID NO: 142035 - DNA, 1428 bp, Homo sapiens
  Payload ID: 7932
  Gene Symbol: IGHG1
  Gene Name: immunoglobulin heavy constant gamma 1 (G1m marker)
  ENST ID: ENST00000618583
  CDS Start-End: 1-1428
atggactggacctggaggatcctctttttggtggcagcagccacaggagcccactcccaggtgcagctggtgcagtctggggctgaggtgaagaagcctggggcctcagtgaaggtctcctgcaaggcttctggatacaccttcaccggctactatatgcactgggtgcgacaggcccctggacaagggcttgagtggatgggatggatcaaccctaacagtggtggcacaaactatgcacagaagtttcagggctgggtcaccatgaccagggacacgtccatcagcacagcctacatggagctgagcaggctgagatctgacgacacggccgtgtattactgtgcgagagaggatggacattctgccattgattactactactactactacatggacgtctggggcaaagggaccacggtcaccgtctcctcagcctccaccaagggcccatcggtcttccccctggcaccctcctccaagagcacctctgggggcacagcagccctgggctgcctggtcaaggactacttccccgaaccggtgacggtgtcgtggaactcaggcgccctgaccagcggcgtgcacaccttcccggctgtcctacagtcctcaggactctactccctcagcagcgtggtgaccgtgccctccagcagcttgggcacccagacctacatctgcaacgtgaatcacaagcccagcaacaccaaggtggacaagaaagttgagcccaaatcttgtgacaaaactcacacatgcccaccgtgcccagcacctgaactcctggggggaccgtcagtcttcctcttccccccaaaacccaaggacaccctcatgatctcccggacccctgaggtcacatgcgtggtggtggacgtgagccacgaagaccctgaggtcaagttcaactggtacgtggacggcgtggaggtgcataatgccaagacaaagccgcgggaggagcagtacaacagcacgtaccgtgtggtcagcgtcctcaccgtcctgcaccaggactggctgaatggcaaggagtacaagtgcaaggtctccaacaaagccctcccagcccccatcgagaaaaccatctccaaagccaaagggcagccccgagaaccacaggtgtacaccctgcccccatcccgggatgagctgaccaagaaccaggtcagcctgacctgcctggtcaaaggcttctatcccagcgacatcgccgtggagtgggagagcaatgggcagccggagaacaactacaagaccacgcctcccgtgctggactccgacggctccttcttcctctacagcaagctcaccgtggacaagagcaggtggcagcaggggaacgtcttctcatgctccgtgatgcatgaggctctgcacaaccactacacacagaagagcctctccctgtctccgggtaaatga

SEQ ID NO: 142036 - DNA, 1597 bp, Homo sapiens
  Payload ID: 7932
  Gene Symbol: IGHG1
  Gene Name: immunoglobulin heavy constant gamma 1 (G1m marker)
  ENST ID: ENST00000616331
  CDS Start-End: 63-1463
cttagccctggactccaaggcctttccacttggtgatcagcactgagcacagaggactcaccatggagttggggctgagctgggttttccttgttgctattttagaaggtgtccagtgtgaggtgcagctggtggagtctgggggaggcttggtccagcctggggggtccctgagactctcctgtgcagcctctggattcacctttagtagctattggatgagctgggtccgccaggctccagggaaggggctggagtgggtggccaacataaagcaagatggaagtgagaaatactatgtggactctgtgaagggccgattcaccatctccagagacaacgccaagaactcactgtatctgcaaatgaacagcctgagagccgaggacacggccgtgtattactgtgcgagagaatgtgacaactggttcgacccctggggccagggaaccctggtcaccgtctcctcagcctccaccaagggcccatcggtcttccccctggcaccctcctccaagagcacctctgggggcacagcagccctgggctgcctggtcaaggactacttccccgaaccggtgacggtgtcgtggaactcaggcgccctgaccagcggcgtgcacaccttcccggctgtcctacagtcctcaggactctactccctcagcagcgtggtgaccgtgccctccagcagcttgggcacccagacctacatctgcaacgtgaatcacaagcccagcaacaccaaggtggacaagaaagttgagcccaaatcttgtgacaaaactcacacatgcccaccgtgcccagcacctgaactcctggggggaccgtcagtcttcctcttccccccaaaacccaaggacaccctcatgatctcccggacccctgaggtcacatgcgtggtggtggacgtgagccacgaagaccctgaggtcaagttcaactggtacgtggacggcgtggaggtgcataatgccaagacaaagccgcgggaggagcagtacaacagcacgtaccgtgtggtcagcgtcctcaccgtcctgcaccaggactggctgaatggcaaggagtacaagtgcaaggtctccaacaaagccctcccagcccccatcgagaaaaccatctccaaagccaaagggcagccccgagaaccacaggtgtacaccctgcccccatcccgggatgagctgaccaagaaccaggtcagcctgacctgcctggtcaaaggcttctatcccagcgacatcgccgtggagtgggagagcaatgggcagccggagaacaactacaagaccacgcctcccgtgctggactccgacggctccttcttcctctacagcaagctcaccgtggacaagagcaggtggcagcaggggaacgtcttctcatgctccgtgatgcatgaggctctgcacaaccactacacacagaagagcctctccctgtctccgggtaaatgagtgccacggccggcaagcccccgctccccaggctctcggggtcgcgcgaggatgcttggcacgtaccccgtgtacatacttcccaggcacccagcatggaaataaagcacccagcgcttccctgggcccctgcg

SEQ ID NO: 142037 - DNA, 2619 bp, Homo sapiens; identical to SEQ ID NO: 142030
  Payload ID: 7932
  Gene Symbol: IGHG1
  Gene Name: immunoglobulin heavy constant gamma 1 (G1m marker)
  ENST ID: ENST00000631539
  CDS Start-End: 1-1200

SEQ ID NO: 142038 - DNA, 1128 bp, Homo sapiens; identical to SEQ ID NO: 142031
  Payload ID: 7932
  Gene Symbol: IGHG1
  Gene Name: immunoglobulin heavy constant gamma 1 (G1m marker)
  Uniprot ID: P01857
  ENST ID: ENST00000631466
  CDS Start-End: 1-993

SEQ ID NO: 142039 - DNA, 1022 bp, Homo sapiens; identical to SEQ ID NO: 142029
  Payload ID: 7932
  Gene Symbol: IGHG1
  Gene Name: immunoglobulin heavy constant gamma 1 (G1m marker)
  ENST ID: ENST00000631402
  CDS Start-End: 1-888

SEQ ID NO: 142040 - DNA, 1132 bp, Homo sapiens
  Payload ID: 7933
  Gene Symbol: IGHG2
  Gene Name: immunoglobulin heavy constant gamma 2 (G2m marker)
  Uniprot ID: P01859
  ENST ID: ENST00000390545
  CDS Start-End: 1-981
gcctccaccaagggcccatcggtcttccccctggcgccctgctccaggagcacctccgagagcacagcggccctgggctgcctggtcaaggactacttccccgaaccggtgacggtgtcgtggaactcaggcgctctgaccagcggcgtgcacaccttcccggctgtcctacagtcctcaggactctactccctcagcagcgtggtgaccgtgccctccagcaacttcggcacccagacctacacctgcaacgtagatcacaagcccagcaacaccaaggtggacaagacagttgagcgcaaatgttgtgtcgagtgcccaccgtgcccagcaccacctgtggcaggaccgtcagtcttcctcttccccccaaaacccaaggacaccctcatgatctcccggacccctgaggtcacgtgcgtggtggtggacgtgagccacgaagaccccgaggtccagttcaactggtacgtggacggcgtggaggtgcataatgccaagacaaagccacgggaggagcagttcaacagcacgttccgtgtggtcagcgtcctcaccgtcgtgcaccaggactggctgaacggcaaggagtacaagtgcaaggtctccaacaaaggcctcccagcccccatcgagaaaaccatctccaaaaccaaagggcagccccgagaaccacaggtgtacaccctgcccccatcccgggaggagatgaccaagaaccaggtcagcctgacctgcctggtcaaaggcttctaccccagcgacatctccgtggagtgggagagcaatgggcagccggagaacaactacaagaccacacctcccatgctggactccgacggctccttcttcctctacagcaagctcaccgtggacaagagcaggtggcagcaggggaacgtcttctcatgctccgtgatgcatgaggctctgcacaaccactacacacagaagagcctctccctgtctccgggtaaatgagtgccacggccggcaagcccccgctccccaggctctcggggtcgcgcgaggatgcttggcacgtaccccgtctacatacttcccgggcacccagcatggaaataaagcacccagcgctgccctgggcccctgcgagactgtgatggttctt

SEQ ID NO: 142041 - DNA, 1114 bp, Homo sapiens
  Payload ID: 7933
  Gene Symbol: IGHG2
  Gene Name: immunoglobulin heavy constant gamma 2 (G2m marker)
  Uniprot ID: P01859
  ENST ID: ENST00000621803
  CDS Start-End: 1-981
gcctccaccaagggcccatcggtcttccccctggcgccctgctccaggagcacctccgagagcacagcggccctgggctgcctggtcaaggactacttccccgaaccggtgacggtgtcgtggaactcaggcgctctgaccagcggcgtgcacaccttcccggctgtcctacagtcctcaggactctactccctcagcagcgtggtgaccgtgccctccagcaacttcggcacccagacctacacctgcaacgtagatcacaagcccagcaacaccaaggtggacaagacagttgagcgcaaatgttgtgtcgagtgcccaccgtgcccagcaccacctgtggcaggaccgtcagtcttcctcttccccccaaaacccaaggacaccctcatgatctcccggacccctgaggtcacgtgcgtggtggtggacgtgagccacgaagaccccgaggtccagttcaactggtacgtggacggcgtggaggtgcataatgccaagacaaagccacgggaggagcagttcaacagcacgttccgtgtggtcagcgtcctcaccgtcgtgcaccaggactggctgaacggcaaggagtacaagtgcaaggtctccaacaaaggcctcccagcccccatcgagaaaaccatctccaaaaccaaagggcagccccgagaaccacaggtgtacaccctgcccccatcccgggaggagatgaccaagaaccaggtcagcctgacctgcctggtcaaaggcttctaccccagcgacatctccgtggagtgggagagcaatgggcagccggagaacaactacaagaccacacctcccatgctggactccgacggctccttcttcctctacagcaagctcaccgtggacaagagcaggtggcagcaggggaacgtcttctcatgctccgtgatgcatgaggctctgcacaaccactacacacagaagagcctctccctgtctccgggtaaatgagtgccacggccggcaagcccccgctccccaggctctcggggtcgcgcgaggatgcttggcacgtaccccgtctacatacttcccgggcacccagcatggaaataaagcacccagcgctgccctgggcccctgc

SEQ ID NO: 142042 - DNA, 1268 bp, Homo sapiens
  Payload ID: 7934
  Gene Symbol: IGHG3
  Gene Name: immunoglobulin heavy constant gamma 3 (G3m marker)
  ENST ID: ENST00000390551
  CDS Start-End: 1-1133
cttccaccaagggcccatcggtcttccccctggcgccctgctccaggagcacctctgggggcacagcggccctgggctgcctggtcaaggactacttcccagaaccggtgacggtgtcgtggaactcaggcgccctgaccagcggcgtgcacaccttcccggctgtcctacagtcctcaggactctactccctcagcagcgtggtgaccgtgccctccagcagcttgggcacccagacctacacctgcaacgtgaatcacaagcccagcaacaccaaggtggacaagagagttgagctcaaaaccccacttggtgacacaactcacacatgcccacggtgcccagagcccaaatcttgtgacacacctcccccgtgcccacggtgcccagagcccaaatcttgtgacacacctcccccatgcccacggtgcccagagcccaaatcttgtgacacacctcccccgtgcccaaggtgcccagcacctgaactcctgggaggaccgtcagtcttcctcttccccccaaaacccaaggatacccttatgatttcccggacccctgaggtcacgtgcgtggtggtggacgtgagccacgaagaccccgaggtccagttcaagtggtacgtggacggcgtggaggtgcataatgccaagacaaagccgcgggaggagcagtacaacagcacgttccgtgtggtcagcgtcctcaccgtcctgcaccaggactggctgaacggcaaggagtacaagtgcaaggtctccaacaaagccctcccagcccccatcgagaaaaccatctccaaaaccaaaggacagccccgagaaccacaggtgtacaccctgcccccatcccgggaggagatgaccaagaaccaggtcagcctgacctgcctggtcaaaggcttctaccccagcgacatcgccgtggagtgggagagcagcgggcagccggagaacaactacaacaccacgcctcccatgctggactccgacggctccttcttcctctacagcaagctcaccgtggacaagagcaggtggcagcaggggaacatcttctcatgctccgtgatgcatgaggctctgcacaaccgcttcacgcagaagagcctctccctgtctccgggtaaatgagtgcgacggccggcaagcccccgctccccgggctctcggggtcgcgcgaggatgcttggcacgtaccccgtgtacatacttcccgggcacccagcatggaaataaagcacccagcgctgccctgggcccctgcga

SEQ ID NO: 142043 - DNA, 1566 bp, Homo sapiens
  Payload ID: 7934
  Gene Symbol: IGHG3
  Gene Name: immunoglobulin heavy constant gamma 3 (G3m marker)
  ENST ID: ENST00000611473
  CDS Start-End: 1-1566
atggacacactttgctccacgctcctgctgctgaccatcccttcatgggtcttgtcccagatcaccttgaaggagtctggtcctacgctggtgaaacccacacagaccctcacgctgacctgcaccttctctgggttctcactcagcactagtggagtgggtgtgggctggatccgtcagcccccaggaaaggccctggagtggcttgcactcatttattgggatgatgataagcgctacagcccatctctgaagagcaggctcaccatcaccaaggacacctccaaaaaccaggtggtccttacaatgaccaacatggaccctgtggacacagccacatattactgtgcacacagaccacaaagacacagcggcacctcctcgtggctgaatacttcctggggccagggcaccctggtcaccgtctcctcagcttccaccaagggcccatcggtcttccccctggcgccctgctccaggagcacctctgggggcacagcggccctgggctgcctggtcaaggactacttcccagaaccggtgacggtgtcgtggaactcaggcgccctgaccagcggcgtgcacaccttcccggctgtcctacagtcctcaggactctactccctcagcagcgtggtgaccgtgccctccagcagcttgggcacccagacctacacctgcaacgtgaatcacaagcccagcaacaccaaggtggacaagagagttgagctcaaaaccccacttggtgacacaactcacacatgcccacggtgcccagagcccaaatcttgtgacacacctcccccgtgcccacggtgcccagagcccaaatcttgtgacacacctcccccatgcccacggtgcccagagcccaaatcttgtgacacacctcccccgtgcccaaggtgcccagcacctgaactcctgggaggaccgtcagtcttcctcttccccccaaaacccaaggatacccttatgatttcccggacccctgaggtcacgtgcgtggtggtggacgtgagccacgaagaccccgaggtccagttcaagtggtacgtggacggcgtggaggtgcataatgccaagacaaagccgcgggaggagcagtacaacagcacgttccgtgtggtcagcgtcctcaccgtcctgcaccaggactggctgaacggcaaggagtacaagtgcaaggtctccaacaaagccctcccagcccccatcgagaaaaccatctccaaaaccaaaggacagccccgagaaccacaggtgtacaccctgcccccatcccgggaggagatgaccaagaaccaggtcagcctgacctgcctggtcaaaggcttctaccccagcgacatcgccgtggagtgggagagcagcgggcagccggagaacaactacaacaccacgcctcccatgctggactccgacggctccttcttcctctacagcaagctcaccgtggacaagagcaggtggcagcaggggaacatcttctcatgctccgtgatgcatgaggctctgcacaaccgcttcacgcagaagagcctctccctgtctccgggtaaatga

SEQ ID NO: 142044 - DNA, 1732 bp, Homo sapiens
  Payload ID: 7934
  Gene Symbol: IGHG3
  Gene Name: immunoglobulin heavy constant gamma 3 (G3m marker)
  ENST ID: ENST00000610824
  CDS Start-End: 45-1598
aaccacatccctcctcagaagcccccagagcacaacgcctcaccatggactggacctggaggatcctctttttggtggcagcagccacaggtgcccactcccaggtccagcttgtgcagtctggggctgaggtgaagaagcctggggcctcagtgaaggtttcctgcaaggcttctggatacaccttcactagctatgctatgcattgggtgcgccaggcccccggacaaaggcttgagtggatgggatggatcaacgctggcaatggtaacacaaaatattcacagaagttccagggcagagtcaccattaccagggacacatccgcgagcacagcctacatggagctgagcagcctgagatctgaagacacggctgtgtattactgtgcgagacacagtgtgaaaacccactgtgactactttgactactggggccagggaaccctggtcaccgtctcctcagcttccaccaagggcccatcggtcttccccctggcgccctgctccaggagcacctctgggggcacagcggccctgggctgcctggtcaaggactacttcccagaaccggtgacggtgtcgtggaactcaggcgccctgaccagcggcgtgcacaccttcccggctgtcctacagtcctcaggactctactccctcagcagcgtggtgaccgtgccctccagcagcttgggcacccagacctacacctgcaacgtgaatcacaagcccagcaacaccaaggtggacaagagagttgagctcaaaaccccacttggtgacacaactcacacatgcccacggtgcccagagcccaaatcttgtgacacacctcccccgtgcccacggtgcccagagcccaaatcttgtgacacacctcccccatgcccacggtgcccagagcccaaatcttgtgacacacctcccccgtgcccaaggtgcccagcacctgaactcctgggaggaccgtcagtcttcctcttccccccaaaacccaaggatacccttatgatttcccggacccctgaggtcacgtgcgtggtggtggacgtgagccacgaagaccccgaggtccagttcaagtggtacgtggacggcgtggaggtgcataatgccaagacaaagccgcgggaggagcagtacaacagcacgttccgtgtggtcagcgtcctcaccgtcctgcaccaggactggctgaacggcaaggagtacaagtgcaaggtctccaacaaagccctcccagcccccatcgagaaaaccatctccaaaaccaaaggacagccccgagaaccacaggtgtacaccctgcccccatcccgggaggagatgaccaagaaccaggtcagcctgacctgcctggtcaaaggcttctaccccagcgacatcgccgtggagtgggagagcagcgggcagccggagaacaactacaacaccacgcctcccatgctggactccgacggctccttcttcctctacagcaagctcaccgtggacaagagcaggtggcagcaggggaacatcttctcatgctccgtgatgcatgaggctctgcacaaccgcttcacgcagaagagcctctccctgtctccgggtaaatgagtgcgacggccggcaagcccccgctccccgggctctcggggtcgcgcgaggatgcttggcacgtaccccgtgtacatacttcccgggcacccagcatggaaataaagcacccagcgctgccctgggcccctgcg

SEQ ID NO: 142045 - DNA, 1266 bp, Homo sapiens
  Payload ID: 7934
  Gene Symbol: IGHG3
  Gene Name: immunoglobulin heavy constant gamma 3 (G3m marker)
  ENST ID: ENST00000632774
  CDS Start-End: 1-1133
cttccaccaagggcccatcggtcttccccctggcgccctgctccaggagcacctctgggggcacagcggccctgggctgcctggtcaaggactacttcccagaaccggtgacggtgtcgtggaactcaggcgccctgaccagcggcgtgcacaccttcccggctgtcctacagtcctcaggactctactccctcagcagcgtggtgaccgtgccctccagcagcttgggcacccagacctacacctgcaacgtgaatcacaagcccagcaacaccaaggtggacaagagagttgagctcaaaaccccacttggtgacacaactcacacatgcccacggtgcccagagcccaaatcttgtgacacacctcccccgtgcccacggtgcccagagcccaaatcttgtgacacacctcccccatgcccacggtgcccagagcccaaatcttgtgacacacctcccccgtgcccaaggtgcccagcacctgaactcctgggaggaccgtcagtcttcctcttccccccaaaacccaaggatacccttatgatttcccggacccctgaggtcacgtgcgtggtggtggacgtgagccacgaagaccccgaggtccagttcaagtggtacgtggacggcgtggaggtgcataatgccaagacaaagccgcgggaggagcagtacaacagcacgttccgtgtggtcagcgtcctcaccgtcctgcaccaggactggctgaacggcaaggagtacaagtgcaaggtctccaacaaagccctcccagcccccatcgagaaaaccatctccaaaaccaaaggacagccccgagaaccacaggtgtacaccctgcccccatcccgggaggagatgaccaagaaccaggtcagcctgacctgcctggtcaaaggcttctaccccagcgacatcgccgtggagtgggagagcagcgggcagccggagaacaactacaacaccacgcctcccatgctggactccgacggctccttcttcctctacagcaagctcaccgtggacaagagcaggtggcagcaggggaacatcttctcatgctccgtgatgcatgaggctctgcacaaccgcttcacgcagaagagcctctccctgtctccgggtaaatgagtgcgacggccggcaagcccccgctccccgggctctcggggtcgcgcgaggatgcttggcacgtaccccgtgtacatacttcccgggcacccagcatggaaataaagcacccagcgctgccctgggcccctgc

SEQ ID NO: 142046 - DNA, 1119 bp, Homo sapiens
  Payload ID: 7935
  Gene Symbol: IGHG4
  Gene Name: immunoglobulin heavy constant gamma 4 (G4m marker)
  Uniprot ID: P01861
  ENST ID: ENST00000390543
  CDS Start-End: 1-984
gcttccaccaagggcccatcggtcttccccctggcgccctgctccaggagcacctccgagagcacagccgccctgggctgcctggtcaaggactacttccccgaaccggtgacggtgtcgtggaactcaggcgccctgaccagcggcgtgcacaccttcccggctgtcctacagtcctcaggactctactccctcagcagcgtggtgaccgtgccctccagcagcttgggcacgaagacctacacctgcaacgtagatcacaagcccagcaacaccaaggtggacaagagagttgagtccaaatatggtcccccatgcccatcatgcccagcacctgagttcctggggggaccatcagtcttcctgttccccccaaaacccaaggacactctcatgatctcccggacccctgaggtcacgtgcgtggtggtggacgtgagccaggaagaccccgaggtccagttcaactggtacgtggatggcgtggaggtgcataatgccaagacaaagccgcgggaggagcagttcaacagcacgtaccgtgtggtcagcgtcctcaccgtcctgcaccaggactggctgaacggcaaggagtacaagtgcaaggtctccaacaaaggcctcccgtcctccatcgagaaaaccatctccaaagccaaagggcagccccgagagccacaggtgtacaccctgcccccatcccaggaggagatgaccaagaaccaggtcagcctgacctgcctggtcaaaggcttctaccccagcgacatcgccgtggagtgggagagcaatgggcagccggagaacaactacaagaccacgcctcccgtgctggactccgacggctccttcttcctctacagcaggctcaccgtggacaagagcaggtggcaggaggggaatgtcttctcatgctccgtgatgcatgaggctctgcacaaccactacacacagaagagcctctccctgtctctgggtaaatgagtgccagggccggcaagcccccgctccccgggctctcggggtcgcgcgaggatgcttggcacgtaccccgtgtacatacttcccgggcgcccagcatggaaataaagcacccagcgctgccctgggcccctgcga

SEQ ID NO: 142047 - DNA, 1119 bp, Homo sapiens; identical to SEQ ID NO: 142046
  Payload ID: 7935
  Gene Symbol: IGHG4
  Gene Name: immunoglobulin heavy constant gamma 4 (G4m marker)
  Uniprot ID: P01861
  ENST ID: ENST00000618981
  CDS Start-End: 1-984

SEQ ID NO: 142048 - DNA, 1485 bp, Homo sapiens
  Payload ID: 7936
  Gene Symbol: IGHM
  Gene Name: immunoglobulin heavy constant mu
  ENST ID: ENST00000390559
  CDS Start-End: 1-1362
gggagtgcatccgccccaacccttttccccctcgtctcctgtgagaattccccgtcggatacgagcagcgtggccgttggctgcctcgcacaggacttccttcccgactccatcactttctcctggaaatacaagaacaactctgacatcagcagcacccggggcttcccatcagtcctgagagggggcaagtacgcagccacctcacaggtgctgctgccttccaaggacgtcatgcagggcacagacgaacacgtggtgtgcaaagtccagcaccccaacggcaacaaagaaaagaacgtgcctcttccagtgattgctgagctgcctcccaaagtgagcgtcttcgtcccaccccgcgacggcttcttcggcaacccccgcaagtccaagctcatctgccaggccacgggtttcagtccccggcagattcaggtgtcctggctgcgcgaggggaagcaggtggggtctggcgtcaccacggaccaggtgcaggctgaggccaaagagtctgggcccacgacctacaaggtgaccagcacactgaccatcaaagagagcgactggctcggccagagcatgttcacctgccgcgtggatcacaggggcctgaccttccagcagaatgcgtcctccatgtgtgtccccgatcaagacacagccatccgggtcttcgccatccccccatcctttgccagcatcttcctcaccaagtccaccaagttgacctgcctggtcacagacctgaccacctatgacagcgtgaccatctcctggacccgccagaatggcgaagctgtgaaaacccacaccaacatctccgagagccaccccaatgccactttcagcgccgtgggtgaggccagcatctgcgaggatgactggaattccggggagaggttcacgtgcaccgtgacccacacagacctgccctcgccactgaagcagaccatctcccggcccaagggggtggccctgcacaggcccgatgtctacttgctgccaccagcccgggagcagctgaacctgcgggagtcggccaccatcacgtgcctggtgacgggcttctctcccgcggacgtcttcgtgcagtggatgcagagggggcagcccttgtccccggagaagtatgtgaccagcgccccaatgcctgagccccaggccccaggccggtacttcgcccacagcatcctgaccgtgtccgaagaggaatggaacacgggggagacctacacctgcgtggtggcccatgaggccctgcccaacagggtcaccgagaggaccgtggacaagtccaccggtaaacccaccctgtacaacgtgtccctggtcatgtccgacacagctggcacctgctactgaccctgctggcctgcccacaggctcggggcggctggccgctctgtgtgtgcatgcaaactaaccgtgtcaacggggtgagatgttgcatcttataaaattagaaataaaaagatccattcaaaa

SEQ ID NO: 142049 - DNA, 1883 bp, Homo sapiens
  Payload ID: 7936
  Gene Symbol: IGHM
  Gene Name: immunoglobulin heavy constant mu
  ENST ID: ENST00000622287
  CDS Start-End: 28-1827
ccagggcagtcaccagagctccagacaatgtctgtctccttcctcatcttcctgcccgtgctgggcctcccatggggtgtcctgtcacaggtacagctgcagcagtcaggtccaggactggtgaagccctcgcagaccctctcactcacctgtgccatctccggggacagtgtctctagcaacagtgctgcttggaactggatcaggcagtccccatcgagaggccttgagtggctgggaaggacatactacaggtccaagtggtataatgattatgcagtatctgtgaaaagtcgaataaccatcaacccagacacatccaagaaccagttctccctgcagctgaactctgtgactcccgaggacacggctgtgtattactgtgcaagagagtattactatggttcggggagtgacaactggttcgacccctggggccagggaaccctggtcaccgtctcctcagggagtgcatccgccccaacccttttccccctcgtctcctgtgagaattccccgtcggatacgagcagcgtggccgttggctgcctcgcacaggacttccttcccgactccatcactttctcctggaaatacaagaacaactctgacatcagcagcacccggggcttcccatcagtcctgagagggggcaagtacgcagccacctcacaggtgctgctgccttccaaggacgtcatgcagggcacagacgaacacgtggtgtgcaaagtccagcaccccaacggcaacaaagaaaagaacgtgcctcttccagtgattgctgagctgcctcccaaagtgagcgtcttcgtcccaccccgcgacggcttcttcggcaacccccgcaagtccaagctcatctgccaggccacgggtttcagtccccggcagattcaggtgtcctggctgcgcgaggggaagcaggtggggtctggcgtcaccacggaccaggtgcaggctgaggccaaagagtctgggcccacgacctacaaggtgaccagcacactgaccatcaaagagagcgactggctcggccagagcatgttcacctgccgcgtggatcacaggggcctgaccttccagcagaatgcgtcctccatgtgtgtccccgatcaagacacagccatccgggtcttcgccatccccccatcctttgccagcatcttcctcaccaagtccaccaagttgacctgcctggtcacagacctgaccacctatgacagcgtgaccatctcctggacccgccagaatggcgaagctgtgaaaacccacaccaacatctccgagagccaccccaatgccactttcagcgccgtgggtgaggccagcatctgcgaggatgactggaattccggggagaggttcacgtgcaccgtgacccacacagacctgccctcgccactgaagcagaccatctcccggcccaagggggtggccctgcacaggcccgatgtctacttgctgccaccagcccgggagcagctgaacctgcgggagtcggccaccatcacgtgcctggtgacgggcttctctcccgcggacgtcttcgtgcagtggatgcagagggggcagcccttgtccccggagaagtatgtgaccagcgccccaatgcctgagccccaggccccaggccggtacttcgcccacagcatcctgaccgtgtccgaagaggaatggaacacgggggagacctacacctgcgtggtggcccatgaggccctgcccaacagggtcaccgagaggaccgtggacaagtccaccggtaaacccaccctgtacaacgtgtccctggtcatgtccgacacagctggcacctgctactgaccctgctggcctgcccacaggctcggggcggctggccgctctgtgtgtgcatgcaa

SEQ ID NO: 142050 - DNA, 1880 bp, Homo sapiens
  Payload ID: 7936
  Gene Symbol: IGHM
  Gene Name: immunoglobulin heavy constant mu
  ENST ID: ENST00000615655
  CDS Start-End: 58-1824
ccctggattccaaggcctatccacttggtgatcagcactgagcaccgaggattcaccatggaactggggctccgctgggttttccttgttgctattttagaaggtgtccagtgtgaggtgcagctggtggagtctgggggaggcctggtcaagcctggggggtccctgagactctcctgtgcagcctctggattcaccttcagtagctatagcatgaactgggtccgccaggctccagggaaggggctggagtgggtttcatacattagtagtagtagtagttacacaaactacgcagactctgtgaagggccgattcaccatctccagagacaacgccaagaactcactgtatctgcaaatgaacagcctgagagccgaggacacggctgtgtattactgtgcgagagacacagtgaggggaggtcagtggggccagggaaccctggtcaccgtctcctcagggagtgcatccgccccaacccttttccccctcgtctcctgtgagaattccccgtcggatacgagcagcgtggccgttggctgcctcgcacaggacttccttcccgactccatcactttctcctggaaatacaagaacaactctgacatcagcagcacccggggcttcccatcagtcctgagagggggcaagtacgcagccacctcacaggtgctgctgccttccaaggacgtcatgcagggcacagacgaacacgtggtgtgcaaagtccagcaccccaacggcaacaaagaaaagaacgtgcctcttccagtgattgctgagctgcctcccaaagtgagcgtcttcgtcccaccccgcgacggcttcttcggcaacccccgcaagtccaagctcatctgccaggccacgggtttcagtccccggcagattcaggtgtcctggctgcgcgaggggaagcaggtggggtctggcgtcaccacggaccaggtgcaggctgaggccaaagagtctgggcccacgacctacaaggtgaccagcacactgaccatcaaagagagcgactggctcggccagagcatgttcacctgccgcgtggatcacaggggcctgaccttccagcagaatgcgtcctccatgtgtgtccccgatcaagacacagccatccgggtcttcgccatccccccatcctttgccagcatcttcctcaccaagtccaccaagttgacctgcctggtcacagacctgaccacctatgacagcgtgaccatctcctggacccgccagaatggcgaagctgtgaaaacccacaccaacatctccgagagccaccccaatgccactttcagcgccgtgggtgaggccagcatctgcgaggatgactggaattccggggagaggttcacgtgcaccgtgacccacacagacctgccctcgccactgaagcagaccatctcccggcccaagggggtggccctgcacaggcccgatgtctacttgctgccaccagcccgggagcagctgaacctgcgggagtcggccaccatcacgtgcctggtgacgggcttctctcccgcggacgtcttcgtgcagtggatgcagagggggcagcccttgtccccggagaagtatgtgaccagcgccccaatgcctgagccccaggccccaggccggtacttcgcccacagcatcctgaccgtgtccgaagaggaatggaacacgggggagacctacacctgcgtggtggcccatgaggccctgcccaacagggtcaccgagaggaccgtggacaagtccaccggtaaacccaccctgtacaacgtgtccctggtcatgtccgacacagctggcacctgctactgaccctgctggcctgcccacaggctcggggcggctggccgctctgtgtgtgcatgcaa

SEQ ID NO: 142051 - DNA, 1485 bp, Homo sapiens; identical to SEQ ID NO: 142048
  Payload ID: 7936
  Gene Symbol: IGHM
  Gene Name: immunoglobulin heavy constant mu
  ENST ID: ENST00000626472
  CDS Start-End: 1-1362

SEQ ID NO: 142052 - DNA, 17 bp, Homo sapiens
  Payload ID: 7937
  Gene Symbol: IGHD1OR15-1A
  Gene Name: immunoglobulin heavy diversity 1/OR15-1A (non-functional)
  ENST ID: ENST00000605284
  CDS Start-End: 1-17
ggtataactggaacaac

SEQ ID NO: 142053 - DNA, 17 bp, Homo sapiens
  Payload ID: 7938
  Gene Symbol: IGHD1OR15-1B
  Gene Name: immunoglobulin heavy diversity 1/OR15-1B (non-functional)
  ENST ID: ENST00000604838
  CDS Start-End: 1-17
ggtataactggaacaac

SEQ ID NO: 142054 - DNA, 17 bp, Homo sapiens
  Payload ID: 7939
  Gene Symbol: IGHD1-1
  Gene Name: immunoglobulin heavy diversity 1-1
  ENST ID: ENST00000454908
  CDS Start-End: 1-17
ggtacaactggaacgac

SEQ ID NO: 142055 - DNA, 17 bp, Homo sapiens
  Payload ID: 7939
  Gene Symbol: IGHD1-1
  Gene Name: immunoglobulin heavy diversity 1-1
  ENST ID: ENST00000633210
  CDS Start-End: 1-17
ggtacaactggaacgac

SEQ ID NO: 142056 - DNA, 17 bp, Homo sapiens
  Payload ID: 7940
  Gene Symbol: IGHD1-14
  Gene Name: immunoglobulin heavy diversity 1-14 (non-functional)
  ENST ID: ENST00000451044
  CDS Start-End: 1-17
ggtataaccggaaccac

SEQ ID NO: 142057 - DNA, 17 bp, Homo sapiens
  Payload ID: 7940
  Gene Symbol: IGHD1-14
  Gene Name: immunoglobulin heavy diversity 1-14 (non-functional)
  ENST ID: ENST00000631884
  CDS Start-End: 1-17
ggtataaccggaaccac

SEQ ID NO: 142058 - DNA, 17 bp, Homo sapiens
  Payload ID: 7941
  Gene Symbol: IGHD1-20
  Gene Name: immunoglobulin heavy diversity 1-20
  ENST ID: ENST00000450276
  CDS Start-End: 1-17
ggtataactggaacgac

SEQ ID NO: 142059 - DNA, 17 bp, Homo sapiens
  Payload ID: 7941
  Gene Symbol: IGHD1-20
  Gene Name: immunoglobulin heavy diversity 1-20
  ENST ID: ENST00000632968
  CDS Start-End: 1-17
ggtataactggaacgac

SEQ ID NO: 142060 - DNA, 20 bp, Homo sapiens
  Payload ID: 7942
  Gene Symbol: IGHD1-26
  Gene Name: immunoglobulin heavy diversity 1-26
  ENST ID: ENST00000390567
  CDS Start-End: 1-20
ggtatagtgggagctactac

SEQ ID NO: 142061 - DNA, 20 bp, Homo sapiens
  Payload ID: 7942
  Gene Symbol: IGHD1-26
  Gene Name: immunoglobulin heavy diversity 1-26
  ENST ID: ENST00000633009
  CDS Start-End: 1-20
ggtatagtgggagctactac

SEQ ID NO: 142062 - DNA, 17 bp, Homo sapiens
  Payload ID: 7943
  Gene Symbol: IGHD1-7
  Gene Name: immunoglobulin heavy diversity 1-7
  ENST ID: ENST00000430425
  CDS Start-End: 1-17
ggtataactggaactac

SEQ ID NO: 142063 - DNA, 17 bp, Homo sapiens
  Payload ID: 7943
  Gene Symbol: IGHD1-7
  Gene Name: immunoglobulin heavy diversity 1-7
  ENST ID: ENST00000632304
  CDS Start-End: 1-17
ggtataactggaactac

SEQ ID NO: 142064 - DNA, 31 bp, Homo sapiens
  Payload ID: 7944
  Gene Symbol: IGHD2OR15-2A
  Gene Name: immunoglobulin heavy diversity 2/OR15-2A (non-functional)
  ENST ID: ENST00000603077
  CDS Start-End: 1-31
agaatattgtaatagtactactttctatgcc

SEQ ID NO: 142065 - DNA, 31 bp, Homo sapiens; identical to SEQ ID NO: 142064
  Payload ID: 7945
  Gene Symbol: IGHD2OR15-2B
  Gene Name: immunoglobulin heavy diversity 2/OR15-2B (non-functional)
  ENST ID: ENST00000604102
  CDS Start-End: 1-31

SEQ ID NO: 142066 - DNA, 31 bp, Homo sapiens
  Payload ID: 7946
  Gene Symbol: IGHD2-15
  Gene Name: immunoglobulin heavy diversity 2-15
  ENST ID: ENST00000390578
  CDS Start-End: 1-31
aggatattgtagtggtggtagctgctactcc

SEQ ID NO: 142067 - DNA, 31 bp, Homo sapiens; identical to SEQ ID NO: 142066
  Payload ID: 7946
  Gene Symbol: IGHD2-15
  Gene Name: immunoglobulin heavy diversity 2-15
  ENST ID: ENST00000632473
  CDS Start-End: 1-31

SEQ ID NO: 142068 - DNA, 31 bp, Homo sapiens
  Payload ID: 7947
  Gene Symbol: IGHD2-2
  Gene Name: immunoglobulin heavy diversity 2-2
  ENST ID: ENST00000390591
  CDS Start-End: 1-31
aggatattgtagtagtaccagctgctatgcc

SEQ ID NO: 142069 - DNA, 31 bp, Homo sapiens; identical to SEQ ID NO: 142068
  Payload ID: 7947
  Gene Symbol: IGHD2-2
  Gene Name: immunoglobulin heavy diversity 2-2
  ENST ID: ENST00000631803
  CDS Start-End: 1-31

SEQ ID NO: 142070 - DNA, 28 bp, Homo sapiens
  Payload ID: 7948
  Gene Symbol: IGHD2-21
  Gene Name: immunoglobulin heavy diversity 2-21
  ENST ID: ENST00000390572
  CDS Start-End: 1-28
agcatattgtggtggtgactgctattcc

SEQ ID NO: 142071 - DNA, 28 bp, Homo sapiens
  Payload ID: 7948
  Gene Symbol: IGHD2-21
  Gene Name: immunoglobulin heavy diversity 2-21
  ENST ID: ENST00000632619
  CDS Start-End: 1-28
agcatattgtggtggtgactgctattcc

SEQ ID NO: 142072 - DNA, 31 bp, Homo sapiens
  Payload ID: 7949
  Gene Symbol: IGHD2-8
  Gene Name: immunoglobulin heavy diversity 2-8
  ENST ID: ENST00000390585
  CDS Start-End: 1-31
aggatattgtactaatggtgtatgctatacc

SEQ ID NO: 142073 - DNA, 31 bp, Homo sapiens; identical to SEQ ID NO: 142072
  Payload ID: 7949
  Gene Symbol: IGHD2-8
  Gene Name: immunoglobulin heavy diversity 2-8
  ENST ID: ENST00000633504
  CDS Start-End: 1-31

SEQ ID NO: 142074 - DNA, 31 bp, Homo sapiens
  Payload ID: 7950
  Gene Symbol: IGHD3OR15-3A
  Gene Name: immunoglobulin heavy diversity 3/OR15-3A (non-functional)
  ENST ID: ENST00000604950
  CDS Start-End: 1-31
gtattatgatttttggactggttattatacc

SEQ ID NO: 142075 - DNA, 31 bp, Homo sapiens; identical to SEQ ID NO: 142074
  Payload ID: 7951
  Gene Symbol: IGHD3OR15-3B
  Gene Name: immunoglobulin heavy diversity 3/OR15-3B (non-functional)
  ENST ID: ENST00000603935
  CDS Start-End: 1-31

SEQ ID NO: 142076 - DNA, 31 bp, Homo sapiens
  Payload ID: 7952
  Gene Symbol: IGHD3-10
  Gene Name: immunoglobulin heavy diversity 3-10
  ENST ID: ENST00000390583
  CDS Start-End: 1-30
gtattactatggttcggggagttattataac

SEQ ID NO: 142077 - DNA, 31 bp, Homo sapiens; identical to SEQ ID NO: 142076
  Payload ID: 7952
  Gene Symbol: IGHD3-10
  Gene Name: immunoglobulin heavy diversity 3-10
  ENST ID: ENST00000632609
  CDS Start-End: 1-30

SEQ ID NO: 142078 - DNA, 37 bp, Homo sapiens
  Payload ID: 7953
  Gene Symbol: IGHD3-16
  Gene Name: immunoglobulin heavy diversity 3-16
  ENST ID: ENST00000390577
  CDS Start-End: 1-37
gtattatgattacgtttgggggagttatcgttatacc

SEQ ID NO: 142079 - DNA, 37 bp, Homo sapiens; identical to SEQ ID NO: 142078
  Payload ID: 7953
  Gene Symbol: IGHD3-16
  Gene Name: immunoglobulin heavy diversity 3-16
  ENST ID: ENST00000633379
  CDS Start-End: 1-37

SEQ ID NO: 142080 - DNA, 31 bp, Homo sapiens
  Payload ID: 7954
  Gene Symbol: IGHD3-22
  Gene Name: immunoglobulin heavy diversity 3-22
  ENST ID: ENST00000390571
  CDS Start-End: 1-31
gtattactatgatagtagtggttattactac

SEQ ID NO: 142081 - DNA, 31 bp, Homo sapiens; identical to SEQ ID NO: 142080
  Payload ID: 7954
  Gene Symbol: IGHD3-22
  Gene Name: immunoglobulin heavy diversity 3-22
  ENST ID: ENST00000633765
  CDS Start-End: 1-31

SEQ ID NO: 142082 - DNA, 31 bp, Homo sapiens
  Payload ID: 7955
  Gene Symbol: IGHD3-3
  Gene Name: immunoglobulin heavy diversity 3-3
  ENST ID: ENST00000390590
  CDS Start-End: 1-31
gtattacgatttttggagtggttattatacc

SEQ ID NO: 142083 - DNA, 31 bp, Homo sapiens; identical to SEQ ID NO: 142082
  Payload ID: 7955
  Gene Symbol: IGHD3-3
  Gene Name: immunoglobulin heavy diversity 3-3
  ENST ID: ENST00000633353
  CDS Start-End: 1-31

SEQ ID NO: 142084 - DNA, 31 bp, Homo sapiens
  Payload ID: 7956
  Gene Symbol: IGHD3-9
  Gene Name: immunoglobulin heavy diversity 3-9
  ENST ID: ENST00000390584
  CDS Start-End: 1-30
gtattacgatattttgactggttattataac

SEQ ID NO: 142085 - DNA, 31 bp, Homo sapiens; identical to SEQ ID NO: 142084
  Payload ID: 7956
  Gene Symbol: IGHD3-9
  Gene Name: immunoglobulin heavy diversity 3-9
  ENST ID: ENST00000632911
  CDS Start-End: 1-30

SEQ ID NO: 142086 - DNA, 19 bp, Homo sapiens
  Payload ID: 7957
  Gene Symbol: IGHD4OR15-4A
  Gene Name: immunoglobulin heavy diversity 4/OR15-4A (non-functional)
  ENST ID: ENST00000603326
  CDS Start-End: 1-19
tgactatggtgctaactac

SEQ ID NO: 142087 - DNA, 19 bp, Homo sapiens
  Payload ID: 7958
  Gene Symbol: IGHD4OR15-4B
  Gene Name: immunoglobulin heavy diversity 4/OR15-4B (non-functional)
  ENST ID: ENST00000603693
  CDS Start-End: 1-19
tgactatggtgctaactac

SEQ ID NO: 142088 - DNA, 16 bp, Homo sapiens
  Payload ID: 7959
  Gene Symbol: IGHD4-11
  Gene Name: immunoglobulin heavy diversity 4-11 (non-functional)
  ENST ID: ENST00000431440
  CDS Start-End: 1-16
tgactacagtaactac

SEQ ID NO: 142089 - DNA, 16 bp, Homo sapiens
  Payload ID: 7959
  Gene Symbol: IGHD4-11
  Gene Name: immunoglobulin heavy diversity 4-11 (non-functional)
  ENST ID: ENST00000634154
  CDS Start-End: 1-16
tgactacagtaactac

SEQ ID NO: 142090 - DNA, 16 bp, Homo sapiens
  Payload ID: 7960
  Gene Symbol: IGHD4-17
  Gene Name: immunoglobulin heavy diversity 4-17
  ENST ID: ENST00000431870
  CDS Start-End: 1-16
tgactacggtgactac

SEQ ID NO: 142091 - DNA, 16 bp, Homo sapiens
  Payload ID: 7960
  Gene Symbol: IGHD4-17
  Gene Name: immunoglobulin heavy diversity 4-17
  ENST ID: ENST00000633010
  CDS Start-End: 1-16
tgactacggtgactac

SEQ ID NO: 142092 - DNA, 19 bp, Homo sapiens
  Payload ID: 7961
  Gene Symbol: IGHD4-23
  Gene Name: immunoglobulin heavy diversity 4-23 (non-functional)
  ENST ID: ENST00000437320
  CDS Start-End: 1-19
tgactacggtggtaactcc

SEQ ID NO: 142093 - DNA, 19 bp, Homo sapiens
  Payload ID: 7961
  Gene Symbol: IGHD4-23
  Gene Name: immunoglobulin heavy diversity 4-23 (non-functional)
  ENST ID: ENST00000633030
  CDS Start-End: 1-19
tgactacggtggtaactcc

SEQ ID NO: 142094 - DNA, 16 bp, Homo sapiens
  Payload ID: 7962
  Gene Symbol: IGHD4-4
  Gene Name: immunoglobulin heavy diversity 4-4
  ENST ID: ENST00000414852
  CDS Start-End: 1-16
tgactacagtaactac

SEQ ID NO: 142095 - DNA, 16 bp, Homo sapiens
  Payload ID: 7962
  Gene Symbol: IGHD4-4
  Gene Name: immunoglobulin heavy diversity 4-4
  ENST ID: ENST00000634085
  CDS Start-End: 1-16
tgactacagtaactac

SEQ ID NO: 142096 - DNA, 23 bp, Homo sapiens
  Payload ID: 7963
  Gene Symbol: IGHD5OR15-5A
  Gene Name: immunoglobulin heavy diversity 5/OR15-5A (non-functional)
  ENST ID: ENST00000604642
  CDS Start-End: 1-23
gtggatatagtgtctacgattac

SEQ ID NO: 142097 - DNA, 23 bp, Homo sapiens
  Payload ID: 7964
  Gene Symbol: IGHD5OR15-5B
  Gene Name: immunoglobulin heavy diversity 5/OR15-5B (non-functional)
  ENST ID: ENST00000604446
  CDS Start-End: 1-23
gtggatatagtgtctacgattac

SEQ ID NO: 142098 - DNA, 23 bp, Homo sapiens
  Payload ID: 7965
  Gene Symbol: IGHD5-12
  Gene Name: immunoglobulin heavy diversity 5-12
  ENST ID: ENST00000390581
  CDS Start-End: 1-23
gtggatatagtggctacgattac

SEQ ID NO: 142099 - DNA, 23 bp, Homo sapiens
  Payload ID: 7965
  Gene Symbol: IGHD5-12
  Gene Name: immunoglobulin heavy diversity 5-12
  ENST ID: ENST00000631895
  CDS Start-End: 1-23
gtggatatagtggctacgattac

SEQ ID NO: 142100 - DNA, 20 bp, Homo sapiens
  Payload ID: 7966
  Gene Symbol: IGHD5-18
  Gene Name: immunoglobulin heavy diversity 5-18
  ENST ID: ENST00000390575
  CDS Start-End: 1-20
gtggatacagctatggttac

SEQ ID NO: 142101 - DNA, 20 bp, Homo sapiens
  Payload ID: 7966
  Gene Symbol: IGHD5-18
  Gene Name: immunoglobulin heavy diversity 5-18
  ENST ID: ENST00000631871
  CDS Start-End: 1-20
gtggatacagctatggttac

SEQ ID NO: 142102 - DNA, 20 bp, Homo sapiens
  Payload ID: 7967
  Gene Symbol: IGHD5-24
  Gene Name: immunoglobulin heavy diversity 5-24 (non-functional)
  ENST ID: ENST00000390569
  CDS Start-End: 1-20
gtagagatggctacaattac

SEQ ID NO: 142103 - DNA, 20 bp, Homo sapiens
  Payload ID: 7967
  Gene Symbol: IGHD5-24
  Gene Name: immunoglobulin heavy diversity 5-24 (non-functional)
  ENST ID: ENST00000632963
  CDS Start-End: 1-20
gtagagatggctacaattac

SEQ ID NO: 142104 - DNA, 20 bp, Homo sapiens
  Payload ID: 7968
  Gene Symbol: IGHD5-5
  Gene Name: immunoglobulin heavy diversity 5-5
  ENST ID: ENST00000390588
  CDS Start-End: 1-20
gtggatacagctatggttac

SEQ ID NO: 142105 - DNA, 20 bp, Homo sapiens
  Payload ID: 7968
  Gene Symbol: IGHD5-5
  Gene Name: immunoglobulin heavy diversity 5-5
  ENST ID: ENST00000633968
  CDS Start-End: 1-20
gtggatacagctatggttac

SEQ ID NO: 142106 - DNA, 21 bp, Homo sapiens
  Payload ID: 7969
  Gene Symbol: IGHD6-13
  Gene Name: immunoglobulin heavy diversity 6-13
  ENST ID: ENST00000390580
  CDS Start-End: 1-21
gggtatagcagcagctggtac

SEQ ID NO: 142107 - DNA, 21 bp, Homo sapiens
  Payload ID: 7969
  Gene Symbol: IGHD6-13
  Gene Name: immunoglobulin heavy diversity 6-13
  ENST ID: ENST00000632859
  CDS Start-End: 1-21
gggtatagcagcagctggtac

SEQ ID NO: 142108 - DNA, 21 bp, Homo sapiens
  Payload ID: 7970
  Gene Symbol: IGHD6-19
  Gene Name: immunoglobulin heavy diversity 6-19
  ENST ID: ENST00000390574
  CDS Start-End: 1-21
gggtatagcagtggctggtac

SEQ ID NO: 142109 - DNA, 21 bp, Homo sapiens
  Payload ID: 7970
  Gene Symbol: IGHD6-19
  Gene Name: immunoglobulin heavy diversity 6-19
  ENST ID: ENST00000633159
  CDS Start-End: 1-21
gggtatagcagtggctggtac

SEQ ID NO: 142110 - DNA, 18 bp, Homo sapiens
  Payload ID: 7971
  Gene Symbol: IGHD6-25
  Gene Name: immunoglobulin heavy diversity 6-25
  ENST ID: ENST00000452198
  CDS Start-End: 1-18
gggtatagcagcggctac

SEQ ID NO: 142111 - DNA, 18 bp, Homo sapiens
  Payload ID: 7971
  Gene Symbol: IGHD6-25
  Gene Name: immunoglobulin heavy diversity 6-25
  ENST ID: ENST00000634070
  CDS Start-End: 1-18
gggtatagcagcggctac

SEQ ID NO: 142112 - DNA, 18 bp, Homo sapiens
  Payload ID: 7972
  Gene Symbol: IGHD6-6
  Gene Name: immunoglobulin heavy diversity 6-6
  ENST ID: ENST00000454691
  CDS Start-End: 1-18
gagtatagcagctcgtcc

SEQ ID NO: 142113 - DNA, 18 bp, Homo sapiens
  Payload ID: 7972
  Gene Symbol: IGHD6-6
  Gene Name: immunoglobulin heavy diversity 6-6
  ENST ID: ENST00000632542
  CDS Start-End: 1-18
gagtatagcagctcgtcc

SEQ ID NO: 142114 - DNA, 11 bp, Homo sapiens
  Payload ID: 7973
  Gene Symbol: IGHD7-27
  Gene Name: immunoglobulin heavy diversity 7-27
  ENST ID: ENST00000439842
  CDS Start-End: 1-11
ctaactgggga

SEQ ID NO: 142115 - DNA, 11 bp, Homo sapiens
  Payload ID: 7973
  Gene Symbol: IGHD7-27
  Gene Name: immunoglobulin heavy diversity 7-27
  ENST ID: ENST00000632524
  CDS Start-End: 1-11
ctaactgggga

SEQ ID NO: 142116 - DNA, 52 bp, Homo sapiens
  Payload ID: 7974
  Gene Symbol: IGHJ1
  Gene Name: immunoglobulin heavy joining 1
  ENST ID: ENST00000390565
  CDS Start-End: 1-52
gctgaatacttccagcactggggccagggcaccctggtcaccgtctcctcag

SEQ ID NO: 142117 - DNA, 52 bp, Homo sapiens; identical to SEQ ID NO: 142116
  Payload ID: 7974
  Gene Symbol: IGHJ1
  Gene Name: immunoglobulin heavy joining 1
  ENST ID: ENST00000634062
  CDS Start-End: 1-52

SEQ ID NO: 142118 - DNA, 52 bp, Homo sapiens
  Payload ID: 7975
  Gene Symbol: IGHJ2
  Gene Name: immunoglobulin heavy joining 2
  ENST ID: ENST00000390564
  CDS Start-End: 1-52
tactggtacttcgatctctggggccgtggcaccctggtcactgtctcctcag

SEQ ID NO: 142119 - DNA, 53 bp, Homo sapiens
  Payload ID: 7975
  Gene Symbol: IGHJ2
  Gene Name: immunoglobulin heavy joining 2
  ENST ID: ENST00000632178
  CDS Start-End: 1-53
ctactggtacttcgatctctggggccgtggcaccctggtcactgtctcctcag

SEQ ID NO: 142120 - DNA, 49 bp, Homo sapiens
  Payload ID: 7976
  Gene Symbol: IGHJ3
  Gene Name: immunoglobulin heavy joining 3
  ENST ID: ENST00000463911
  CDS Start-End: 1-49
gatgcttttgatatctggggccaagggacaatggtcaccgtctcttcag

SEQ ID NO: 142121 - DNA, 50 bp, Homo sapiens
  Payload ID: 7976
  Gene Symbol: IGHJ3
  Gene Name: immunoglobulin heavy joining 3
  ENST ID: ENST00000633896
  CDS Start-End: 1-50
tgatgcttttgatatctggggccaagggacaatggtcaccgtctcttcag

SEQ ID NO: 142122 - DNA, 46 bp, Homo sapiens
  Payload ID: 7977
  Gene Symbol: IGHJ4
  Gene Name: immunoglobulin heavy joining 4
  ENST ID: ENST00000461719
  CDS Start-End: 1-46
tactttgactactggggccagggaaccctggtcaccgtctcctcag

SEQ ID NO: 142123 - DNA, 48 bp, Homo sapiens
  Payload ID: 7977
  Gene Symbol: IGHJ4
  Gene Name: immunoglobulin heavy joining 4
  ENST ID: ENST00000631521
  CDS Start-End: 1-48
actactttgactactggggccagggaaccctggtcaccgtctcctcag

SEQ ID NO: 142124 - DNA, 49 bp, Homo sapiens
  Payload ID: 7978
  Gene Symbol: IGHJ5
  Gene Name: immunoglobulin heavy joining 5
  ENST ID: ENST00000488476
  CDS Start-End: 1-49
aactggttcgacccctggggccagggaaccctggtcaccgtctcctcag

SEQ ID NO: 142125 - DNA, 51 bp, Homo sapiens
  Payload ID: 7978
  Gene Symbol: IGHJ5
  Gene Name: immunoglobulin heavy joining 5
  ENST ID: ENST00000633501
  CDS Start-End: 1-51
acaactggttcgacccctggggccagggaaccctggtcaccgtctcctcag

SEQ ID NO: 142126 - DNA, 61 bp, Homo sapiens
  Payload ID: 7979
  Gene Symbol: IGHJ6
  Gene Name: immunoglobulin heavy joining 6
  ENST ID: ENST00000390560
  CDS Start-End: 1-61
tactactactactactacatggacgtctggggcaaagggaccacggtcaccgtctcctcag

SEQ ID NO: 142127 - DNA, 63 bp, Homo sapiens
  Payload ID: 7979
  Gene Symbol: IGHJ6
  Gene Name: immunoglobulin heavy joining 6
  ENST ID: ENST00000631705
  CDS Start-End: 1-63
attactactactactactacatggacgtctggggcaaagggaccacggtcaccgtctcctcag

SEQ ID NO: 142128 - DNA, 353 bp, Homo sapiens
  Payload ID: 7980
  Gene Symbol: IGHV1OR15-1
  Gene Name: immunoglobulin heavy variable 1/OR15-1 (non-functional)
  ENST ID: ENST00000604066
  CDS Start-End: 1-353
atggactggacctggaggatcctcttcttggtggcagcagctacaggtgcccactcccaggtgcagctggtgcagtctggggctgaggtgaagaagcctggggcctcagtgaaggtctcctgcaaggcttctggatacatcttcaccgactactatatgcactgggtgcgacaggcccctggacaagagcttgggtggatgggacggatcaaccctaacagtggtggcacaaactatgcacagaagtttcagggcagagtcaccatgaccagggacacgtccatcagcacagcctacacggagctgagcagcctgagatctgaggacacggccacgtattactgtgcgagaga

SEQ ID NO: 142129 - DNA, 353 bp, Homo sapiens
  Payload ID: 7981
  Gene Symbol: IGHV1OR15-9
  Gene Name: immunoglobulin heavy variable 1/OR15-9 (non-functional)
  ENST ID: ENST00000338912
  CDS Start-End: 1-353
atgggctggacttggaggatcctgtttttggtggtcatagctgcaggtgcccagtcccaggtacagctgatgcagtctggggctgaggtgaagaagcctggggcctcagtgaggatctcctgcaaggcttctggatacaccttcaccagctactgtatgcactgggtgtgccaggcccatgcacaagggcttgagtggatgggattggtgtgccctagtgatggcagcacaagctatgcacagaagttccagggcagagtcaccataaccagggacacatccatgggcacagcctacatggagctaagcagcctgagatctgaggacacggccatgtattactgtgtgagaga

SEQ ID NO: 142130 - DNA, 353 bp, Homo sapiens
  Payload ID: 7982
  Gene Symbol: IGHV1OR21-1
  Gene Name: immunoglobulin heavy variable 1/OR21-1 (non-functional)
  ENST ID: ENST00000622028
  CDS Start-End: 1-353
atggactggaattggaggatcctgtttttggtggtcatagctgcgggtgcccagtcccaggtacagctggtgcagtctggggctgaggtgaagaagcctggggcctcagtgaaggtctcctgcaaggcttctggatacaccatcaccagctactgtatgcactgggtgcaccaggtccatgcacaagggcttgagtggatgggattggtgtgccctagtgatggcagcacaagctatgcacagaagttccaggccagagtcaccataaccagggacacatccatgagcacagcctacatggagctaagcagtctgagatctgaggacacggccatgtattactgtgtgagaga

SEQ ID NO: 142131 - DNA, 410 bp, Homo sapiens
  Payload ID: 7983
  Gene Symbol: IGHV1-18
  Gene Name: immunoglobulin heavy variable 1-18
  ENST ID: ENST00000390605
  CDS Start-End: 60-410
gcatcacccaaaaaccacacccctccttgggagaatcccctagatcacagctcctcaccatggactggacctggagcatccttttcttggtggcagcagcaacaggtgcccactcccaggttcagctggtgcagtctggagctgaggtgaagaagcctggggcctcagtgaaggtctcctgcaaggcttctggttacacctttaccagctacggtatcagctgggtgcgacaggcccctggacaagggcttgagtggatgggatggatcagcgcttacaatggtaacacaaactatgcacagaagctccagggcagagtcaccatgaccacagacacatccacgagcacagcctacatggagctgaggagcctgagatctgacgacacggccgtgtattactgtgcgaga

SEQ ID NO: 142132 - DNA, 412 bp, Homo sapiens
  Payload ID: 7983
  Gene Symbol: IGHV1-18
  Gene Name: immunoglobulin heavy variable 1-18
  ENST ID: ENST00000633147
  CDS Start-End: 60-412
gcatcacccaaaaaccacacccctccttgggagaatcccctagatcacagctcctcaccatggactggacctggagcatccttttcttggtggcagcagcaacaggtgcccactcccaggttcagctggtgcagtctggagctgaggtgaagaagcctggggcctcagtgaaggtctcctgcaaggcttctggttacacctttaccagctacggtatcagctgggtgcgacaggcccctggacaagggcttgagtggatgggatggatcagcgcttacaatggtaacacaaactatgcacagaagctccagggcagagtcaccatgaccacagacacatccacgagcacagcctacatggagctgaggagcctgagatctgacgacacggccgtgtattactgtgcgagaga

SEQ ID NO: 142133 - DNA, 417 bp, Homo sapiens
  Payload ID: 7984
  Gene Symbol: IGHV1-2
  Gene Name: immunoglobulin heavy variable 1-2
  ENST ID: ENST00000390594
  CDS Start-End: 65-417
gagagcatcacccagcaaccacatctgtcctctagagaatcccctgagagctccgttcctcaccatggactggacctggaggatcctcttcttggtggcagcagccacaggagcccactcccaggtgcagctggtgcagtctggggctgaggtgaagaagcctggggcctcagtgaaggtctcctgcaaggcttctggatacaccttcaccggctactatatgcactgggtgcgacaggcccctggacaagggcttgagtggatgggatggatcaaccctaacagtggtggcacaaactatgcacagaagtttcagggctgggtcaccatgaccagggacacgtccatcagcacagcctacatggagctgagcaggctgagatctgacgacacggccgtgtattactgtgcgagaga

SEQ ID NO: 142134 - DNA, 417 bp, Homo sapiens; identical to SEQ ID NO: 142133
  Payload ID: 7984
  Gene Symbol: IGHV1-2
  Gene Name: immunoglobulin heavy variable 1-2
  ENST ID: ENST00000633350
  CDS Start-End: 65-417

SEQ ID NO: 142135 - DNA, 411 bp, Homo sapiens
  Payload ID: 7985
  Gene Symbol: IGHV1-24
  Gene Name: immunoglobulin heavy variable 1-24
  ENST ID: ENST00000390610
  CDS Start-End: 61-411
accatcacacaacagccacatccctcccctacagaagcccccagagcgcagcacctcaccatggactgcacctggaggatcctcttcttggtggcagcagctacaggcacccacgcccaggtccagctggtacagtctggggctgaggtgaagaagcctggggcctcagtgaaggtctcctgcaaggtttccggatacaccctcactgaattatccatgcactgggtgcgacaggctcctggaaaagggcttgagtggatgggaggttttgatcctgaagatggtgaaacaatctacgcacagaagttccagggcagagtcaccatgaccgaggacacatctacagacacagcctacatggagctgagcagcctgagatctgaggacacggccgtgtattactgtgcaaca

SEQ ID NO: 142136 - DNA, 413 bp, Homo sapiens
  Payload ID: 7985
  Gene Symbol: IGHV1-24
  Gene Name: immunoglobulin heavy variable 1-24
  ENST ID: ENST00000633490
  CDS Start-End: 61-413
accatcacacaacagccacatccctcccctacagaagcccccagagcgcagcacctcaccatggactgcacctggaggatcctcttcttggtggcagcagctacaggcacccacgcccaggtccagctggtacagtctggggctgaggtgaagaagcctggggcctcagtgaaggtctcctgcaaggtttccggatacaccctcactgaattatccatgcactgggtgcgacaggctcctggaaaagggcttgagtggatgggaggttttgatcctgaagatggtgaaacaatctacgcacagaagttccagggcagagtcaccatgaccgaggacacatctacagacacagcctacatggagctgagcagcctgagatctgaggacacggccgtgtattactgtgcaacaga

SEQ ID NO: 142137 - DNA, 395 bp, Homo sapiens
  Payload ID: 7986
  Gene Symbol: IGHV1-3
  Gene Name: immunoglobulin heavy variable 1-3
  ENST ID: ENST00000390595
  CDS Start-End: 43-395
ccacatccctcctcagaagcccccagagcacaacgcctcaccatggactggacctggaggatcctctttttggtggcagcagccacaggtgcccactcccaggtccagcttgtgcagtctggggctgaggtgaagaagcctggggcctcagtgaaggtttcctgcaaggcttctggatacaccttcactagctatgctatgcattgggtgcgccaggcccccggacaaaggcttgagtggatgggatggatcaacgctggcaatggtaacacaaaatattcacagaagttccagggcagagtcaccattaccagggacacatccgcgagcacagcctacatggagctgagcagcctgagatctgaagacacggctgtgtattactgtgcgagaga

SEQ ID NO: 142138 - DNA, 395 bp, Homo sapiens; identical to SEQ ID NO: 142137
  Payload ID: 7986
  Gene Symbol: IGHV1-3
  Gene Name: immunoglobulin heavy variable 1-3
  ENST ID: ENST00000632977
  CDS Start-End: 43-395

SEQ ID NO: 142139 - DNA, 411 bp, Homo sapiens
  Payload ID: 7987
  Gene Symbol: IGHV1-45
  Gene Name: immunoglobulin heavy variable 1-45
  ENST ID: ENST00000390621
  CDS Start-End: 59-411
atcacccaacaaccacatccctcctctagagaatcccctgaaagcacagctcctcaccatggactggacctggagaatcctcttcttggtggcagcagtcacagatgcctactcccagatgcagctggtgcagtctggggctgaggtgaagaagactgggtcctcagtgaaggtttcctgcaaggcttccggatacaccttcacctaccgctacctgcactgggtgcgacaggcccccggacaagcgcttgagtggatgggatggatcacacctttcaatggtaacaccaactacgcacagaaattccaggacagagtcaccattaccagggacaggtctatgagcacagcctacatggagctgagcagcctgagatctgaggacacagccatgtattactgtgcaagata

SEQ ID NO: 142140 - DNA, 411 bp, Homo sapiens; identical to SEQ ID NO: 142139
  Payload ID: 7987
  Gene Symbol: IGHV1-45
  Gene Name: immunoglobulin heavy variable 1-45
  ENST ID: ENST00000631826
  CDS Start-End: 59-411

SEQ ID NO: 142141 - DNA, 655 bp, Homo sapiens
  Payload ID: 7988
  Gene Symbol: IGHV1-46
  Gene Name: immunoglobulin heavy variable 1-46
  ENST ID: ENST00000390622
  CDS Start-End: 305-655
atctgtggggacttgttcttcagtgaaaggatcctgtccgcaaacagaaatggagcaggacatgcatttcttcaagcaggattagggcttggaccatcagcatcccactcctgtgtggcagatgggacatctatcttctttctcaacctcgatcaggctttgaggtatgaaataatctgtctcatgaatatgcaaataaccttagatctactgaggtaaatatggatacatctgggccctgaaagcatcatccaacaaccacatcccttctctacagaagcctctgagaggaaagttcttcaccatggactggacctggagggtcttctgcttgctggctgtagctccaggtgctcactcccaggtgcagctggtgcagtctggggctgaggtgaagaagcctggggcctcagtgaaggtttcctgcaaggcatctggatacaccttcaccagctactatatgcactgggtgcgacaggcccctggacaagggcttgagtggatgggaataatcaaccctagtggtggtagcacaagctacgcacagaagttccagggcagagtcaccatgaccagggacacgtccacgagcacagtctacatggagctgagcagcctgagatctgaggacacggccgtgtattactgtgcgaga

SEQ ID NO: 142142 - DNA, 657 bp, Homo sapiens
  Payload ID: 7988
  Gene Symbol: IGHV1-46
  Gene Name: immunoglobulin heavy variable 1-46
  ENST ID: ENST00000632105
  CDS Start-End: 305-657
atctgtggggacttgttcttcagtgaaaggatcctgtccgcaaacagaaatggagcaggacatgcatttcttcaagcaggattagggcttggaccatcagcatcccactcctgtgtggcagatgggacatctatcttctttctcaacctcgatcaggctttgaggtatgaaataatctgtctcatgaatatgcaaataaccttagatctactgaggtaaatatggatacatctgggccctgaaagcatcatccaacaaccacatcccttctctacagaagcctctgagaggaaagttcttcaccatggactggacctggagggtcttctgcttgctggctgtagctccaggtgctcactcccaggtgcagctggtgcagtctggggctgaggtgaagaagcctggggcctcagtgaaggtttcctgcaaggcatctggatacaccttcaccagctactatatgcactgggtgcgacaggcccctggacaagggcttgagtggatgggaataatcaaccctagtggtggtagcacaagctacgcacagaagttccagggcagagtcaccatgaccagggacacgtccacgagcacagtctacatggagctgagcagcctgagatctgaggacacggccgtgtattactgtgcgagaga

SEQ ID NO: 142143 - DNA, 414 bp, Homo sapiens
  Payload ID: 7989
  Gene Symbol: IGHV1-58
  Gene Name: immunoglobulin heavy variable 1-58
  ENST ID: ENST00000390628
  CDS Start-End: 62-414
agcatcatccagaaaccacatccctccgctagagaagcccctgacggcacagttcctcactatggactggatttggaggatcctcttcttggtgggagcagcgacaggtgcccactcccaaatgcagctggtgcagtctgggcctgaggtgaagaagcctgggacctcagtgaaggtctcctgcaaggcttctggattcacctttactagctctgctgtgcagtgggtgcgacaggctcgtggacaacgccttgagtggataggatggatcgtcgttggcagtggtaacacaaactacgcacagaagttccaggaaagagtcaccattaccagggacatgtccacaagcacagcctacatggagctgagcagcctgagatccgaggacacggccgtgtattactgtgcggcaga

SEQ ID NO: 142144 - DNA, 414 bp, Homo sapiens; identical to SEQ ID NO: 142143
  Payload ID: 7989
  Gene Symbol: IGHV1-58
  Gene Name: immunoglobulin heavy variable 1-58
  ENST ID: ENST00000632614
  CDS Start-End: 62-414

SEQ ID NO: 142145 - DNA, 412 bp, Homo sapiens
  Payload ID: 7990
  Gene Symbol: IGHV1-69
  Gene Name: immunoglobulin heavy variable 1-69
  ENST ID: ENST00000390633
  CDS Start-End: 62-412
agcatcacataacaaccacattcctcctctgaagaagcccctgggagcacagctcatcaccatggactggacctggaggttcctctttgtggtggcagcagctacaggtgtccagtcccaggtgcagctggtgcagtctggggctgaggtgaagaagcctgggtcctcggtgaaggtctcctgcaaggcttctggaggcaccttcagcagctatgctatcagctgggtgcgacaggcccctggacaagggcttgagtggatgggagggatcatccctatctttggtacagcaaactacgcacagaagttccagggcagagtcacgattaccgcggacaaatccacgagcacagcctacatggagctgagcagcctgagatctgaggacacggccgtgtattactgtgcgaga

SEQ ID NO: 142146 - DNA, 414 bp, Homo sapiens
  Payload ID: 7990
  Gene Symbol: IGHV1-69
  Gene Name: immunoglobulin heavy variable 1-69
  ENST ID: ENST00000632882
  CDS Start-End: 62-414
agcatcacataacaaccacattcctcctctgaagaagcccctgggagcacagctcatcaccatggactggacctggaggttcctctttgtggtggcagcagctacaggtgtccagtcccaggtgcagctggtgcagtctggggctgaggtgaagaagcctgggtcctcggtgaaggtctcctgcaaggcttctggaggcaccttcagcagctatgctatcagctgggtgcgacaggcccctggacaagggcttgagtggatgggagggatcatccctatctttggtacagcaaactacgcacagaagttccagggcagagtcacgattaccgcggacaaatccacgagcacagcctacatggagctgagcagcctgagatctgaggacacggccgtgtattactgtgcgagaga

SEQ ID NO: 142147 - DNA, 411 bp, Homo sapiens
  Payload ID: 7991
  Gene Symbol: IGHV1-69-2
  Gene Name: immunoglobulin heavy variable 1-69-2
  ENST ID: ENST00000624687
  CDS Start-End: 59-411
atcacataacaaccacattcctcctctaaagaagcccctgggagcacagctcatcaccatggactggacctggaggttcctctttgtggtggcagcagctacaggtgtccagtcccaggtgcagctggtgcagtctggggctgaggtgaagaagcctgggtcctcggtgaaggtctcctgcaaggcttctggaggcaccttcagcagctatgctatcagctgggtgcgacaggcccctggacaagggcttgagtggatgggagggatcatccctatctttggtacagcaaactacgcacagaagttccagggcagagtcacgattaccgcggacgaatccacgagcacagcctacatggagctgagcagcctgagatctgaggacacggccgtgtattactgtgcgagaga

SEQ ID NO: 142148 - DNA, 411 bp, Homo sapiens
  Payload ID: 7991
  Gene Symbol: IGHV1-69-2
  Gene Name: immunoglobulin heavy variable 1-69-2
  ENST ID: ENST00000633446
  CDS Start-End: 59-411
atcacataacaaccagattcctcctctaaagaagcccctgggagcacagctcatcaccatggactggacctggaggttcctctttgtggtggcagcagctacaggtgtccagtcccaggtccagctggtgcagtctggggctgaggtgaagaagcctgggtcctcggtgaaggtctcctgcaaggcttctggaggcaccttcagcagctatgctatcagctgggtgcgacaggcccctggacaagggcttgagtggatgggagggatcatccctatctttggtacagcaaactacgcacagaagttccagggcagagtcacgattaccgcggacgaatccacgagcacagcctacatggagctgagcagcctgagatctgaggacacggccgtgtattactgtgcgagaga

SEQ ID NO: 142149 - DNA, 358 bp, Homo sapiens
  Payload ID: 7992
  Gene Symbol: IGHV2OR16-5
  Gene Name: immunoglobulin heavy variable 2/OR16-5 (non-functional)
  ENST ID: ENST00000567458
  CDS Start-End: 1-358
atggacacgttttgctccacactcctgctgctgaccaccccttcctgggtcttgtcccaggtcaccttgaaggagtctggtcctgcgctggtgaaacccacagagaccctcacgctgacctgcactctctctgggttctcactcagcacttctggaatgggtatgagctggatccgtcagcccccagggaaggccctggagtggcttgctcacatttttttgaatgacaaaaaatcctacagcacgtctctgaagaacaggctcatcatctccaaggacacctccaaaagccaggtggtccttaccatgaccaacatggaccctgtggacacagccacgtattactgtgcatggagag

SEQ ID NO: 142150 - DNA, 381 bp, Homo sapiens
  Payload ID: 7993
  Gene Symbol: IGHV2-26
  Gene Name: immunoglobulin heavy variable 2-26
  ENST ID: ENST00000390611
  CDS Start-End: 25-381
gctcagtgactcctgtgccccaccatggacacactttgctacacactcctgctgctgaccaccccttcctgggtcttgtcccaggtcaccttgaaggagtctggtcctgtgctggtgaaacccacagagaccctcacgctgacctgcaccgtctctgggttctcactcagcaatgctagaatgggtgtgagctggatccgtcagcccccagggaaggccctggagtggcttgcacacattttttcgaatgacgaaaaatcctacagcacatctctgaagagcaggctcaccatctccaaggacacctccaaaagccaggtggtccttaccatgaccaacatggaccctgtggacacagccacatattactgtgcacggata

SEQ ID NO: 142151 - DNA, 382 bp, Homo sapiens
  Payload ID: 7993
  Gene Symbol: IGHV2-26
  Gene Name: immunoglobulin heavy variable 2-26
  ENST ID: ENST00000632457
  CDS Start-End: 25-382
gctcagtgactcctgtgccccaccatggacacactttgctacacactcctgctgctgaccaccccttcctgggtcttgtcccaggtcaccttgaaggagtctggtcctgtgctggtgaaacccacagagaccctcacgctgacctgcaccgtctctgggttctcactcagcaatgctagaatgggtgtgagctggatccgtcagcccccagggaaggccctggagtggcttgcacacattttttcgaatgacgaaaaatcctacagcacatctctgaagagcaggctcaccatctccaaggacacctccaaaagccaggtggtccttaccatgaccaacatggaccctgtggacacagccacatattactgtgcacggatac

SEQ ID NO: 142152 - DNA, 378 bp, Homo sapiens
  Payload ID: 7994
  Gene Symbol: IGHV2-5
  Gene Name: immunoglobulin heavy variable 2-5
  ENST ID: ENST00000390597
  CDS Start-End: 21-378
agtgactcctgtgccccaccatggacacactttgctccacgctcctgctgctgaccatcccttcatgggtcttgtcccagatcaccttgaaggagtctggtcctacgctggtgaaacccacacagaccctcacgctgacctgcaccttctctgggttctcactcagcactagtggagtgggtgtgggctggatccgtcagcccccaggaaaggccctggagtggcttgcactcatttattgggatgatgataagcgctacagcccatctctgaagagcaggctcaccatcaccaaggacacctccaaaaaccaggtggtccttacaatgaccaacatggaccctgtggacacagccacatattactgtgcacacagac

SEQ ID NO: 142153 - DNA, 378 bp, Homo sapiens; identical to SEQ ID NO: 142152
  Payload ID: 7994
  Gene Symbol: IGHV2-5
  Gene Name: immunoglobulin heavy variable 2-5
  ENST ID: ENST00000560724
  CDS Start-End: 21-378

SEQ ID NO: 142154 - DNA, 358 bp, Homo sapiens
  Payload ID: 7995
  Gene Symbol: IGHV2-70
  Gene Name: immunoglobulin heavy variable 2-70
  ENST ID: ENST00000617374
  CDS Start-End: 1-358
atggacatactttgttccacgctcctgctactgactgtcccgtcctgggtcttatcccaggtcaccttgagggagtctggtcctgcgctggtgaaacccacacagaccctcacactgacctgcaccttctctgggttctcactcagcactagtggaatgtgtgtgagctggatccgtcagcccccagggaaggccctggagtggcttgcactcattgattgggatgatgataaatactacagcacatctctgaagaccaggctcaccatctccaaggacacctccaaaaaccaggtggtccttacaatgaccaacatggaccctgtggacacagccacgtattactgtgcacggatac

SEQ ID NO: 142155 - DNA, 434 bp, Homo sapiens
  Payload ID: 7995
  Gene Symbol: IGHV2-70
  Gene Name: immunoglobulin heavy variable 2-70
  ENST ID: ENST00000632173
  CDS Start-End: 77-434
atctccaccagctccaccctcccctgggttcaaaagacgaggacagggcctcgctcagtgaatcctgctccccaccatggacatgctttgttccatgctcctgctactgactgtcccgtcttgggtcttatcccaggtcaccttgaaggagtctggtcctgcgctggtgaaacccacacagaccctcacgctgacctgcaccttctctgggttctcactcagcactactggaatgcgtgtgagctggatccgtcggcccccagggaaggccctggagtggcttgcacgcattgattgggatgatgataaatactgcagcacatctctgaagaccaggctcaccatctccaaggacacctccaaaaaccaggtggtccttacaatgaccaacatggaccctgtggacacagccacgtattactgtgcacggatac

SEQ ID NO: 142156 - DNA, 359 bp, Homo sapiens
  Payload ID: 7996
  Gene Symbol: IGHV3OR15-7
  Gene Name: immunoglobulin heavy variable 3/OR15-7 (pseudogene)
  ENST ID: ENST00000558565
  CDS Start-End: 1-359
atggagtttgggctgagctgggttttccttgttgctattttaaaaggtgtccagtgtgaggtgcagctggtggagtctgggggaggcttggtccagcctgggggttctctgagactctcatgtgcagcctctggattcaccttcagtgaccactacatgagctgggtccgccaggctcaagggaaagggctagagttggtaggtttaataagaaacaaagctaacagttacacgacagaatatgctgcgtctgtgaaaggcagacttaccatctcaagagaggattcaaagaacacgctgtatctgcaaatgagcaacctgaaaaccgaggacttggccgtgtattactgtgctagaga

SEQ ID NO: 142157 - DNA, 350 bp, Homo sapiens
  Payload ID: 7997
  Gene Symbol: IGHV3OR16-10
  Gene Name: immunoglobulin heavy variable 3/OR16-10 (non-functional)
  ENST ID: ENST00000425181
  CDS Start-End: 1-350
atggagtttgtgctgagctgggttttccttgttgctatattaaaaggtgtccagtgtgaggttcagctggtgcagtctgggggaggcttggtacatcctggggggtccctgagactctcctgtgcaggctctggattcaccttcagtagctatgctatgcactgggttcgccaggctccaggaaaaggtctggagtgggtatcagctattggtactggtggtggcacatactatgcagactccgtgaagggccgattcaccatctccagagacaatgccaagaactccttgtatcttcaaatgaacagcctgagagccgaggacatggctgtgtattactgtgcaagaga

SEQ ID NO: 142158 - DNA, 353 bp, Homo sapiens
  Payload ID: 7998
  Gene Symbol: IGHV3OR16-12
  Gene Name: immunoglobulin heavy variable 3/OR16-12 (non-functional)
  ENST ID: ENST00000570121
  CDS Start-End: 1-353
atggagtttgagctcagctgggttttccttgttgctattttacaaggtgtccactgtgaggtgcagctggtagagtctgggagaggcttggcccagcctggggggtacctaaaactctccggtgcagcctctggattcaccgtcggtagctggtacatgagctggatccaccaggctccagggaagggtctggagtgggtctcatacattagtagtagtggttgtagcacaaactacgcagactctgtgaagggcagattcaccatctccacagacaactcaaagaacacgctctacctgcaaatgaacagcctgagagtggaggacacggccgtgtattactgtgcaagaga

SEQ ID NO: 142159 - DNA, 353 bp, Homo sapiens
  Payload ID: 7999
  Gene Symbol: IGHV3OR16-13
  Gene Name: immunoglobulin heavy variable 3/OR16-13 (non-functional)
  ENST ID: ENST00000562905
  CDS Start-End: 1-353
atggagtttgggctgagctgggttttccttgttgctattttaaaaggtgtccagtgtgaggtgcagctggtggagtctgggggaggcttagtacagcctggagggtccctgagactctcctgtgcagcctctggattcaccttcagtagctactggatgcactgggtccgccaagctccagggaaggggctggtgtgggtctcacgtattaatagtgatgggagtagcacaagctacgcagactccatgaagggccaattcaccatctccagagacaatgctaagaacacgctgtatctgcaaatgaacagtctgagagctgaggacatggctgtgtattactgtactagaga

SEQ ID NO: 142160 - DNA, 349 bp, Homo sapiens
  Payload ID: 8000
  Gene Symbol: IGHV3OR16-8
  Gene Name: immunoglobulin heavy variable 3/OR16-8 (non-functional)
  ENST ID: ENST00000565407
  CDS Start-End: 1-349
atggagtttgggctgaactgggttttccttgttgctattataaaaggtgcccagtgtgaggtgcagctggtggagtctgggggaggcttggtacagcctggggggtccctgagactgtcctgtccagcctctggattcaccttcagtaaccactacatgagctgggtccgccaggctccagggaagggactggagtgggtttcatacattagtggtgatagtggttacacaaactacgcagactctgtgaagggccgattcaccatctccagggacaacgccaataactcaccgtatctgcaaatgaacagcctgagagctgaggacacggctgtgtattactgtgtga

SEQ ID NO: 142161 - DNA, 294 bp, Homo sapiens
  Payload ID: 8001
  Gene Symbol: IGHV3OR16-9
  Gene Name: immunoglobulin heavy variable 3/OR16-9 (non-functional)
  ENST ID: ENST00000354689
  CDS Start-End: 1-294
gaggtgcagctggtggagtctggaggaggcttggtacagcctggggggtccctgagactctcctgtgcagcctctggattcaccttcagtaaccactacacgagctgggtccgccaggctccagggaagggactggagtgggtttcatacagtagtggtaatagtggttacacaaactacgcagactctgtgaaaggccgattcaccatctccagggacaacgccaagaactcactgtatctgcaaatgaacagcctgagagccgaggacacggctgtgtattactgtgtgaaa

SEQ ID NO: 142162 - DNA, 288 bp, Homo sapiens
  Payload ID: 8001
  Gene Symbol: IGHV3OR16-9
  Gene Name: immunoglobulin heavy variable 3/OR16-9 (non-functional)
  ENST ID: ENST00000558425
  CDS Start-End: 1-288
gaggtgcagctggtggagtctggaggaggcttggtacagcctggggggtccctgagactctcctgtgcagcctctggattcaccttcagtaaccactacacgagctgggtccgccaggctccagggaagggactggagtgggtttcatacagtagtggtaatagtggttacacaaactacgcagactctgtgaaaggccgattcaccatctccagggacaacgccaagaactcactgtatctgcaaatgaacagcctgagagccgaggacacggctgtgtattactgt

SEQ ID NO: 142163 - DNA, 473 bp, Homo sapiens
  Payload ID: 8002
  Gene Symbol: IGHV3-11
  Gene Name: immunoglobulin heavy variable 3-11 (gene/pseudogene)
  ENST ID: ENST00000390601
  CDS Start-End: 121-473
ctccctctgctgataaaaaccagccgagcccagaccctgcagctctgggagaagagccccagccccagaattcccaggagtttccattcggtgatcagcactgaacacagaggactcaccatggagtttgggctgagctgggttttccttgttgctattataaaaggtgtccagtgtcaggtgcagctggtggagtctgggggaggcttggtcaagcctggagggtccctgagactctcctgtgcagcctctggattcaccttcagtgactactacatgagctggatccgccaggctccagggaaggggctggagtgggtttcatacattagtagtagtagtagttacacaaactacgcagactctgtgaagggccgattcaccatctccagagacaacgccaagaactcactgtatctgcaaatgaacagcctgagagccgaggacacggctgtgtattactgtgcgagaga

SEQ ID NO: 142164 - DNA, 473 bp, Homo sapiens; identical to SEQ ID NO: 142163
  Payload ID: 8002
  Gene Symbol: IGHV3-11
  Gene Name: immunoglobulin heavy variable 3-11 (gene/pseudogene)
  ENST ID: ENST00000634015
  CDS Start-End: 121-473

SEQ ID NO: 142165 - DNA, 430 bp, Homo sapiens
  Payload ID: 8003
  Gene Symbol: IGHV3-13
  Gene Name: immunoglobulin heavy variable 3-13
  ENST ID: ENST00000390602
  CDS Start-End: 81-430
agctctgggagtggagccccagccttgggattcccaagtgtttgtattcagtgatcaggactgaacacacaggactcaccatggagttggggctgagctgggttttccttgttgctatattagaaggtgtccagtgtgaggtgcagctggtggagtctgggggaggcttggtacagcctggggggtccctgagactctcctgtgcagcctctggattcaccttcagtagctacgacatgcactgggtccgccaagctacaggaaaaggtctggagtgggtctcagctattggtactgctggtgacccatactatccaggctccgtgaagggccgattcaccatctccagagaaaatgccaagaactccttgtatcttcaaatgaacagcctgagagccggggacacggctgtgtattactgtgcaagaga

SEQ ID NO: 142166 - DNA, 430 bp, Homo sapiens; identical to SEQ ID NO: 142165
  Payload ID: 8003
  Gene Symbol: IGHV3-13
  Gene Name: immunoglobulin heavy variable 3-13
  ENST ID: ENST00000631975
  CDS Start-End: 81-430

SEQ ID NO: 142167 - DNA, 437 bp, Homo sapiens
  Payload ID: 8004
  Gene Symbol: IGHV3-15
  Gene Name: immunoglobulin heavy variable 3-15
  ENST ID: ENST00000390603
  CDS Start-End: 81-437
agctctgggagaggagccccagccttgggattcccaagtgttttcattcagtgatcaggactgaacacagaggactcaccatggagtttgggctgagctggattttccttgctgctattttaaaaggtgtccagtgtgaggtgcagctggtggagtctgggggaggcttggtaaagcctggggggtcccttagactctcctgtgcagcctctggattcactttcagtaacgcctggatgagctgggtccgccaggctccagggaaggggctggagtgggttggccgtattaaaagcaaaactgatggtgggacaacagactacgctgcacccgtgaaaggcagattcaccatctcaagagatgattcaaaaaacacgctgtatctgcaaatgaacagcctgaaaaccgaggacacagccgtgtattactgtaccaca

SEQ ID NO: 142168 - DNA, 439 bp, Homo sapiens
  Payload ID: 8004
  Gene Symbol: IGHV3-15
  Gene Name: immunoglobulin heavy variable 3-15
  ENST ID: ENST00000632959
  CDS Start-End: 81-439
agctctgggagaggagccccagccttgggattcccaagtgttttcattcagtgatcaggactgaacacagaggactcaccatggagtttgggctgagctggattttccttgctgctattttaaaaggtgtccagtgtgaggtgcagctggtggagtctgggggaggcttggtaaagcctggggggtcccttagactctcctgtgcagcctctggattcactttcagtaacgcctggatgagctgggtccgccaggctccagggaaggggctggagtgggttggccgtattaaaagcaaaactgatggtgggacaacagactacgctgcacccgtgaaaggcagattcaccatctcaagagatgattcaaaaaacacgctgtatctgcaaatgaacagcctgaaaaccgaggacacagccgtgtattactgtaccacaga

SEQ ID NO: 142169 - DNA, 425 bp, Homo sapiens
  Payload ID: 8005
  Gene Symbol: IGHV3-16
  Gene Name: immunoglobulin heavy variable 3-16 (non-functional)
  ENST ID: ENST00000390604
  CDS Start-End: 75-425
agccctgggagagaagccccagccctgggattctcaggtgtttctattgggtcaacagcaataaacaaattaccatggaatttgggctgagctgggtttttcttgctggtattttaaaaggtgtccagtgtgaggtgcagctggtggagtctgggggaggcttggtacagcctggggggtccctgagactctcctgtgcagcctctggattcaccttcagtaacagtgacatgaactgggcccgcaaggctccaggaaaggggctggagtgggtatcgggtgttagttggaatggcagtaggacgcactatgtggactccgtgaagcgccgattcatcatctccagagacaattccaggaactccctgtatctgcaaaagaacagacggagagccgaggacatggctgtgtattactgtgtgaga

SEQ ID NO: 142170 - DNA, 425 bp, Homo sapiens; identical to SEQ ID NO: 142169
  Payload ID: 8005
  Gene Symbol: IGHV3-16
  Gene Name: immunoglobulin heavy variable 3-16 (non-functional)
  ENST ID: ENST00000631755
  CDS Start-End: 75-425

SEQ ID NO: 142171 - DNA, 415 bp, Homo sapiens
  Payload ID: 8006
  Gene Symbol: IGHV3-20
  Gene Name: immunoglobulin heavy variable 3-20
  ENST ID: ENST00000390606
  CDS Start-End: 63-415
ccagccctgagattcccacgtgtttccattcagtgatcagcactgaacacagaggactcgccatggagtttgggctgagctgggttttccttgttgctattttaaaaggtgtccagtgtgaggtgcagctggtggagtctgggggaggtgtggtacggcctggggggtccctgagactctcctttgcagcctctggattcacctttgatgattatggcatgagctgggtccgccaagctccagggaaggggctggagtgggtctctggtattaattggaatggtggtagcacaggttatgcagactctgtgaagggccgattcaccatctccagagacaacgccaagaactccctgtatctgcaaatgaacagtctgagagccgaggacacggccttgtatcactgtgcgagaga

SEQ ID NO: 142172 - DNA, 415 bp, Homo sapiens; identical to SEQ ID NO: 142171
  Payload ID: 8006
  Gene Symbol: IGHV3-20
  Gene Name: immunoglobulin heavy variable 3-20
  ENST ID: ENST00000632076
  CDS Start-End: 63-415

SEQ ID NO: 142173 - DNA, 430 bp, Homo sapiens
  Payload ID: 8007
  Gene Symbol: IGHV3-21
  Gene Name: immunoglobulin heavy variable 3-21
  ENST ID: ENST00000390607
  CDS Start-End: 80-430
agctctgagagaggagccttagccctggattccaaggcctatccacttggtgatcagcactgagcaccgaggattcaccatggaactggggctccgctgggttttccttgttgctattttagaaggtgtccagtgtgaggtgcagctggtggagtctgggggaggcctggtcaagcctggggggtccctgagactctcctgtgcagcctctggattcaccttcagtagctatagcatgaactgggtccgccaggctccagggaaggggctggagtgggtctcatccattagtagtagtagtagttacatatactacgcagactcagtgaagggccgattcaccatctccagagacaacgccaagaactcactgtatctgcaaatgaacagcctgagagccgaggacacggctgtgtattactgtgcgaga

SEQ ID NO: 142174 - DNA, 432 bp, Homo sapiens
  Payload ID: 8007
  Gene Symbol: IGHV3-21
  Gene Name: immunoglobulin heavy variable 3-21
  ENST ID: ENST00000632980
  CDS Start-End: 80-432
agctctgagagaggagccttagccctggattccaaggcctatccacttggtgatcagcactgagcaccgaggattcaccatggaactggggctccgctgggttttccttgttgctattttagaaggtgtccagtgtgaggtgcagctggtggagtctgggggaggcctggtcaagcctggggggtccctgagactctcctgtgcagcctctggattcaccttcagtagctatagcatgaactgggtccgccaggctccagggaaggggctggagtgggtctcatccattagtagtagtagtagttacatatactacgcagactcagtgaagggccgattcaccatctccagagacaacgccaagaactcactgtatctgcaaatgaacagcctgagagccgaggacacggctgtgtattactgtgcgagaga

SEQ ID NO: 142175 - DNA, 432 bp, Homo sapiens
  Payload ID: 8008
  Gene Symbol: IGHV3-23
  Gene Name: immunoglobulin heavy variable 3-23
  Uniprot ID: P01764
  ENST ID: ENST00000390609
  CDS Start-End: 80-432
agctctgagagaggagcccagccctgggattttcaggtgttttcatttggtgatcaggactgaacagagagaactcaccatggagtttgggctgagctggctttttcttgtggctattttaaaaggtgtccagtgtgaggtgcagctggtggagtctgggggaggcttggtacagcctggggggtccctgagactctcctgtgcagcctctggattcacctttagcagctatgccatgagctgggtccgccaggctccagggaaggggctggagtgggtctcagctattagtggtagtggtggtagcacatactacgcagactccgtgaagggccggttcaccatctccagagacaattccaagaacacgctgtatctgcaaatgaacagcctgagagccgaggacacggccgtatattactgtgcgaaaga

SEQ ID NO: 142176 - DNA, 432 bp, Homo sapiens; identical to SEQ ID NO: 142175
  Payload ID: 8008
  Gene Symbol: IGHV3-23
  Gene Name: immunoglobulin heavy variable 3-23
  Uniprot ID: P01764
  ENST ID: ENST00000632630
  CDS Start-End: 80-432

SEQ ID NO: 142177 - DNA, 431 bp, Homo sapiens
  Payload ID: 8009
  Gene Symbol: IGHV3-30
  Gene Name: immunoglobulin heavy variable 3-30
  ENST ID: ENST00000603660
  CDS Start-End: 81-431
cagctctgggagaggagcccagcactagaagtcggcggtgtttccattcggtgatcagcactgaacacagaggactcaccatggagtttgggctgagctgggttttcctcgttgctcttttaagaggtgtccagtgtcaggtgcagctggtggagtctgggggaggcgtggtccagcctgggaggtccctgagactctcctgtgcagcctctggattcaccttcagtagctatggcatgcactgggtccgccaggctccaggcaaggggctggagtgggtggcagttatatcatatgatggaagtaataaatactatgcagactccgtgaagggccgattcaccatctccagagacaattccaagaacacgctgtatctgcaaatgaacagcctgagagctgaggacacggctgtgtattactgtgcgaaa

SEQ ID NO: 142178 - DNA, 431 bp, Homo sapiens; identical to SEQ ID NO: 142177
  Payload ID: 8009
  Gene Symbol: IGHV3-30
  Gene Name: immunoglobulin heavy variable 3-30
  ENST ID: ENST00000633400
  CDS Start-End: 81-431

SEQ ID NO: 142179 - DNA, 431 bp, Homo sapiens
  Payload ID: 8010
  Gene Symbol: IGHV3-33
  Gene Name: immunoglobulin heavy variable 3-33
  ENST ID: ENST00000390615
  CDS Start-End: 81-431
cagctctgggagaggagcccagcactagaagtcggcggtgtttccattcggtgatcagcactgaacacagaggactcaccatggagtttgggctgagctgggttttcctcgttgctcttttaagaggtgtccagtgtcaggtgcagctggtggagtctgggggaggcgtggtccagcctgggaggtccctgagactctcctgtgcagcgtctggattcaccttcagtagctatggcatgcactgggtccgccaggctccaggcaaggggctggagtgggtggcagttatatggtatgatggaagtaataaatactatgcagactccgtgaagggccgattcaccatctccagagacaattccaagaacacgctgtatctgcaaatgaacagcctgagagccgaggacacggctgtgtattactgtgcgaga

SEQ ID NO: 142180 - DNA, 420 bp, Homo sapiens
  Payload ID: 8010
  Gene Symbol: IGHV3-33
  Gene Name: immunoglobulin heavy variable 3-33
  ENST ID: ENST00000631807
  CDS Start-End: 68-420
cgagcccagcactggaagtcgccggtgtttccattcggtgatcatcactgaacacagaggactcaccatggagtttgggctgagctgggttttcctcgttgctcttttaagaggtgtccagtgtcaggtgcagctggtggagtctgggggaggcgtggtccagcctgggaggtccctgagactctcctgtgcagcctctggattcaccttcagtagctatgctatgcactgggtccgccaggctccaggcaaggggctggagtgggtggcagttatatcatatgatggaagcaataaatactacgcagactccgtgaagggccgattcaccatctccagagacaattccaagaacacgctgtatctgcaaatgaacagcctgagagctgaggacacggctgtgtattactgtgcgagaga

SEQ ID NO: 142181 - DNA, 366 bp, Homo sapiens
  Payload ID: 8011
  Gene Symbol: IGHV3-35
  Gene Name: immunoglobulin heavy variable 3-35 (non-functional)
  ENST ID: ENST00000390617
  CDS Start-End: 16-366
aacaaacaaattaccatggaatttgggctgagctgggtttttcttgctgctattttaaaaggtgtccagtgtgaggtgcagctggtggagtctgggggaggcttggtacagcctgggggatccctgagactctcctgtgcagcctctggattcaccttcagtaacagtgacatgaactgggtccatcaggctccaggaaaggggctggagtgggtatcgggtgttagttggaatggcagtaggacgcactatgcagactctgtgaagggccgattcatcatctccagagacaattccaggaacaccctgtatctgcaaacgaatagcctgagggccgaggacacggctgtgtattactgtgtgaga

SEQ ID NO: 142182 - DNA, 368 bp, Homo sapiens
  Payload ID: 8011
  Gene Symbol: IGHV3-35
  Gene Name: immunoglobulin heavy variable 3-35 (non-functional)
  ENST ID: ENST00000632225
  CDS Start-End: 16-368
aacaaacaaattaccatggaatttgggctgagctgggtttttcttgctgctattttaaaaggtgtccagtgtgaggtgcagctggtggagtctgggggaggcttggtacagcctgggggatccctgagactctcctgtgcagcctctggattcaccttcagtaacagtgacatgaactgggtccatcaggctccaggaaaggggctggagtgggtatcgggtgttagttggaatggcagtaggacgcactatgcagactctgtgaagggccgattcatcatctccagagacaattccaggaacaccctgtatctgcaaacgaatagcctgagggccgaggacacggctgtgtattactgtgtgagaaa

SEQ ID NO: 142183 - DNA, 426 bp, Homo sapiens
  Payload ID: 8012
  Gene Symbol: IGHV3-38
  Gene Name: immunoglobulin heavy variable 3-38 (non-functional)
  ENST ID: ENST00000390618
  CDS Start-End: 79-426
ctctgggagtggagccccagccttgggattcccaggtgtttcccttcagtgatcaggactgaacacacacaactcatcatgcagtttgtgctgagctgggttttccttgttggtattttaaaaggtgtccagtgtgaggtgcagctggtggagtctgggggaggcttggtacagcctagggggtccctgagactctcctgtgcagcctctggattcaccgtcagtagcaatgagatgagctggatccgccaggctccagggaaggggctggagtgggtctcatccattagtggtggtagcacatactacgcagactccaggaagggcagattcaccatctccagagacaattccaagaacacgctgtatcttcaaatgaacaacctgagagctgagggcacggccgtgtattactgtgccagatat

SEQ ID NO: 142184 - DNA, 427 bp, Homo sapiens
  Payload ID: 8012
  Gene Symbol: IGHV3-38
  Gene Name: immunoglobulin heavy variable 3-38 (non-functional)
  ENST ID: ENST00000631785
  CDS Start-End: 79-427
ctctgggagtggagccccagccttgggattcccaggtgtttcccttcagtgatcaggactgaacacacacaactcatcatgcagtttgtgctgagctgggttttccttgttggtattttaaaaggtgtccagtgtgaggtgcagctggtggagtctgggggaggcttggtacagcctagggggtccctgagactctcctgtgcagcctctggattcaccgtcagtagcaatgagatgagctggatccgccaggctccagggaaggggctggagtgggtctcatccattagtggtggtagcacatactacgcagactccaggaagggcagattcaccatctccagagacaattccaagaacacgctgtatcttcaaatgaacaacctgagagctgagggcacggccgtgtattactgtgccagatata

SEQ ID NO: 142185 - DNA, 434 bp, Homo sapiens
  Payload ID: 8013
  Gene Symbol: IGHV3-43
  Gene Name: immunoglobulin heavy variable 3-43
  ENST ID: ENST00000434710
  CDS Start-End: 81-434
agctctgggagaggagccccagccctgagattcccaggtgtttccattcggtgatcagcactgaacacagagaacgcaccatggagtttggactgagctgggttttccttgttgctattttaaaaggtgtccagtgtgaagtgcagctggtggagtctgggggagtcgtggtacagcctggggggtccctgagactctcctgtgcagcctctggattcacctttgatgattataccatgcactgggtccgtcaagctccggggaagggtctggagtgggtctctcttattagttgggatggtggtagcacatactatgcagactctgtgaagggccgattcaccatctccagagacaacagcaaaaactccctgtatctgcaaatgaacagtctgagaactgaggacaccgccttgtattactgtgcaaaagat

SEQ ID NO: 142186 - DNA, 435 bp, Homo sapiens
  Payload ID: 8013
  Gene Symbol: IGHV3-43
  Gene Name: immunoglobulin heavy variable 3-43
  ENST ID: ENST00000633040
  CDS Start-End: 81-435
agctctgggagaggagccccagccctgagattcccaggtgtttccattcggtgatcagcactgaacacagagaacgcaccatggagtttggactgagctgggttttccttgttgctattttaaaaggtgtccagtgtgaagtgcagctggtggagtctgggggagtcgtggtacagcctggggggtccctgagactctcctgtgcagcctctggattcacctttgatgattataccatgcactgggtccgtcaagctccggggaagggtctggagtgggtctctcttattagttgggatggtggtagcacatactatgcagactctgtgaagggccgattcaccatctccagagacaacagcaaaaactccctgtatctgcaaatgaacagtctgagaactgaggacaccgccttgtattactgtgcaaaagata

SEQ ID NO: 142187 - DNA, 432 bp, Homo sapiens
  Payload ID: 8014
  Gene Symbol: IGHV3-48
  Gene Name: immunoglobulin heavy variable 3-48
  ENST ID: ENST00000390624
  CDS Start-End: 80-432
agctctcagagaggtgccttagccctggattccaaggcatttccacttggtgatcagcactgaacacagaggactcaccatggagttggggctgtgctgggttttccttgttgctattttagaaggtgtccagtgtgaggtgcagctggtggagtctgggggaggcttggtacagcctggagggtccctgagactctcctgtgcagcctctggattcaccttcagtagttatgaaatgaactgggtccgccaggctccagggaaggggctggagtgggtttcatacattagtagtagtggtagtaccatatactacgcagactctgtgaagggccgattcaccatctccagagacaacgccaagaactcactgtatctgcaaatgaacagcctgagagccgaggacacggctgtttattactgtgcgagaga

SEQ ID NO: 142188 - DNA, 432 bp, Homo sapiens; identical to SEQ ID NO: 142187
  Payload ID: 8014
  Gene Symbol: IGHV3-48
  Gene Name: immunoglobulin heavy variable 3-48
  ENST ID: ENST00000632296
  CDS Start-End: 80-432

SEQ ID NO: 142189 - DNA, 439 bp, Homo sapiens
  Payload ID: 8015
  Gene Symbol: IGHV3-49
  Gene Name: immunoglobulin heavy variable 3-49
  ENST ID: ENST00000390625
  CDS Start-End: 81-439
agctctgggagaggagccccagccgtgagattcccaggagtttccacttggtgatcagcactgaacacagaccaccaaccatggagtttgggcttagctgggttttccttgttgctattttaaaaggtgtccaatgtgaggtgcagctggtggagtctgggggaggcttggtacagccagggcggtccctgagactctcctgtacagcttctggattcacctttggtgattatgctatgagctgggtccgccaggctccagggaaggggctggagtgggtaggtttcattagaagcaaagcttatggtgggacaacagaatacgccgcgtctgtgaaaggcagattcaccatctcaagagatgattccaaaagcatcgcctatctgcaaatgaacagcctgaaaaccgaggacacagccgtgtattactgtactagaga

SEQ ID NO: 142190 - DNA, 342 bp, Homo sapiens
  Payload ID: 8015
  Gene Symbol: IGHV3-49
  Gene Name: immunoglobulin heavy variable 3-49
  ENST ID: ENST00000613477
  CDS Start-End: 1-342
gctattttaaaaggtgtccaatgtgaggtgcagctggtggagtctgggggaggcttggtacagccagggcggtccctgagactctcctgtacagcttctggattcacctttggtgattatgctatgagctgggtccgccaggctccagggaaggggctggagtgggtaggtttcattagaagcaaagcttatggtgggacaacagaatacgccgcgtctgtgaaaggcagattcaccatctcaagagatgattccaaaagcatcgcctatctgcaaatgaacagcctgaaaaccgaggacacagccgtgtattactgtactagagacacagtgaggggaggt

SEQ ID NO: 142191 - DNA, 342 bp, Homo sapiens; identical to SEQ ID NO: 142190
  Payload ID: 8015
  Gene Symbol: IGHV3-49
  Gene Name: immunoglobulin heavy variable 3-49
  ENST ID: ENST00000614109
  CDS Start-End: 1-342

SEQ ID NO: 142192 - DNA, 439 bp, Homo sapiens; identical to SEQ ID NO: 142189
  Payload ID: 8015
  Gene Symbol: IGHV3-49
  Gene Name: immunoglobulin heavy variable 3-49
  ENST ID: ENST00000632211
  CDS Start-End: 81-439

SEQ ID NO: 142193 - DNA, 571 bp, Homo sapiens
  Payload ID: 8016
  Gene Symbol: IGHV3-53
  Gene Name: immunoglobulin heavy variable 3-53
  ENST ID: ENST00000390627
  CDS Start-End: 222-571
aataccaatctcccccaggacacttcatctgcacggagcccggcctctcctcagatgtcccaccccagagcttgctatatagtcggggacatgcaaatagggccctccctctgctgatgaaaaccagcccagctgaccctgcagctctgggagaggagcccagcactgggattccgaggtgtttccattcggtgatcagcactgaacacagaggactcaccatggagttttggctgagctgggttttccttgttgctatttcaaaaggtgtccagtgtgaggtgcagctggtggagactggaggaggcttgatccagcctggggggtccctgagactctcctgtgcagcctctgggttcaccgtcagtagcaactacatgagctgggtccgccaggctccagggaaggggctggagtgggtctcagttatttatagcggtggtagcacatactacgcagactccgtgaagggccgattcaccatctccagagacaattccaagaacacgctgtatcttcaaatgaacagcctgagagccgaggacacggccgtgtattactgtgcgagaga

SEQ ID NO: 142194 - DNA, 571 bp, Homo sapiens; identical to SEQ ID NO: 142193
  Payload ID: 8016
  Gene Symbol: IGHV3-53
  Gene Name: immunoglobulin heavy variable 3-53
  ENST ID: ENST00000633426
  CDS Start-End: 222-571

SEQ ID NO: 142195 - DNA, 431 bp, Homo sapiens
  Payload ID: 8017
  Gene Symbol: IGHV3-64
  Gene Name: immunoglobulin heavy variable 3-64
  ENST ID: ENST00000454421
  CDS Start-End: 78-431
agctctgggagaggagcccccgccctgggattcccaggtgttttcatttggtgatcagcactgaacacagaagagtcatgatggagtttgggctgagctgggttttccttgttgctatttttaaaggtgtccagtgtgaggtgcagctggtggagtctggggaaggcttggtccagcctggggggtccctgagactctcctgtgcagcctctggattcaccttcagtagctatgctatgcactgggtccgccaggctccagggaagggactggaatatgtttcagctattagtagtaatgggggtagcacatattatgcagactctgtgaagggcagattcaccatctccagagacaattccaagaacacgctgtatcttcaaatgggcagcctgagagctgaggacatggctgtgtattactgtgcgaga

SEQ ID NO: 142196 - DNA, 225 bp, Homo sapiens
  Payload ID: 8017
  Gene Symbol: IGHV3-64
  Gene Name: immunoglobulin heavy variable 3-64
  ENST ID: ENST00000618085
  CDS Start-End: 1-225
gcctctggattcaccttcagtagctatgctatgcactgggtccgccaggctccagggaagggactggaatatgtttcagctattagtagtaatgggggtagcacatattatgcagactctgtgaagggccgattcaccatctccagagacaatgcccagaattcactgtatctgcaaatgaacagcctgagagccgacgacatggctgtgtattactgtgtgaaa

SEQ ID NO: 142197 - DNA, 225 bp, Homo sapiens; identical to SEQ ID NO: 142196
  Payload ID: 8017
  Gene Symbol: IGHV3-64
  Gene Name: immunoglobulin heavy variable 3-64
  ENST ID: ENST00000611989
  CDS Start-End: 1-225

SEQ ID NO: 142198 - DNA, 433 bp, Homo sapiens
  Payload ID: 8017
  Gene Symbol: IGHV3-64
  Gene Name: immunoglobulin heavy variable 3-64
  ENST ID: ENST00000631710
  CDS Start-End: 78-433
agctctgggagaggagcccccgccctgggattcccaggtgttttcatttggtgatcagcactgaacacagaagagtcatgatggagtttgggctgagctgggttttccttgttgctatttttaaaggtgtccagtgtgaggtgcagctggtggagtctggggaaggcttggtccagcctggggggtccctgagactctcctgtgcagcctctggattcaccttcagtagctatgctatgcactgggtccgccaggctccagggaagggactggaatatgtttcagctattagtagtaatgggggtagcacatattatgcagactctgtgaagggcagattcaccatctccagagacaattccaagaacacgctgtatcttcaaatgggcagcctgagagctgaggacatggctgtgtattactgtgcgagaga

SEQ ID NO: 142199 - DNA, 427 bp, Homo sapiens
  Payload ID: 8018
  Gene Symbol: IGHV3-66
  Gene Name: immunoglobulin heavy variable 3-66
  ENST ID: ENST00000390632
  CDS Start-End: 80-427
agctctgggagaggagcccagcactgggattccgaggtgtttccattcagtgatctgcactgaacacagaggactcgccatggagtttgggctgagctgggttttccttgttgctattttaaaaggtgtccagtgtgaggtgcagctggtggagtctggaggaggcttgatccagcctggggggtccctgagactctcctgtgcagcctctgggttcaccgtcagtagcaactacatgagctgggtccgccaggctccagggaaggggctggagtgggtctcagttatttatagctgtggtagcacatactacgcagactccgtgaagggccgattcaccatctccagagacaattccaagaacacgctgtatcttcaaatgaacagcctgagagctgaggacacggctgtgtattactgtgcgaga

SEQ ID NO: 142200 - DNA, 429 bp, Homo sapiens
  Payload ID: 8018
  Gene Symbol: IGHV3-66
  Gene Name: immunoglobulin heavy variable 3-66
  ENST ID: ENST00000632846
  CDS Start-End: 80-429
agctctgggagaggagcccagcactgggattccgaggtgtttccattcagtgatctgcactgaacacagaggactcgccatggagtttgggctgagctgggttttccttgttgctattttaaaaggtgtccagtgtgaggtgcagctggtggagtctggaggaggcttgatccagcctggggggtccctgagactctcctgtgcagcctctgggttcaccgtcagtagcaactacatgagctgggtccgccaggctccagggaaggggctggagtgggtctcagttatttatagctgtggtagcacatactacgcagactccgtgaagggccgattcaccatctccagagacaattccaagaacacgctgtatcttcaaatgaacagcctgagagctgaggacacggctgtgtattactgtgcgagaga

SEQ ID NO: 142201 - DNA, 430 bp, Homo sapiens
  Payload ID: 8019
  Gene Symbol: IGHV3-7
  Gene Name: immunoglobulin heavy variable 3-7
  ENST ID: ENST00000390598
  CDS Start-End: 80-430
aggtctcagagaggagccttagccctggactccaaggcctttccacttggtgatcagcactgagcacagaggactcaccatggagttggggctgagctgggttttccttgttgctattttagaaggtgtccagtgtgaggtgcagctggtggagtctgggggaggcttggtccagcctggggggtccctgagactctcctgtgcagcctctggattcacctttagtagctattggatgagctgggtccgccaggctccagggaaggggctggagtgggtggccaacataaagcaagatggaagtgagaaatactatgtggactctgtgaagggccgattcaccatctccagagacaacgccaagaactcactgtatctgcaaatgaacagcctgagagccgaggacacggccgtgtattactgtgcgaga

SEQ ID NO: 142202 - DNA, 432 bp, Homo sapiens
  Payload ID: 8019
  Gene Symbol: IGHV3-7
  Gene Name: immunoglobulin heavy variable 3-7
  ENST ID: ENST00000633988
  CDS Start-End: 80-432
aggtctcagagaggagccttagccctggactccaaggcctttccacttggtgatcagcactgagcacagaggactcaccatggagttggggctgagctgggttttccttgttgctattttagaaggtgtccagtgtgaggtgcagctggtggagtctgggggaggcttggtccagcctggggggtccctgagactctcctgtgcagcctctggattcacctttagtagctattggatgagctgggtccgccaggctccagggaaggggctggagtgggtggccaacataaagcaagatggaagtgagaaatactatgtggactctgtgaagggccgattcaccatctccagagacaacgccaagaactcactgtatctgcaaatgaacagcctgagagccgaggacacggccgtgtattactgtgcgagaga

SEQ ID NO: 142203 - DNA, 437 bp, Homo sapiens
  Payload ID: 8020
  Gene Symbol: IGHV3-72
  Gene Name: immunoglobulin heavy variable 3-72
  ENST ID: ENST00000433072
  CDS Start-End: 81-437
agctctgagagcggagccccagccccagaattcccaggtgttttcatttggtgatcagcactgaacacagaggactcaccatggagtttgggctgagctgggttttccttgttgttattttacaaggtgtccagtgtgaggtgcagctggtggagtctgggggaggcttggtccagcctggagggtccctgagactctcctgtgcagcctctggattcaccttcagtgaccactacatggactgggtccgccaggctccagggaaggggctggagtgggttggccgtactagaaacaaagctaacagttacaccacagaatacgccgcgtctgtgaaaggcagattcaccatctcaagagatgattcaaagaactcactgtatctgcaaatgaacagcctgaaaaccgaggacacggccgtgtattactgtgctaga

SEQ ID NO: 142204 - DNA, 303 bp, Homo sapiens
  Payload ID: 8020
  Gene Symbol: IGHV3-72
  Gene Name: immunoglobulin heavy variable 3-72
  ENST ID: ENST00000621503
  CDS Start-End: 1-303
gaggtgcagctggtggagtctgggggaggcttggtccagcctggagggtccctgagactctcctgtgcagcctctggattcaccttcagtgaccactacatggactgggtccgccaggctccagggaaggggctggagtgggttggccgtactagaaacaaagctaacagttacaccacagaatacgccgcgtctgtgaaaggcagattcaccatctcaagagatgattcaaagaactcactgtatctgcaaatgaacagcctgaaaaccgaggacacggccgtgtattactgtgctagagac

SEQ ID NO: 142205 - DNA, 303 bp, Homo sapiens; identical to SEQ ID NO: 142204
  Payload ID: 8020
  Gene Symbol: IGHV3-72
  Gene Name: immunoglobulin heavy variable 3-72
  ENST ID: ENST00000614315
  CDS Start-End: 1-303

SEQ ID NO: 142206 - DNA, 439 bp, Homo sapiens
  Payload ID: 8020
  Gene Symbol: IGHV3-72
  Gene Name: immunoglobulin heavy variable 3-72
  ENST ID: ENST00000633602
  CDS Start-End: 81-439
agctctgagagcggagccccagccccagaattcccaggtgttttcatttggtgatcagcactgaacacagaggactcaccatggagtttgggctgagctgggttttccttgttgttattttacaaggtgtccagtgtgaggtgcagctggtggagtctgggggaggcttggtccagcctggagggtccctgagactctcctgtgcagcctctggattcaccttcagtgaccactacatggactgggtccgccaggctccagggaaggggctggagtgggttggccgtactagaaacaaagctaacagttacaccacagaatacgccgcgtctgtgaaaggcagattcaccatctcaagagatgattcaaagaactcactgtatctgcaaatgaacagcctgaaaaccgaggacacggccgtgtattactgtgctagaga

SEQ ID NO: 142207 - DNA, 437 bp, Homo sapiens
  Payload ID: 8021
  Gene Symbol: IGHV3-73
  Gene Name: immunoglobulin heavy variable 3-73
  ENST ID: ENST00000390636
  CDS Start-End: 81-437
agctctgggagaggagctccagccttgggattcccagctgtctccactcggtgatcggcactgaatacaggagactcaccatggagtttgggctgagctgggttttccttgttgctattttaaaaggtgtccagtgtgaggtgcagctggtggagtccgggggaggcttggtccagcctggggggtccctgaaactctcctgtgcagcctctgggttcaccttcagtggctctgctatgcactgggtccgccaggcttccgggaaagggctggagtgggttggccgtattagaagcaaagctaacagttacgcgacagcatatgctgcgtcggtgaaaggcaggttcaccatctccagagatgattcaaagaacacggcgtatctgcaaatgaacagcctgaaaaccgaggacacggccgtgtattactgtactaga

SEQ ID NO: 142208 - DNA, 249 bp, Homo sapiens
  Payload ID: 8021
  Gene Symbol: IGHV3-73
  Gene Name: immunoglobulin heavy variable 3-73
  ENST ID: ENST00000622547
  CDS Start-End: 1-249
tccctgagactctcctgtgcagcctctggattcaccttcagtagctactggatgcactgggtccgccaagctccagggaaggggctggagtgggttggccgtattagaagcaaagctaacagttacgcgacagcatatgctgcgtcggtgaaaggcaggttcaccatctccagagatgattcaaagaacacggcgtatctgcaaatgaacagcctgaaaaccgaggacacggccgtgtattactgtact

SEQ ID NO: 142209 - DNA, 439 bp, Homo sapiens
  Payload ID: 8021
  Gene Symbol: IGHV3-73
  Gene Name: immunoglobulin heavy variable 3-73
  ENST ID: ENST00000631708
  CDS Start-End: 81-439
agctctgggagaggagctccagccttgggattcccagctgtctccactcggtgatcggcactgaatacaggagactcaccatggagtttgggctgagctgggttttccttgttgctattttaaaaggtgtccagtgtgaggtgcagctggtggagtccgggggaggcttggtccagcctggggggtccctgaaactctcctgtgcagcctctgggttcaccttcagtggctctgctatgcactgggtccgccaggcttccgggaaagggctggagtgggttggccgtattagaagcaaagctaacagttacgcgacagcatatgctgcgtcggtgaaaggcaggttcaccatctccagagatgattcaaagaacacggcgtatctgcaaatgaacagcctgaaaaccgaggacacggccgtgtattactgtactagaca

SEQ ID NO: 142210 - DNA, 587 bp, Homo sapiens
  Payload ID: 8022
  Gene Symbol: IGHV3-74
  Gene Name: immunoglobulin heavy variable 3-74
  ENST ID: ENST00000424969
  CDS Start-End: 237-587
aatttctcaaatcccattgttgtcacccatcttcctcaggacactttcatctgccctgggtcctgctctttcttcaggtgtctcaccccagagcttgatatatagtaggagacatgcaaatagggccctcactctgctgaagaaaaccagccctgcagctctgggagaggagccccagccctgggattcccagctgtttctgcttgctgatcaggactgcacacagagaactcaccatggagtttgggctgagctgggttttccttgttgctattttaaaaggtgtccagtgtgaggtgcagctggtggagtccgggggaggcttagttcagcctggggggtccctgagactctcctgtgcagcctctggattcaccttcagtagctactggatgcactgggtccgccaagctccagggaaggggctggtgtgggtctcacgtattaatagtgatgggagtagcacaagctacgcggactccgtgaagggccgattcaccatctccagagacaacgccaagaacacgctgtatctgcaaatgaacagtctgagagccgaggacacggctgtgtattactgtgcaaga

SEQ ID NO: 142211 - DNA, 589 bp, Homo sapiens
  Payload ID: 8022
  Gene Symbol: IGHV3-74
  Gene Name: immunoglobulin heavy variable 3-74
  ENST ID: ENST00000633987
  CDS Start-End: 237-589
aatttctcaaatcccattgttgtcacccatcttcctcaggacactttcatctgccctgggtcctgctctttcttcaggtgtctcaccccagagcttgatatatagtaggagacatgcaaatagggccctcactctgctgaagaaaaccagccctgcagctctgggagaggagccccagccctgggattcccagctgtttctgcttgctgatcaggactgcacacagagaactcaccatggagtttgggctgagctgggttttccttgttgctattttaaaaggtgtccagtgtgaggtgcagctggtggagtccgggggaggcttagttcagcctggggggtccctgagactctcctgtgcagcctctggattcaccttcagtagctactggatgcactgggtccgccaagctccagggaaggggctggtgtgggtctcacgtattaatagtgatgggagtagcacaagctacgcggactccgtgaagggccgattcaccatctccagagacaacgccaagaacacgctgtatctgcaaatgaacagtctgagagccgaggacacggctgtgtattactgtgcaagaga

SEQ ID NO: 142212 - DNA, 353 bp, Homo sapiens
  Payload ID: 8023
  Gene Symbol: IGHV4OR15-8
  Gene Name: immunoglobulin heavy variable 4/OR15-8 (non-functional)
  ENST ID: ENST00000557788
  CDS Start-End: 1-353
atgaaacacctgtggttctttctcctcctggtggcagctcccagatgggtcctgtcccaggtgcagctgcaggagtcgggcccaggactggtgaagccttcggagaccctgtccctcacctgcgttgtctctggtggctccatcagcagtagtaactggtggagctgggtccgccagcccccagggaaggggctggagtggattggggaaatctatcatagtgggagccccaactacaacccgtccctcaagagtcgagtcaccatatcagtagacaagtccaagaaccagttctccctgaagctgagctctgtgaccgccgcggacagggccgtgtattactgtgcgagaga

SEQ ID NO: 142213 - DNA, 425 bp, Homo sapiens
  Payload ID: 8024
  Gene Symbol: IGHV4-28
  Gene Name: immunoglobulin heavy variable 4-28
  ENST ID: ENST00000390612
  CDS Start-End: 73-425
atttccttaaattcagggtcctgctcacatgggaaatactttctgagagtcctggacctcctgtgcaagaacatgaaacacctgtggttcttcctcctgctggtggcagctcccagatgggtcctgtcccaggtacagctgcaggagtcgggcccaggactggtgaagccttcggacaccctgtccctcacctgcgctgtctctggttactccatcagcagtagtaactggtggggctggatccggcagcccccagggaagggactggagtggattgggtacatctattatagtgggagcacctactacaacccgtccctcaagagtcgagtcaccatgtcagtagacacgtccaagaaccagttctccctgaagctgagctctgtgaccgccgtggacacggccgtgtattactgtgcgagaaa

SEQ ID NO: 142214 - DNA, 425 bp, Homo sapiens; identical to SEQ ID NO: 142213
  Payload ID: 8024
  Gene Symbol: IGHV4-28
  Gene Name: immunoglobulin heavy variable 4-28
  ENST ID: ENST00000632719
  CDS Start-End: 73-425

SEQ ID NO: 142215 - DNA, 428 bp, Homo sapiens
  Payload ID: 8025
  Gene Symbol: IGHV4-31
  Gene Name: immunoglobulin heavy variable 4-31
  ENST ID: ENST00000438142
  CDS Start-End: 73-428
atttccttaaattcagggtccagctcacatgggaaatactttctgagagtcctggacctcctgtgcaagaacatgaaacacctgtggttcttcctcctgctggtggcagctcccagatgggtcctgtcccagctgcagctgcaggagtccggctcaggactggtgaagccttcacagaccctgtccctcacctgcgctgtctctggtggctccatcagcagtggtggttactcctggagctggatccggcagccaccagggaagggcctggagtggattgggtacatctatcatagtgggagcacctactacaacccgtccctcaagagtcgagtcaccatatcagtagacaggtccaagaaccagttctccctgaagctgagctctgtgaccgccgcggacacggccgtgtattactgtgccagaga

SEQ ID NO: 142216 - DNA, 391 bp, Homo sapiens
  Payload ID: 8025
  Gene Symbol: IGHV4-31
  Gene Name: immunoglobulin heavy variable 4-31
  ENST ID: ENST00000632151
  CDS Start-End: 36-391
actttctgagagtcctggacctcctgcacaagaacatgaaacacctgtggttcttcctcctgctggtggcagctcccagatgggtcctgtcccagctgcagctgcaggagtccggctcaggactggtgaagccttcacagaccctgtccctcacctgcgctgtctctggtggctccatcagcagtggtggttactcctggagctggatccggcagccaccagggaagggcctggagtggattgggtacatctatcatagtgggagcacctactacaacccgtccctcaagagtcgagtcaccatatcagtagacaggtccaagaaccagttctccctgaagctgagctctgtgaccgccgcggacacggccgtgtattactgtgccagaga

SEQ ID NO: 142217 - DNA, 400 bp, Homo sapiens
  Payload ID: 8026
  Gene Symbol: IGHV4-34
  Gene Name: immunoglobulin heavy variable 4-34
  ENST ID: ENST00000390616
  CDS Start-End: 32-400
cagctcacatgggaagtgctttctgagagtcatggacctcctgcacaagaacatgaaacacctgtggttcttcctcctcctggtggcagctcccagatgggtcctgtcccaggtgcagctacagcagtggggcgcaggactgttgaagccttcggagaccctgtccctcacctgcgctgtctatggtgggtccttcagtggttactactggagctggatccgccagcccccagggaaggggctggagtggattggggaaatcaatcatagtggaagcaccaactacaacccgtccctcaagagtcgagtcaccatatcagtagacacgtccaagaaccagttctccctgaagctgagctctgtgaccgccgcggacacggctgtgtattactgtgcgaga

SEQ ID NO: 142218 - DNA, 402 bp, Homo sapiens
  Payload ID: 8026
  Gene Symbol: IGHV4-34
  Gene Name: immunoglobulin heavy variable 4-34
  ENST ID: ENST00000612474
  CDS Start-End: 32-402
cagctcacatgggaagtgctttctgagagtcatggacctcctgcacaagaacatgaaacacctgtggttcttcctcctcctggtggcagctcccagatgggtcctgtcccaggtgcagctacagcagtggggcgcaggactgttgaagccttcggagaccctgtccctcacctgcgctgtctatggtgggtccttcagtggttactactggagctggatccgccagcccccagggaaggggctggagtggattggggaaatcaatcatagtggaagcaccaactacaacccgtccctcaagagtcgagtcaccatatcagtagacacgtccaagaaccagttctccctgaagctgagctctgtgaccgccgcggacacggctgtgtattactgtgcgagagg

SEQ ID NO: 142219 - DNA, 425 bp, Homo sapiens
  Payload ID: 8027
  Gene Symbol: IGHV4-39
  Gene Name: immunoglobulin heavy variable 4-39
  ENST ID: ENST00000390619
  CDS Start-End: 51-425
atttccttaaattcaggtccaactcataagggaaatgctttctgagagtcatggatctcatgtgcaagaaaatgaagcacctgtggttcttcctcctgctggtggcggctcccagatgggtcctgtcccagctgcagctgcaggagtcgggcccaggactggtgaagccttcggagaccctgtccctcacctgcactgtctctggtggctccatcagcagtagtagttactactggggctggatccgccagcccccagggaaggggctggagtggattgggagtatctattatagtgggagcacctactacaacccgtccctcaagagtcgagtcaccatatccgtagacacgtccaagaaccagttctccctgaagctgagctctgtgaccgccgcagacacggctgtgtattactgtgcgaga

SEQ ID NO: 142220 - DNA, 427 bp, Homo sapiens
  Payload ID: 8027
  Gene Symbol: IGHV4-39
  Gene Name: immunoglobulin heavy variable 4-39
  ENST ID: ENST00000633618
  CDS Start-End: 51-427
atttccttaaattcaggtccaactcataagggaaatgctttctgagagtcatggatctcatgtgcaagaaaatgaagcacctgtggttcttcctcctgctggtggcggctcccagatgggtcctgtcccagctgcagctgcaggagtcgggcccaggactggtgaagccttcggagaccctgtccctcacctgcactgtctctggtggctccatcagcagtagtagttactactggggctggatccgccagcccccagggaaggggctggagtggattgggagtatctattatagtgggagcacctactacaacccgtccctcaagagtcgagtcaccatatccgtagacacgtccaagaaccagttctccctgaagctgagctctgtgaccgccgcagacacggctgtgtattactgtgcgagaca

SEQ ID NO: 142221 - DNA, 417 bp, Homo sapiens
  Payload ID: 8028
  Gene Symbol: IGHV4-4
  Gene Name: immunoglobulin heavy variable 4-4
  ENST ID: ENST00000455737
  CDS Start-End: 65-417
aaattcagggtccagctcacatgggaaatactttctgagagtcatggacctcctgcacaagaacatgaaacacctgtggttcttcctcctcctggtggcagctcccagatgggtcctgtctcaggtgcagctgcaggagtcgggcccaggactggtgaagccttcggggaccctgtccctcacctgcgctgtctctggtggctccatcagcagtagtaactggtggagttgggtccgccagcccccagggaaggggctggagtggattggggaaatctatcatagtgggagcaccaactacaacccgtccctcaagagtcgagtcaccatatcagtagacaagtccaagaaccagttctccctgaagctgagctctgtgaccgccgcggacacggccgtgtattactgtgcgagaga

SEQ ID NO: 142222 - DNA, 417 bp, Homo sapiens; identical to SEQ ID NO: 142221
  Payload ID: 8028
  Gene Symbol: IGHV4-4
  Gene Name: immunoglobulin heavy variable 4-4
  ENST ID: ENST00000631379
  CDS Start-End: 65-417

SEQ ID NO: 142223 - DNA, 495 bp, Homo sapiens
  Payload ID: 8029
  Gene Symbol: IGHV4-59
  Gene Name: immunoglobulin heavy variable 4-59
  ENST ID: ENST00000390629
  CDS Start-End: 146-495
ttttcacctctccatacaaaggcaccacccacatgcaaatcctcacttaagcacccacaggaaaccaccacacatttccttaaattcaggttccagctcacatgggaaatactttctgagagtcctggacctcctgtgcaagaacatgaaacatctgtggttcttccttctcctggtggcagctcccagatgggtcctgtcccaggtgcagctgcaggagtcgggcccaggactggtgaagccttcggagaccctgtccctcacctgcactgtctctggtggctccatcagtagttactactggagctggatccggcagcccccagggaagggactggagtggattgggtatatctattacagtgggagcaccaactacaacccctccctcaagagtcgagtcaccatatcagtagacacgtccaagaaccagttctccctgaagctgagctctgtgaccgctgcggacacggccgtgtattactgtgcgagaga

SEQ ID NO: 142224 - DNA, 495 bp, Homo sapiens; identical to SEQ ID NO: 142223
  Payload ID: 8029
  Gene Symbol: IGHV4-59
  Gene Name: immunoglobulin heavy variable 4-59
  ENST ID: ENST00000619078
  CDS Start-End: 146-495

SEQ ID NO: 142225 - DNA, 457 bp, Homo sapiens
  Payload ID: 8030
  Gene Symbol: IGHV4-61
  Gene Name: immunoglobulin heavy variable 4-61
  ENST ID: ENST00000390630
  CDS Start-End: 102-457
acttaagcacccacaggaaaccaccacacatttccttaaattcaggttccagctcacatgggaaatactttctgagagtcctggacctcctgtgcaagaacatgaaacacctgtggttcttcctcctcctggtggcagctcccagatgggtcctgtcccaggtgcagctgcaggagtcgggcccaggactggtgaagccttcggagaccctgtccctcacctgcactgtctctggtggctccgtcagcagtggtagttactactggagctggatccggcagcccccagggaagggactggagtggattgggtatatctattacagtgggagcaccaactacaacccctccctcaagagtcgagtcaccatatcagtagacacgtccaagaaccagttctccctgaagctgagctctgtgaccgctgcggacacggccgtgtattactgtgcgagaga

SEQ ID NO: 142226 - DNA, 457 bp, Homo sapiens; identical to SEQ ID NO: 142225
  Payload ID: 8030
  Gene Symbol: IGHV4-61
  Gene Name: immunoglobulin heavy variable 4-61
  ENST ID: ENST00000632960
  CDS Start-End: 102-457

SEQ ID NO: 142227 - DNA, 410 bp, Homo sapiens
  Payload ID: 8031
  Gene Symbol: IGHV5-51
  Gene Name: immunoglobulin heavy variable 5-51
  ENST ID: ENST00000390626
  CDS Start-End: 60-410
tgagtctccctcactgcccagctgggatctcagggcttcattttctgtcctccaccatcatggggtcaaccgccatcctcgccctcctcctggctgttctccaaggagtctgtgccgaggtgcagctggtgcagtctggagcagaggtgaaaaagcccggggagtctctgaagatctcctgtaagggttctggatacagctttaccagctactggatcggctgggtgcgccagatgcccgggaaaggcctggagtggatggggatcatctatcctggtgactctgataccagatacagcccgtccttccaaggccaggtcaccatctcagccgacaagtccatcagcaccgcctacctgcagtggagcagcctgaaggcctcggacaccgccatgtattactgtgcgaga

SEQ ID NO: 142228 - DNA, 412 bp, Homo sapiens
  Payload ID: 8031
  Gene Symbol: IGHV5-51
  Gene Name: immunoglobulin heavy variable 5-51
  ENST ID: ENST00000620764
  CDS Start-End: 60-412
tgagtctccctcactgcccagctgggatctcagggcttcattttctgtcctccaccatcatggggtcaaccgccatcctcgccctcctcctggctgttctccaaggagtctgtgccgaggtgcagctggtgcagtctggagcagaggtgaaaaagcccggggagtctctgaagatctcctgtaagggttctggatacagctttaccagctactggatcggctgggtgcgccagatgcccgggaaaggcctggagtggatggggatcatctatcctggtgactctgataccagatacagcccgtccttccaaggccaggtcaccatctcagccgacaagtccatcagcaccgcctacctgcagtggagcagcctgaaggcctcggacaccgccatgtattactgtgcgagaca

SEQ ID NO: 142229 - DNA, 415 bp, Homo sapiens
  Payload ID: 8032
  Gene Symbol: IGHV6-1
  Gene Name: immunoglobulin heavy variable 6-1
  ENST ID: ENST00000390593
  CDS Start-End: 53-415
gcagagcctgctgaattctggctgaccagggcagtcaccagagctccagacaatgtctgtctccttcctcatcttcctgcccgtgctgggcctcccatggggtgtcctgtcacaggtacagctgcagcagtcaggtccaggactggtgaagccctcgcagaccctctcactcacctgtgccatctccggggacagtgtctctagcaacagtgctgcttggaactggatcaggcagtccccatcgagaggccttgagtggctgggaaggacatactacaggtccaagtggtataatgattatgcagtatctgtgaaaagtcgaataaccatcaacccagacacatccaagaaccagttctccctgcagctgaactctgtgactcccgaggacacggctgtgtattactgtgcaaga

SEQ ID NO: 142230 - DNA, 417 bp, Homo sapiens
  Payload ID: 8032
  Gene Symbol: IGHV6-1
  Gene Name: immunoglobulin heavy variable 6-1
  ENST ID: ENST00000633299
  CDS Start-End: 53-417
gcagagcctgctgaattctggctgaccagggcagtcaccagagctccagacaatgtctgtctccttcctcatcttcctgcccgtgctgggcctcccatggggtgtcctgtcacaggtacagctgcagcagtcaggtccaggactggtgaagccctcgcagaccctctcactcacctgtgccatctccggggacagtgtctctagcaacagtgctgcttggaactggatcaggcagtccccatcgagaggccttgagtggctgggaaggacatactacaggtccaagtggtataatgattatgcagtatctgtgaaaagtcgaataaccatcaacccagacacatccaagaaccagttctccctgcagctgaactctgtgactcccgaggacacggctgtgtattactgtgcaagaga

SEQ ID NO: 142231 - DNA, 405 bp, Homo sapiens
  Payload ID: 8033
  Gene Symbol: IGHV7-81
  Gene Name: immunoglobulin heavy variable 7-81 (non-functional)
  ENST ID: ENST00000390639
  CDS Start-End: 55-405
acccaacaacaacatccctccttgggagaatcccctagagcacagctcctcaccatggactggacctggagcatcctcttcttggtggcagcagcaacaggtacctactcccaggtgcagctggtgcagtctggccatgaggtgaagcagcctggggcctcagtgaaggtctcctgcaaggcttctggttacagtttcaccacctatggtatgaattgggtgccacaggcccctggacaagggcttgagtggatgggatggttcaacacctacactgggaacccaacatatgcccagggcttcacaggacggtttgtcttctccatggacacctctgccagcacagcatacctgcagatcagcagcctaaaggctgaggacatggccatgtattactgtgcgaga

SEQ ID NO: 142232 - DNA, 523 bp, Homo sapiens
  Payload ID: 8034
  Gene Symbol: IGKC
  Gene Name: immunoglobulin kappa constant
  ENST ID: ENST00000390237
  CDS Start-End: 1-323
gaactgtggctgcaccatctgtcttcatcttcccgccatctgatgagcagttgaaatctggaactgcctctgttgtgtgcctgctgaataacttctatcccagagaggccaaagtacagtggaaggtggataacgccctccaatcgggtaactcccaggagagtgtcacagagcaggacagcaaggacagcacctacagcctcagcagcaccctgacgctgagcaaagcagactacgagaaacacaaagtctacgcctgcgaagtcacccatcagggcctgagctcgcccgtcacaaagagcttcaacaggggagagtgttagagggagaagtgcccccacctgctcctcagttccagcctgaccccctcccatcctttggcctctgaccctttttccacaggggacctacccctattgcggtcctccagctcatctttcacctcacccccctcctcctccttggctttaattatgctaatgttggaggagaatgaataaataaagtgaatctttgcacctgt

SEQ ID NO: 142233 - DNA, 912 bp, Homo sapiens
  Payload ID: 8034
  Gene Symbol: IGKC
  Gene Name: immunoglobulin kappa constant
  ENST ID: ENST00000614656
  CDS Start-End: 1-720
gtgaggctccctgctcagctcctggggctgctaatgctctgggtccctggatccagtggggatattgtgatgacccagcatctgctctccctgcccatccctctgggagagccggcctccatctcctgcaggtctagtcagagcctcctgcatagtgatggaaacacctatttggattggtacctgcagaagccaggccagtctccacagcttcttatctacacaatttctaacaaattctatggagtcccaaacaagttcagtggcagcaggtcagggacaggtttcacacttaaattcagcaaagtggaggctgaggatgttggggtttattgctgtgaacagggtctgcaagctccatccatttttggccaggggaccaagctggagatcaaacgaactgtggctgcaccatctgtcttcatcttcccgccatctgatgagcagttgaaatctggaactgcctctgttgtgtgcctgctgaataacttctatcccagagaggccaaagtacagtggaaggtggataacgccctccaatcgggtaactcccaggagagtgtcacagagcaggacagcaaggacagcacctacagcctcagcagcaccctgacgctgagcaaagcagactacgagaaacacaaagtctacgcctgcgaagtcacccatcagggcctgagctcgcccgtcacaaagagcttcaacaggggagagtgttagagggagaagtgcccccacctgctcctcagttccagcctgaccccctcccatcctttggcctctgaccctttttccacaggggacctacccctattgcggtcctccagctcatctttcacctcacccccctcctcctccttggctttaattatgctaatgttggaggagaatgaataaataaagtgaatcttt

SEQ ID NO: 142234 - DNA, 910 bp, Homo sapiens
  Payload ID: 8034
  Gene Symbol: IGKC
  Gene Name: immunoglobulin kappa constant
  ENST ID: ENST00000430694
  CDS Start-End: 354-713
tggacatgagggtccccgctcagctcctggggcttctgctgctctggctcccaggtgccagatgtgccatccagttgacccagtctccatcctccctgtctgcatctgtaggagacagagtcaccatcacttgccgggcaagtcagggcattagcagtgctttagcctgatatcagcagaaaccagggaaagctcctaagctcctgatctatgatgcctccagtttggaaagtggggtcccatcaaggttcagcggcagtggatctgggacagatttcactctcaccatcagcagcctgcagcctgaagattttgcaacttattactgtcaacagtttaataattacctgtggctcactttcggcggagggaccaaggtggagatcaaacgaactgtggctgcaccatctgtcttcatcttcccgccatctgatgagcagttgaaatctggaactgcctctgttgtgtgcctgctgaataacttctatcccagagaggccaaagtacagtggaaggtggataacgccctccaatcgggtaactcccaggagagtgtcacagagcaggacagcaaggacagcacctacagcctcagcagcaccctgacgctgagcaaagcagactacgagaaacacaaagtctacgcctgcgaagtcacccatcagggcctgagctcgcccgtcacaaagagcttcaacaggggagagtgttagagggagaagtgcccccacctgctcctcagttccagcctgaccccctcccatcctttggcctctgaccctttttccacaggggacctacccctattgcggtcctccagctcatctttcacctcacccccctcctcctccttggctttaattatgctaatgttggaggagaatgaataaataaagtgaatctttgcacc

SEQ ID NO: 142235 - DNA, 910 bp, Homo sapiens; identical to SEQ ID NO: 142234
  Payload ID: 8034
  Gene Symbol: IGKC
  Gene Name: immunoglobulin kappa constant
  ENST ID: ENST00000611170
  CDS Start-End: 354-713

SEQ ID NO: 142236 - DNA, 523 bp, Homo sapiens; identical to SEQ ID NO: 142232
  Payload ID: 8034
  Gene Symbol: IGKC
  Gene Name: immunoglobulin kappa constant
  ENST ID: ENST00000614252
  CDS Start-End: 1-323

SEQ ID NO: 142237 - DNA, 912 bp, Homo sapiens; identical to SEQ ID NO: 142233
  Payload ID: 8034
  Gene Symbol: IGKC
  Gene Name: immunoglobulin kappa constant
  ENST ID: ENST00000610638
  CDS Start-End: 1-720

SEQ ID NO: 142238 - DNA, 38 bp, Homo sapiens
  Payload ID: 8035
  Gene Symbol: IGKJ1
  Gene Name: immunoglobulin kappa joining 1
  ENST ID: ENST00000390242
  CDS Start-End: 1-38
gtggacgttcggccaagggaccaaggtggaaatcaaac

SEQ ID NO: 142239 - DNA, 39 bp, Homo sapiens
  Payload ID: 8036
  Gene Symbol: IGKJ2
  Gene Name: immunoglobulin kappa joining 2
  ENST ID: ENST00000390241
  CDS Start-End: 1-39
tgtgcagttttggccaggggaccaagctggagatcaaac

SEQ ID NO: 142240 - DNA, 38 bp, Homo sapiens
  Payload ID: 8037
  Gene Symbol: IGKJ3
  Gene Name: immunoglobulin kappa joining 3
  ENST ID: ENST00000390240
  CDS Start-End: 1-38
attcactttcggccctgggaccaaagtggatatcaaac

SEQ ID NO: 142241 - DNA, 37 bp, Homo sapiens
  Payload ID: 8038
  Gene Symbol: IGKJ4
  Gene Name: immunoglobulin kappa joining 4
  ENST ID: ENST00000390239
  CDS Start-End: 1-37
ctcactttcggcggagggaccaaggtggagatcaaac

SEQ ID NO: 142242 - DNA, 38 bp, Homo sapiens
  Payload ID: 8039
  Gene Symbol: IGKJ5
  Gene Name: immunoglobulin kappa joining 5
  ENST ID: ENST00000390238
  CDS Start-End: 1-38
gatcaccttcggccaagggacacgactggagattaaac

SEQ ID NO: 142243 - DNA, 353 bp, Homo sapiens
  Payload ID: 8040
  Gene Symbol: IGKV1OR2-108
  Gene Name: immunoglobulin kappa variable 1/OR2-108 (non-functional)
  ENST ID: ENST00000453673
  CDS Start-End: 1-353
atggaaatgagggtccccgctcagctcctggggctcctgctgctctggctccgaggtgccagatgtgacatccaggtgacccagtctccatcttccctgtctgcgtctgtaggagacagagtcaccatcacctgccgggcaagtcagggcattagcaatgggttatcctggtatcagcagaaaccagggcaagcccctacgctcctgatctatgctgcatccagtttgcagtcgggggtcccatctcggttcagtggcagtggatctgggacagatttcactctcaccatcagcagcctgcagcctgaagatgttgcaacttattactgtctacaggattatactaccccatt

SEQ ID NO: 142244 - DNA, 398 bp, Homo sapiens
  Payload ID: 8041
  Gene Symbol: IGKV1-12
  Gene Name: immunoglobulin kappa variable 1-12
  ENST ID: ENST00000480492
  CDS Start-End: 48-398
aggctgatcacaccctgtgcaggagtcagacccagtcaggacacagcatggacatgagggtccccgctcagctcctggggctcctgctgctctggttcccaggttccagatgcgacatccagatgacccagtctccatcttccgtgtctgcatctgtaggagacagagtcaccatcacttgtcgggcgagtcagggtattagcagctggttagcctggtatcagcagaaaccagggaaagcccctaagctcctgatctatgctgcatccagtttgcaaagtggggtcccatcaaggttcagcggcagtggatctgggacagatttcactctcaccatcagcagcctgcagcctgaagattttgcaacttactattgtcaacaggctaacagtttccct

SEQ ID NO: 142245 - DNA, 555 bp, Homo sapiens
  Payload ID: 8041
  Gene Symbol: IGKV1-12
  Gene Name: immunoglobulin kappa variable 1-12
  ENST ID: ENST00000377423
  CDS Start-End: 1-555
atggacatgagggtccccgctcagctcctggggctcctgctgctctggttcccaggttccagatgcgacatccagatgacccagtctccatcttccgtgtctgcatctgtaggagacagagtcaccatcacttgtcgggcgagtcagggtattagcagctggttagcctggtatcagcagaaaccagggaaagcccctaagctcctgatctatgctgcatccagtttgcaaagtggggtcccatcaaggttcagcggcagtggatctgggacagatttcactctcaccatcagcagcctgcagcctgaagattttgcaacttactattgtcaacaggtggagagctctcactgtacgttcggccaagggaccaaggtggaaatcaaacgaactgtggctgcaccatctgtcttcatcttcccgccatctgatgagcagttgaaatctggaactgcctctgttgtgtgcctgctgaataacttctatcccagagaggccaaagtacagtggaaggtggataacgccctccaatcgggtaactcccaggagagtgtc

SEQ ID NO: 142246 - DNA, 398 bp, Homo sapiens; identical to SEQ ID NO: 142244
  Payload ID: 8041
  Gene Symbol: IGKV1-12
  Gene Name: immunoglobulin kappa variable 1-12
  ENST ID: ENST00000632502
  CDS Start-End: 48-398

SEQ ID NO: 142247 - DNA, 555 bp, Homo sapiens; identical to SEQ ID NO: 142245
  Payload ID: 8041
  Gene Symbol: IGKV1-12
  Gene Name: immunoglobulin kappa variable 1-12
  ENST ID: ENST00000634628
  CDS Start-End: 1-555

SEQ ID NO: 142248 - DNA, 378 bp, Homo sapiens
  Payload ID: 8042
  Gene Symbol: IGKV1-16
  Gene Name: immunoglobulin kappa variable 1-16
  ENST ID: ENST00000479981
  CDS Start-End: 28-378
aggaatcagacccagtcaggacacagcatggacatgagagtcctcgctcagctcctggggctcctgctgctctgtttcccaggtgccagatgtgacatccagatgacccagtctccatcctcactgtctgcatctgtaggagacagagtcaccatcacttgtcgggcgagtcagggcattagcaattatttagcctggtttcagcagaaaccagggaaagcccctaagtccctgatctatgctgcatccagtttgcaaagtggggtcccatcaaagttcagcggcagtggatctgggacagatttcactctcaccatcagcagcctgcagcctgaagattttgcaacttattactgccaacagtataatagttaccct

SEQ ID NO: 142249 - DNA, 378 bp, Homo sapiens; identical to SEQ ID NO: 142248
  Payload ID: 8042
  Gene Symbol: IGKV1-16
  Gene Name: immunoglobulin kappa variable 1-16
  ENST ID: ENST00000632011
  CDS Start-End: 28-378

SEQ ID NO: 142250 - DNA, 378 bp, Homo sapiens
  Payload ID: 8043
  Gene Symbol: IGKV1-17
  Gene Name: immunoglobulin kappa variable 1-17
  ENST ID: ENST00000490686
  CDS Start-End: 28-378
aggaatcagtcccactcaggacacagcatggacatgagggtccccgctcagctcctggggctcctgctgctctggttcccaggtgccaggtgtgacatccagatgacccagtctccatcctccctgtctgcatctgtaggagacagagtcaccatcacttgccgggcaagtcagggcattagaaatgatttaggctggtatcagcagaaaccagggaaagcccctaagcgcctgatctatgctgcatccagtttgcaaagtggggtcccatcaaggttcagcggcagtggatctgggacagaattcactctcacaatcagcagcctgcagcctgaagattttgcaacttattactgtctacagcataatagttaccct

SEQ ID NO: 142251 - DNA, 378 bp, Homo sapiens; identical to SEQ ID NO: 142250
  Payload ID: 8043
  Gene Symbol: IGKV1-17
  Gene Name: immunoglobulin kappa variable 1-17
  ENST ID: ENST00000632229
  CDS Start-End: 28-378

SEQ ID NO: 142252 - DNA, 382 bp, Homo sapiens
  Payload ID: 8044
  Gene Symbol: IGKV1-27
  Gene Name: immunoglobulin kappa variable 1-27
  ENST ID: ENST00000498435
  CDS Start-End: 32-382
gtgcagaagtctctctcagtcaggacacagcatggacatgagggtccctgctcagctcctgggactcctgctgctctggctcccagataccagatgtgacatccagatgacccagtctccatcctccctgtctgcatctgtaggagacagagtcaccatcacttgccgggcgagtcagggcattagcaattatttagcctggtatcagcagaaaccagggaaagttcctaagctcctgatctatgctgcatccactttgcaatcaggggtcccatctcggttcagtggcagtggatctgggacagatttcactctcaccatcagcagcctgcagcctgaagatgttgcaacttattactgtcaaaagtataacagtgcccct

SEQ ID NO: 142253 - DNA, 382 bp, Homo sapiens; identical to SEQ ID NO: 142252
  Payload ID: 8044
  Gene Symbol: IGKV1-27
  Gene Name: immunoglobulin kappa variable 1-27
  ENST ID: ENST00000631531
  CDS Start-End: 32-382

SEQ ID NO: 142254 - DNA, 382 bp, Homo sapiens
  Payload ID: 8045
  Gene Symbol: IGKV1-33
  Gene Name: immunoglobulin kappa variable 1-33
  ENST ID: ENST00000473726
  CDS Start-End: 32-382
gtgcaggagtcagtcccaaccaggacacagcatggacatgagggtccctgctcagctcctggggctcctgctgctctggctctcaggtgccagatgtgacatccagatgacccagtctccatcctccctgtctgcatctgtaggagacagagtcaccatcacttgccaggcgagtcaggacattagcaactatttaaattggtatcagcagaaaccagggaaagcccctaagctcctgatctacgatgcatccaatttggaaacaggggtcccatcaaggttcagtggaagtggatctgggacagattttactttcaccatcagcagcctgcagcctgaagatattgcaacatattactgtcaacagtatgataatctccct

SEQ ID NO: 142255 - DNA, 324 bp, Homo sapiens
  Payload ID: 8045
  Gene Symbol: IGKV1-33
  Gene Name: immunoglobulin kappa variable 1-33
  ENST ID: ENST00000558152
  CDS Start-End: 1-324
gacatccagatgacccagtctccatcctccctgtctgcatctgtaggagacagagtcaccatcacttgccaggcgagtcaggacattagcaactatttaaattggtatcagcagaaaccagggaaagcccctaagctcctgatctacgatgcatccaatttggaaacaggggtcccatcaaggttcagtggaagtggatctgggacagattttactttcaccatcagcagcctgcagcctgaagatattgcaacatattactgtcaacagtatgataatctccctcccacagttggcaaaggacatgaacagacacttaaaaga

SEQ ID NO: 142256 - DNA, 382 bp, Homo sapiens; identical to SEQ ID NO: 142254
  Payload ID: 8045
  Gene Symbol: IGKV1-33
  Gene Name: immunoglobulin kappa variable 1-33
  ENST ID: ENST00000632835
  CDS Start-End: 32-382

SEQ ID NO: 142257 - DNA, 324 bp, Homo sapiens; identical to SEQ ID NO: 142255
  Payload ID: 8045
  Gene Symbol: IGKV1-33
  Gene Name: immunoglobulin kappa variable 1-33
  ENST ID: ENST00000634204
  CDS Start-End: 1-324

SEQ ID NO: 142258 - DNA, 398 bp, Homo sapiens
  Payload ID: 8046
  Gene Symbol: IGKV1-37
  Gene Name: immunoglobulin kappa variable 1-37 (non-functional)
  ENST ID: ENST00000465170
  CDS Start-End: 48-398
aggctggtcacaccccgtgcagcagtcagtcccagtcaggacacagcatggacatgagggtccccgctcagctcctggggctcctactgctctgggtcccaggtgccagatgtgacatccagttgacccagtctccatcctccctgtctgcatctgtaggagacagagtcaccatcacttgccgggtgagtcagggcattagcagttatttaaattggtatcggcagaaaccagggaaagttcctaagctcctgatctatagtgcatccaatttgcaatctggagtcccatctcggttcagtggcagtggatctgggacagatttcactctcactatcagcagcctgcagcctgaagatgttgcaacttattacggtcaacggacttacaatgcccct

SEQ ID NO: 142259 - DNA, 398 bp, Homo sapiens; identical to SEQ ID NO: 142258
  Payload ID: 8046
  Gene Symbol: IGKV1-37
  Gene Name: immunoglobulin kappa variable 1-37 (non-functional)
  ENST ID: ENST00000632103
  CDS Start-End: 48-398

SEQ ID NO: 142260 - DNA, 398 bp, Homo sapiens
  Payload ID: 8047
  Gene Symbol: IGKV1-39
  Gene Name: immunoglobulin kappa variable 1-39 (gene/pseudogene)
  ENST ID: ENST00000498574
  CDS Start-End: 48-398
gggctggtcgcaccctgtgcaggagtcagtctcagtcaggacacagcatggacatgagggtccccgctcagctcctggggctcctgctactctggctccgaggtgccagatgtgacatccagatgacccagtctccatcctccctgtctgcatctgtaggagacagagtcaccatcacttgccgggcaagtcagagcattagcagctatttaaattggtatcagcagaaaccagggaaagcccctaagctcctgatctatgctgcatccagtttgcaaagtggggtcccatcaaggttcagtggcagtggatctgggacagatttcactctcaccatcagcagtctgcaacctgaagattttgcaacttactactgtcaacagagttacagtacccct

SEQ ID NO: 142261 - DNA, 398 bp, Homo sapiens; identical to SEQ ID NO: 142260
  Payload ID: 8047
  Gene Symbol: IGKV1-39
  Gene Name: immunoglobulin kappa variable 1-39 (gene/pseudogene)
  ENST ID: ENST00000631411
  CDS Start-End: 48-398

SEQ ID NO: 142262 - DNA, 532 bp, Homo sapiens
  Payload ID: 8048
  Gene Symbol: IGKV1-5
  Gene Name: immunoglobulin kappa variable 1-5
  Uniprot ID: P01602
  ENST ID: ENST00000496168
  CDS Start-End: 182-532
gggacacctggggacactgagctggtgctgagttactgagatgagccagctctgcagctgtgcccagcctgccccatcccctgctcatttgcatgttcccagagcacaacctcctgccctgaagccttattaataggctggtcacactttgtgcaggagtcagacccagtcaggacacagcatggacatgagggtccccgctcagctcctggggctcctgctgctctggctcccaggtgccaaatgtgacatccagatgacccagtctccttccaccctgtctgcatctgtaggagacagagtcaccatcacttgccgggccagtcagagtattagtagctggttggcctggtatcagcagaaaccagggaaagcccctaagctcctgatctataaggcgtctagtttagaaagtggggtcccatcaaggttcagcggcagtggatctgggacagaattcactctcaccatcagcagcctgcagcctgatgattttgcaacttattactgccaacagtataatagttattct

SEQ ID NO: 142263 - DNA, 532 bp, Homo sapiens; identical to SEQ ID NO: 142262
  Payload ID: 8048
  Gene Symbol: IGKV1-5
  Gene Name: immunoglobulin kappa variable 1-5
  Uniprot ID: P01602
  ENST ID: ENST00000632205
  CDS Start-End: 182-532

SEQ ID NO: 142264 - DNA, 380 bp, Homo sapiens
  Payload ID: 8049
  Gene Symbol: IGKV1-6
  Gene Name: immunoglobulin kappa variable 1-6
  ENST ID: ENST00000464162
  CDS Start-End: 30-380
gcaggagtcagacccactcaggacacagcatggacatgagggtccccgctcagctcctggggctcctgctgctctggctcccaggtgccagatgtgccatccagatgacccagtctccatcctccctgtctgcatctgttggagacagagtcaccatcacttgccgggcaagtcagggcattagaaatgatttaggctggtatcagcagaaaccagggaaagcccctaagctcctgatctatgctgcatccagtttacaaagtggggtcccatcaaggttcagcggcagtggatctggcacagatttcactctcaccatcagcagcctgcagcctgaagattttgcaacttattactgtctacaagattacaattaccct

SEQ ID NO: 142265 - DNA, 380 bp, Homo sapiens; identical to SEQ ID NO: 142264
  Payload ID: 8049
  Gene Symbol: IGKV1-6
  Gene Name: immunoglobulin kappa variable 1-6
  ENST ID: ENST00000632891
  CDS Start-End: 30-380

SEQ ID NO: 142266 - DNA, 398 bp, Homo sapiens
  Payload ID: 8050
  Gene Symbol: IGKV1-8
  Gene Name: immunoglobulin kappa variable 1-8
  ENST ID: ENST00000495489
  CDS Start-End: 54-398
aggctggacacacttcatgcaggagtcagaccctgtcaggacacagcatagacatgagggtccccgctcagctcctggggctcctgctgctctggctcccaggtgccagatgtgccatccggatgacccagtctccatcctcattctctgcatctacaggagacagagtcaccatcacttgtcgggcgagtcagggtattagcagttatttagcctggtatcagcaaaaaccagggaaagcccctaagctcctgatctatgctgcatccactttgcaaagtggggtcccatcaaggttcagcggcagtggatctgggacagatttcactctcaccatcagctgcctgcagtctgaagattttgcaacttattactgtcaacagtattatagttaccct

SEQ ID NO: 142267 - DNA, 398 bp, Homo sapiens; identical to SEQ ID NO: 142266
  Payload ID: 8050
  Gene Symbol: IGKV1-8
  Gene Name: immunoglobulin kappa variable 1-8
  ENST ID: ENST00000631614
  CDS Start-End: 54-398

SEQ ID NO: 142268 - DNA, 549 bp, Homo sapiens
  Payload ID: 8050
  Gene Symbol: IGKV1-8
  Gene Name: immunoglobulin kappa variable 1-8
  ENST ID: ENST00000635151
  CDS Start-End: 1-549
atgagggtccccgctcagctcctggggctcctgctgctctggctcccaggtgccagatgtgacatccagttgacccagtctccatccttcctgtctgcatctgtaggagacagagtcaccatcacttgccgggcgagtcagggtattagcagttatttagcctggtatcagcaaaaaccagggaaagcccctaagctcctgatctatgctgcatccactttgcaaagtggggtcccatcaaggttcagcggcagtggatctgggacagatttcactctcaccatcagctgcctgcagtctgaagattttgcaacttattactgtcaacagtattatagttaccctcccacatttggccaggggaccaagctggagatcaaacgaactgtggctgcaccatctgtcttcatcttcccgccatctgatgagcagttgaaatctggaactgcctctgttgtgtgcctgctgaataacttctatcccagagaggccaaagtacagtggaaggtggataacgccctccaatcgggtaactcccaggagagtgtc

SEQ ID NO: 142269 - DNA, 549 bp, Homo sapiens; identical to SEQ ID NO: 142268
  Payload ID: 8050
  Gene Symbol: IGKV1-8
  Gene Name: immunoglobulin kappa variable 1-8
  ENST ID: ENST00000634828
  CDS Start-End: 1-549

SEQ ID NO: 142270 - DNA, 409 bp, Homo sapiens
  Payload ID: 8051
  Gene Symbol: IGKV1-9
  Gene Name: immunoglobulin kappa variable 1-9
  ENST ID: ENST00000493819
  CDS Start-End: 59-409
agacttcttaataggctggtcacacctgtgcaggagtcagtcccagtcaggacacagcatggacatgagggtccccgctcagctcctggggctcctgctgctctggctcccaggtgccagatgtgacatccagttgacccagtctccatccttcctgtctgcatctgtaggagacagagtcaccatcacttgccgggccagtcagggcattagcagttatttagcctggtatcagcaaaaaccagggaaagcccctaagctcctgatctatgctgcatccactttgcaaagtggggtcccatcaaggttcagcggcagtggatctgggacagaattcactctcacaatcagcagcctgcagcctgaagattttgcaacttattactgtcaacagcttaatagttaccct

SEQ ID NO: 142271 - DNA, 409 bp, Homo sapiens; identical to SEQ ID NO: 142270
  Payload ID: 8051
  Gene Symbol: IGKV1-9
  Gene Name: immunoglobulin kappa variable 1-9
  ENST ID: ENST00000633273
  CDS Start-End: 59-409

SEQ ID NO: 142272 - DNA, 371 bp, Homo sapiens
  Payload ID: 8052
  Gene Symbol: IGKV1D-12
  Gene Name: immunoglobulin kappa variable 1D-12
  ENST ID: ENST00000377032
  CDS Start-End: 21-371
agacccactcaggacacagcatggacatgatggtccccgctcagctcctggggctcctgctgctctggttcccaggttccagatgcgacatccagatgacccagtctccatcttccgtgtctgcatctgtaggagacagagtcaccatcacttgtcgggcgagtcagggtattagcagctggttagcctggtatcagcagaaaccagggaaagcccctaagctcctgatctatgctgcatccagtttgcaaagtggggtcccatcaaggttcagcggcagtggatctgggacagatttcactctcaccatcagcagcctgcagcctgaagattttgcaacttactattgtcaacaggctaacagtttccct

SEQ ID NO: 142273 - DNA, 376 bp, Homo sapiens
  Payload ID: 8053
  Gene Symbol: IGKV1D-13
  Gene Name: immunoglobulin kappa variable 1D-13
  ENST ID: ENST00000611391
  CDS Start-End: 26-376
gagtcagacccactcaggacacagcatggacatgagggtccccgctcagctcctggggcttctgctgctctggctcccaggtgccagatgtgccatccagttgacccagtctccatcctccctgtctgcatctgtaggagacagagtcaccatcacttgccgggcaagtcagggcattagcagtgctttagcctggtatcagcagaaaccagggaaagctcctaagctcctgatctatgatgcctccagtttggaaagtggggtcccatcaaggttcagcggcagtggatctgggacagatttcactctcaccatcagcagcctgcagcctgaagattttgcaacttattactgtcaacagtttaatagttaccct

SEQ ID NO: 142274 - DNA, 378 bp, Homo sapiens
  Payload ID: 8054
  Gene Symbol: IGKV1D-16
  Gene Name: immunoglobulin kappa variable 1D-16
  Uniprot ID: P01601
  ENST ID: ENST00000492446
  CDS Start-End: 28-378
aggaatcagacccagtcaggacacagcatggacatgagggtcctcgctcagctcctggggctcctgctgctctgtttcccaggtgccagatgtgacatccagatgacccagtctccatcctcactgtctgcatctgtaggagacagagtcaccatcacttgtcgggcgagtcagggtattagcagctggttagcctggtatcagcagaaaccagagaaagcccctaagtccctgatctatgctgcatccagtttgcaaagtggggtcccatcaaggttcagcggcagtggatctgggacagatttcactctcaccatcagcagcctgcagcctgaagattttgcaacttattactgccaacagtataatagttaccct

SEQ ID NO: 142275 - DNA, 532 bp, Homo sapiens
  Payload ID: 8055
  Gene Symbol: IGKV1D-17
  Gene Name: immunoglobulin kappa variable 1D-17
  ENST ID: ENST00000483379
  CDS Start-End: 182-532
gggacacctggggacactgagctgctgctgagttactgagatgagccagccctgcagctgcgcccagcctgccccatcccctgctcatttgcatgttcccagagcatagcctcctgccctgaagccttattaataggctggacacacttcatggaggaatcagtcccactcaggacacagcatggacatgagggtccctgctcagctcctggggctcctgctgctctggttcccaggtgccagatgtaacatccagatgacccagtctccatctgccatgtctgcatctgtaggagacagagtcaccatcacttgtcgggcgaggcagggcattagcaattatttagcctggtttcagcagaaaccagggaaagtccctaagcacctgatctatgctgcatccagtttgcaaagtggggtcccatcaaggttcagcggcagtggatctgggacagaattcactctcacaatcagcagcctgcagcctgaagattttgcaacttattactgtctacagcataatagttaccct

SEQ ID NO: 142276 - DNA, 440 bp, Homo sapiens
  Payload ID: 8056
  Gene Symbol: IGKV1D-33
  Gene Name: immunoglobulin kappa variable 1D-33
  ENST ID: ENST00000390265
  CDS Start-End: 90-440
atgttcgcagagcacagccccctgccctgaagacttattaataggctggtcgcaccctgtgcaggagtcagtcccaaccaggacacagcatggacatgagggtccctgctcagctcctggggctcctgctgctctggctctcaggtgccagatgtgacatccagatgacccagtctccatcctccctgtctgcatctgtaggagacagagtcaccatcacttgccaggcgagtcaggacattagcaactatttaaattggtatcagcagaaaccagggaaagcccctaagctcctgatctacgatgcatccaatttggaaacaggggtcccatcaaggttcagtggaagtggatctgggacagattttactttcaccatcagcagcctgcagcctgaagatattgcaacatattactgtcaacagtatgataatctccct

SEQ ID NO: 142277 - DNA, 324 bp, Homo sapiens; identical to SEQ ID NO: 142255
  Payload ID: 8056
  Gene Symbol: IGKV1D-33
  Gene Name: immunoglobulin kappa variable 1D-33
  ENST ID: ENST00000611734
  CDS Start-End: 1-324

SEQ ID NO: 142278 - DNA, 353 bp, Homo sapiens
  Payload ID: 8057
  Gene Symbol: IGKV1D-37
  Gene Name: immunoglobulin kappa variable 1D-37 (non-functional)
  ENST ID: ENST00000509129
  CDS Start-End: 1-353
atggacatgagggtccccgctcagctcctggggctcctactgctctgggtcccaggtgccagatgtgacatccagttgacccagtctccatcctccctgtctgcatctgtaggagacagagtcaccatcacttgccgggtgagtcagggcattagcagttatttaaattggtatcggcagaaaccagggaaagttcctaagctcctgatctatagtgcatccaatttgcaatctggagtcccatctcggttcagtggcagtggatctgggacagatttcactctcactatcagcagcctgcagcctgaagatgttgcaacttattacggtcaacggacttacaatgcccctcc

SEQ ID NO: 142279 - DNA, 376 bp, Homo sapiens
  Payload ID: 8058
  Gene Symbol: IGKV1D-39
  Gene Name: immunoglobulin kappa variable 1D-39
  ENST ID: ENST00000448155
  CDS Start-End: 24-376
gtcagtctcagtcaggacacagcatggacatgagggtccccgctcagctcctggggctcctgctactctggctccgaggtgccagatgtgacatccagatgacccagtctccatcctccctgtctgcatctgtaggagacagagtcaccatcacttgccgggcaagtcagagcattagcagctatttaaattggtatcagcagaaaccagggaaagcccctaagctcctgatctatgctgcatccagtttgcaaagtggggtcccatcaaggttcagtggcagtggatctgggacagatttcactctcaccatcagcagtctgcaacctgaagattttgcaacttactactgtcaacagagttacagtacccctcc

SEQ ID NO: 142280 - DNA, 373 bp, Homo sapiens
  Payload ID: 8059
  Gene Symbol: IGKV1D-42
  Gene Name: immunoglobulin kappa variable 1D-42 (non-functional)
  ENST ID: ENST00000390278
  CDS Start-End: 21-373
agtcccagtcaggacacagcatggacatgagggtccccgctcagctcctggggctcctgctgctctggctcccaggtgtcagatttgacatccagatgacccagtctccatctttcctgtctgcatctgtaggagacagagtcagtatcatttgctgggcaagtgagggcattagcagtaatttagcctggtatctgcagaaaccagggaaatcccctaagctcttcctctatgatgcaaaagatttgcaccctggggtctcatcgaggttcagtggcaggggatctgggacggatttcactctcaccatcatcagcctgaagcctgaagattttgcagcttattactgtaaacaggacttcagttaccctcc

SEQ ID NO: 142281 - DNA, 532 bp, Homo sapiens
  Payload ID: 8060
  Gene Symbol: IGKV1D-43
  Gene Name: immunoglobulin kappa variable 1D-43
  ENST ID: ENST00000468879
  CDS Start-End: 182-532
gggacacctggggacactgagctggtgctgagttactgagatgaaccagccctgcagctgtgcccagcctgccttgccccctgctaatttgcatgttcccagagcacatcctcctaccctgaagacttattaatgcgctggtcacacttcatgcaggagtcagacccagtcaggacacagcatggacatgagggtgcccgctcagcgcctggggctcctgctgctctggttcccaggtgccagatgtgccatccggatgacccagtctccattctccctgtctgcatctgtaggagacagagtcaccatcacttgctgggccagtcagggcattagcagttatttagcctggtatcagcaaaaaccagcaaaagcccctaagctcttcatctattatgcatccagtttgcaaagtggggtcccatcaaggttcagcggcagtggatctgggacggattacactctcaccatcagcagcctgcagcctgaagattttgcaacttattactgtcaacagtattatagtacccct

SEQ ID NO: 142282 - DNA, 534 bp, Homo sapiens
  Payload ID: 8061
  Gene Symbol: IGKV1D-8
  Gene Name: immunoglobulin kappa variable 1D-8
  ENST ID: ENST00000471857
  CDS Start-End: 182-534
gggacacctggggacactgagctggtgctgagttactgagatgagccagctctgcagctgtgcccagtcagccccatcccctgctcatttgcatgttcccagagcacaacctcctgcactgaagccttattaataggctggccacacttcatgcaggagtcagacccagtcaggacacagcatggacatgagggtccccgctcagctcctggggctcctgctgctctggctcccaggtgccagatgtgccatctggatgacccagtctccatccttactctctgcatctacaggagacagagtcaccatcagttgtcggatgagtcagggcattagcagttatttagcctggtatcagcaaaaaccagggaaagcccctgagctcctgatctatgctgcatccactttgcaaagtggggtcccatcaaggttcagtggcagtggatctgggacagatttcactctcaccatcagctgcctgcagtctgaagattttgcaacttattactgtcaacagtattatagtttccctcc

SEQ ID NO: 142283 - DNA, 534 bp, Homo sapiens
  Payload ID: 8061
  Gene Symbol: IGKV1D-8
  Gene Name: immunoglobulin kappa variable 1D-8
  ENST ID: ENST00000628219
  CDS Start-End: 182-534
gggacacctggggacactgagctggtgctgagttactgagatgagccagctctgcagctgtgcccagtcagccccatcccctgctcatttgcatgttcccagagcacaacctcctgcactgaagccttattaataggctggccacacttcatgcaggagtcagacccagtcaggacacagcatggacatgagggtccccgctcagctcctggggctcctgctgctctggctcccaggtgccagatgtgtcatctggatgacccagtctccatccttactctctgcatctacaggagacagagtcaccatcagttgtcggatgagtcagggcattagcagttatttagcctggtatcagcaaaaaccagggaaagcccctgagctcctgatctatgctgcatccactttgcaaagtggggtcccatcaaggttcagtggcagtggatctgggacagatttcactctcaccatcagttgcctgcagtctgaagattttgcaacttattactgtcaacagtattatagtttccctcc

SEQ ID NO: 142284 - DNA, 390 bp, Homo sapiens
  Payload ID: 8062
  Gene Symbol: IGKV2-24
  Gene Name: immunoglobulin kappa variable 2-24
  ENST ID: ENST00000484817
  CDS Start-End: 31-390
aattaggactcctcaggtcaccttctcacaatgaggctccttgctcagcttctggggctgctaatgctctgggtccctggatccagtggggatattgtgatgacccagactccactctcctcacctgtcacccttggacagccggcctccatctcctgcaggtctagtcaaagcctcgtacacagtgatggaaacacctacttgagttggcttcagcagaggccaggccagcctccaagactcctaatttataagatttctaaccggttctctggggtcccagacagattcagtggcagtggggcagggacagatttcacactgaaaatcagcagggtggaagctgaggatgtcggggtttattactgcatgcaagctacacaatttcct

SEQ ID NO: 142285 - DNA, 390 bp, Homo sapiens; identical to SEQ ID NO: 142284
  Payload ID: 8062
  Gene Symbol: IGKV2-24
  Gene Name: immunoglobulin kappa variable 2-24
  ENST ID: ENST00000633851
  CDS Start-End: 31-390

SEQ ID NO: 142286 - DNA, 390 bp, Homo sapiens
  Payload ID: 8063
  Gene Symbol: IGKV2-28
  Gene Name: immunoglobulin kappa variable 2-28
  ENST ID: ENST00000482769
  CDS Start-End: 31-390
gatcaggactcctcagttcaccttctcacaatgaggctccctgctcagctcctggggctgctaatgctctgggtctctggatccagtggggatattgtgatgactcagtctccactctccctgcccgtcacccctggagagccggcctccatctcctgcaggtctagtcagagcctcctgcatagtaatggatacaactatttggattggtacctgcagaagccagggcagtctccacagctcctgatctatttgggttctaatcgggcctccggggtccctgacaggttcagtggcagtggatcaggcacagattttacactgaaaatcagcagagtggaggctgaggatgttggggtttattactgcatgcaagctctacaaactcct

SEQ ID NO: 142287 - DNA, 390 bp, Homo sapiens; identical to SEQ ID NO: 142286
  Payload ID: 8063
  Gene Symbol: IGKV2-28
  Gene Name: immunoglobulin kappa variable 2-28
  ENST ID: ENST00000633682
  CDS Start-End: 31-390

SEQ ID NO: 142288 - DNA, 390 bp, Homo sapiens
  Payload ID: 8064
  Gene Symbol: IGKV2-30
  Gene Name: immunoglobulin kappa variable 2-30
  ENST ID: ENST00000468494
  CDS Start-End: 31-390
gatcaggactcctcagttcaccttctcacaatgaggctccctgctcagctcctggggctgctaatgctctgggtcccaggatccagtggggatgttgtgatgactcagtctccactctccctgcccgtcacccttggacagccggcctccatctcctgcaggtctagtcaaagcctcgtatacagtgatggaaacacctacttgaattggtttcagcagaggccaggccaatctccaaggcgcctaatttataaggtttctaaccgggactctggggtcccagacagattcagcggcagtgggtcaggcactgatttcacactgaaaatcagcagggtggaggctgaggatgttggggtttattactgcatgcaaggtacacactggcct

SEQ ID NO: 142289 - DNA, 390 bp, Homo sapiens; identical to SEQ ID NO: 142288
  Payload ID: 8064
  Gene Symbol: IGKV2-30
  Gene Name: immunoglobulin kappa variable 2-30
  ENST ID: ENST00000632910
  CDS Start-End: 31-390

SEQ ID NO: 142290 - DNA, 314 bp, Homo sapiens
  Payload ID: 8065
  Gene Symbol: IGKV2-40
  Gene Name: immunoglobulin kappa variable 2-40
  ENST ID: ENST00000620613
  CDS Start-End: 1-314
gatccagtgaggatattgtgatgacccagactccactctccctgcccgtcacccctggagagccggcctccatctcctgcaggtctagtcagagcctcttggatagtgatgatggaaacacctatttggactggtacctgcagaagccagggcagtctccacagctcctgatctatacgctttcctatcgggcctctggagtcccagacaggttcagtggcagtgggtcaggcactgatttcacactgaaaatcagcagggtggaggctgaggatgttggagtttattactgcatgcaacgtatagagtttcct

SEQ ID NO: 142291 - DNA, 312 bp, Homo sapiens
  Payload ID: 8065
  Gene Symbol: IGKV2-40
  Gene Name: immunoglobulin kappa variable 2-40
  ENST ID: ENST00000621595
  CDS Start-End: 1-312
gaggatattgtgatgacccagactccactctccctgcccgtcacccctggagagccggcctccatctcctgcaggtctagtcagagcctcttggatagtgatgatggaaacacctatttggactggtacctgcagaagccagggcagtctccacagctcctgatctatacgctttcctatcgggcctctggagtcccagacaggttcagtggcagtgggtcaggcactgatttcacactgaaaatcagcagggtggaggctgaggatgttggagtttattactgcatgcaacgtatagagtttccttccaca

SEQ ID NO: 142292 - DNA, 314 bp, Homo sapiens; identical to SEQ ID NO: 142290
  Payload ID: 8065
  Gene Symbol: IGKV2-40
  Gene Name: immunoglobulin kappa variable 2-40
  ENST ID: ENST00000632384
  CDS Start-End: 1-314

SEQ ID NO: 142293 - DNA, 312 bp, Homo sapiens; identical to SEQ ID NO: 142291
  Payload ID: 8065
  Gene Symbol: IGKV2-40
  Gene Name: immunoglobulin kappa variable 2-40
  ENST ID: ENST00000632811
  CDS Start-End: 1-312

SEQ ID NO: 142294 - DNA, 390 bp, Homo sapiens
  Payload ID: 8066
  Gene Symbol: IGKV2D-24
  Gene Name: immunoglobulin kappa variable 2D-24 (non-functional)
  ENST ID: ENST00000462693
  CDS Start-End: 31-390
aattaggactcctcaggtcaccttctcacaatgaggctccttgctcagcttctggggctgctaatgctctgggtccctggatccagtggggatattgtgatgacccagactccactctcctcgcctgtcacccttggacagccggcctccatctccttcaggtctagtcaaagcctcgtacacagtgatggaaacacctacttgagttggcttcagcagaggccaggccagcctccaagactcctaatttataaggtttctaaccggttctctggggtcccagacagattcagtggcagtggggcagggacagatttcacactgaaaatcagcagggtggaagctgaggatgtcggggtttattactgcacgcaagctacacaatttcct

SEQ ID NO: 142295 - DNA, 390 bp, Homo sapiens
  Payload ID: 8067
  Gene Symbol: IGKV2D-26
  Gene Name: immunoglobulin kappa variable 2D-26
  ENST ID: ENST00000390268
  CDS Start-End: 31-390
gatcaggactcctcagttcaccttctcactatgaggctccctgctcagctcttggggctgctaatgctctgggtccctggatccagtgcagagattgtgatgacccagactccactctccttgtctatcacccctggagagcaggcctccatgtcctgcaggtctagtcagagcctcctgcatagtgatggatacacctatttgtattggtttctgcagaaagccaggccagtctccacgctcctgatctatgaagtttccaaccggttctctggagtgccagataggttcagtggcagcgggtcagggacagatttcacactgaaaatcagccgggtggaggctgaggattttggagtttattactgcatgcaagatgcacaagatcct

SEQ ID NO: 142296 - DNA, 396 bp, Homo sapiens
  Payload ID: 8068
  Gene Symbol: IGKV2D-28
  Gene Name: immunoglobulin kappa variable 2D-28
  ENST ID: ENST00000453166
  CDS Start-End: 37-396
ttgactgatcaggactcctcagttcaccttctcacaatgaggctccctgctcagctcctggggctgctaatgctctgggtctctggatccagtggggatattgtgatgactcagtctccactctccctgcccgtcacccctggagagccggcctccatctcctgcaggtctagtcagagcctcctgcatagtaatggatacaactatttggattggtacctgcagaagccagggcagtctccacagctcctgatctatttgggttctaatcgggcctccggggtccctgacaggttcagtggcagtggatcaggcacagattttacactgaaaatcagcagagtggaggctgaggatgttggggtttattactgcatgcaagctctacaaactcct

SEQ ID NO: 142297 - DNA, 306 bp, Homo sapiens
  Payload ID: 8068
  Gene Symbol: IGKV2D-28
  Gene Name: immunoglobulin kappa variable 2D-28
  ENST ID: ENST00000558026
  CDS Start-End: 1-306
gatattgtgatgactcagtctccactctccctgcccgtcacccctggagagccggcctccatctcctgcaggtctagtcagagcctcctgcatagtaatggatacaactatttggattggtacctgcagaagccagggcagtctccacagctcctgatctatttgggttctaatcgggcctccggggtccctgacaggttcagtggcagtggatcaggcacagattttacactgaaaatcagcagagtggaggctgaggatgttggggtttattactgcatgcaagctctacaaactcctcccaca

SEQ ID NO: 142298 - DNA, 390 bp, Homo sapiens
  Payload ID: 8069
  Gene Symbol: IGKV2D-29
  Gene Name: immunoglobulin kappa variable 2D-29
  ENST ID: ENST00000491977
  CDS Start-End: 31-390
gatcaggacttctcagttcatcttctcaccatgaggctccctgctcagctcctggggctgctaatgctctggatacctggatccagtgcagatattgtgatgacccagactccactctctctgtccgtcacccctggacagccggcctccatctcctgcaagtctagtcagagcctcctgcatagtgatggaaagacctatttgtattggtacctgcagaagccaggccagcctccacagctcctgatctatgaagtttccaaccggttctctggagtgccagataggttcagtggcagcgggtcagggacagatttcacactgaaaatcagccgggtggaggctgaggatgttggggtttattactgcatgcaaagtatacagcttcct

SEQ ID NO: 142299 - DNA, 310 bp, Homo sapiens
  Payload ID: 8069
  Gene Symbol: IGKV2D-29
  Gene Name: immunoglobulin kappa variable 2D-29
  ENST ID: ENST00000612356
  CDS Start-End: 1-306
gatattgtgatgacccagactccactctctctgtccgtcacccctggacagccggcctccatctcctgcaagtctagtcagagcctcctgcatagtgatggaaagacctatttgtattggtacctgcagaagccaggccagcctccacagctcctgatctatgaagtttccaaccggttctctggagtgccagataggttcagtggcagcgggtcagggacagatttcacactgaaaatcagccgggtggaggctgaggatgttggggtttattactgcatgcaaagtatacagcttcctcccacagtgg

SEQ ID NO: 142300 - DNA, 395 bp, Homo sapiens
  Payload ID: 8070
  Gene Symbol: IGKV2D-30
  Gene Name: immunoglobulin kappa variable 2D-30
  ENST ID: ENST00000474213
  CDS Start-End: 36-395
tgactgatcaggactcctcagttcaccttctcacaatgaggctccctgctcagctcctggggctgctaatgctctgggtcccaggatccagtggggatgttgtgatgactcagtctccactctccctgcccgtcacccttggacagccggcctccatctcctgcaggtctagtcaaagcctcgtatacagtgatggaaacacctacttgaattggtttcagcagaggccaggccaatctccaaggcgcctaatttataaggtttctaactgggactctggggtcccagacagattcagcggcagtgggtcaggcactgatttcacactgaaaatcagcagggtggaggctgaggatgttggggtttattactgcatgcaaggtacacactggcct

SEQ ID NO: 142301 - DNA, 332 bp, Homo sapiens
  Payload ID: 8071
  Gene Symbol: IGKV2D-40
  Gene Name: immunoglobulin kappa variable 2D-40
  ENST ID: ENST00000429992
  CDS Start-End: 1-332
atgctctgggtccctggatccagtgaggatattgtgatgacccagactccactctccctgcccgtcacccctggagagccggcctccatctcctgcaggtctagtcagagcctcttggatagtgatgatggaaacacctatttggactggtacctgcagaagccagggcagtctccacagctcctgatctatacgctttcctatcgggcctctggagtcccagacaggttcagtggcagtgggtcaggcactgatttcacactgaaaatcagcagggtggaggctgaggatgttggagtttattactgcatgcaacgtatagagtttccttc

SEQ ID NO: 142302 - DNA, 312 bp, Homo sapiens; identical to SEQ ID NO: 142291
  Payload ID: 8071
  Gene Symbol: IGKV2D-40
  Gene Name: immunoglobulin kappa variable 2D-40
  ENST ID: ENST00000560045
  CDS Start-End: 1-312

SEQ ID NO: 142303 - DNA, 350 bp, Homo sapiens
  Payload ID: 8072
  Gene Symbol: IGKV3OR2-268
  Gene Name: immunoglobulin kappa variable 3/OR2-268 (non-functional)
  ENST ID: ENST00000421835
  CDS Start-End: 1-350
atggaagccccagcacagcttctcttcctcctgctactctggctcccagataccaccggagaaattgtaatgacacagtctccagccaccctgtctttgtctccaggggaaagagccaccctctcctgcagggccagtcagagtgttagcagcagctacttatcctggtaccagcagaaacctgggcaggctcccaggctcctcatctatggtgcatccaccagggccactggcatcccagccaggttcagtggcagtgggtctgggacagacttcactctcaccatcagcagcctgcagcctgaagattttgcagtttattactgtcagcaggattataacttacctcc

SEQ ID NO: 142304 - DNA, 392 bp, Homo sapiens
  Payload ID: 8073
  Gene Symbol: IGKV3-11
  Gene Name: immunoglobulin kappa variable 3-11
  Uniprot ID: P04433
  ENST ID: ENST00000483158
  CDS Start-End: 48-392
gtcagagccctggggaggaactgctcagttaggacccagagggaaccatggaagccccagctcagcttctcttcctcctgctactctggctcccagataccaccggagaaattgtgttgacacagtctccagccaccctgtctttgtctccaggggaaagagccaccctctcctgcagggccagtcagagtgttagcagctacttagcctggtaccaacagaaacctggccaggctcccaggctcctcatctatgatgcatccaacagggccactggcatcccagccaggttcagtggcagtgggtctgggacagacttcactctcaccatcagcagcctagagcctgaagattttgcagtttattactgtcagcagcgtagcaactggcct

SEQ ID NO: 142305 - DNA, 392 bp, Homo sapiens; identical to SEQ ID NO: 142304
  Payload ID: 8073
  Gene Symbol: IGKV3-11
  Gene Name: immunoglobulin kappa variable 3-11
  Uniprot ID: P04433
  ENST ID: ENST00000632088
  CDS Start-End: 48-392

SEQ ID NO: 142306 - DNA, 442 bp, Homo sapiens
  Payload ID: 8074
  Gene Symbol: IGKV3-15
  Gene Name: immunoglobulin kappa variable 3-15
  ENST ID: ENST00000390252
  CDS Start-End: 98-442
gcatgtccctcccagctgccctaccttccagagcccatatcaatgcctgggtcagagctctggggaggaactgctcagttaggacccagacggaaccatggaagccccagcgcagcttctcttcctcctgctactctggctcccagataccactggagaaatagtgatgacgcagtctccagccaccctgtctgtgtctccaggggaaagagccaccctctcctgcagggccagtcagagtgttagcagcaacttagcctggtaccagcagaaacctggccaggctcccaggctcctcatctatggtgcatccaccagggccactggtatcccagccaggttcagtggcagtgggtctgggacagagttcactctcaccatcagcagcctgcagtctgaagattttgcagtttattactgtcagcagtataataactggcct

SEQ ID NO: 142307 - DNA, 442 bp, Homo sapiens; identical to SEQ ID NO: 142306
  Payload ID: 8074
  Gene Symbol: IGKV3-15
  Gene Name: immunoglobulin kappa variable 3-15
  ENST ID: ENST00000632887
  CDS Start-End: 98-442

SEQ ID NO: 142308 - DNA, 400 bp, Homo sapiens
  Payload ID: 8075
  Gene Symbol: IGKV3-20
  Gene Name: immunoglobulin kappa variable 3-20
  ENST ID: ENST00000492167
  CDS Start-End: 53-400
cctgggtcagagctctggagaagagctgctcagttaggacccagagggaaccatggaaaccccagcgcagcttctcttcctcctgctactctggctcccagataccaccggagaaattgtgttgacgcagtctccaggcaccctgtctttgtctccaggggaaagagccaccctctcctgcagggccagtcagagtgttagcagcagctacttagcctggtaccagcagaaacctggccaggctcccaggctcctcatctatggtgcatccagcagggccactggcatcccagacaggttcagtggcagtgggtctgggacagacttcactctcaccatcagcagactggagcctgaagattttgcagtgtattactgtcagcagtatggtagctcacct

SEQ ID NO: 142309 - DNA, 400 bp, Homo sapiens; identical to SEQ ID NO: 142308
  Payload ID: 8075
  Gene Symbol: IGKV3-20
  Gene Name: immunoglobulin kappa variable 3-20
  ENST ID: ENST00000632822
  CDS Start-End: 53-400

SEQ ID NO: 142310 - DNA, 445 bp, Homo sapiens
  Payload ID: 8076
  Gene Symbol: IGKV3-7
  Gene Name: immunoglobulin kappa variable 3-7 (non-functional)
  ENST ID: ENST00000390247
  CDS Start-End: 98-445
gcatgtccctcccagctgccctaccttccagagcccatatcaatgcctgggtcagagccctgggaaggaactgctcagttaggacccagacggaaccatggaagccccagctcagcttctcttcctcctgctactctggctcccagataccaccagagaaattgtaatgacacagtctccacccaccctgtctttgtctccaggggaaagagtcaccctctcctgcagggccagtcagagtgttagcagcagctacttaacctggtatcagcagaaacctggccaggcgcccaggctcctcatctatggtgcatccaccagggccactagcatcccagccaggttcagtggcagtgggtctgggacagacttcactctcaccatcagcagcctgcagcctgaagattttgcagtttattactgtcagcaggattataacttacct

SEQ ID NO: 142311 - DNA, 445 bp, Homo sapiens; identical to SEQ ID NO: 142310
  Payload ID: 8076
  Gene Symbol: IGKV3-7
  Gene Name: immunoglobulin kappa variable 3-7 (non-functional)
  ENST ID: ENST00000633250
  CDS Start-End: 98-445

SEQ ID NO: 142312 - DNA, 444 bp, Homo sapiens
  Payload ID: 8077
  Gene Symbol: IGKV3D-11
  Gene Name: immunoglobulin kappa variable 3D-11
  ENST ID: ENST00000390277
  CDS Start-End: 98-444
gcatgtccctcccagctgccctaccttccagagcccatatcaatgcctgggtcagagctctggggaggaactgctcagttaggacccagacggaaccatggaagccccagcgcagcttctcttcctcctgctactctggctcccagataccaccggagaaattgtgttgacacagtctccagccaccctgtctttgtctccaggggaaagagccaccctctcctgcagggccagtcagagtgttagcagctacttagcctggtaccagcagaaacctggccaggctcccaggctcctcatctatgatgcatccaacagggccactggcatcccagccaggttcagtggcagtgggcctgggacagacttcactctcaccatcagcagcctagagcctgaagattttgcagtttattactgtcagcagcgtagcaactggcatcc

SEQ ID NO: 142313 - DNA, 324 bp, Homo sapiens
  Payload ID: 8077
  Gene Symbol: IGKV3D-11
  Gene Name: immunoglobulin kappa variable 3D-11
  ENST ID: ENST00000611740
  CDS Start-End: 1-324
cagcttctcttcctcctgctactctggctcccagataccaccggagaaattgtgttgacacagtctccagccaccctgtctttgtctccaggggaaagagccaccctctcctgcagggccagtcagagtgttagcagctacttagcctggtaccagcagaaacctggccaggctcccaggctcctcatctatgatgcatccaacagggccactggcatcccagccaggttcagtggcagtgggcctgggacagacttcactctcaccatcagcagcctagagcctgaagattttgcagtttattactgtcagcagcgtagcaac

SEQ ID NO: 142314 - DNA, 396 bp, Homo sapiens
  Payload ID: 8078
  Gene Symbol: IGKV3D-15
  Gene Name: immunoglobulin kappa variable 3D-15 (gene/pseudogene)
  ENST ID: ENST00000417279
  CDS Start-End: 50-396
gggtcagagctctggggaggaactgctcagttaggacccagacggaaccatggaagccccagcgcagcttctcttcctcctgctactctggctcccagataccactggagaaatagtgatgacgcagtctccagccaccctgtctgtgtctccaggggaaagagccaccctctcctgcagggccagtcagagtgttagcagcaacttagcctggtaccagcagaaacctggccaggctcccaggctcctcatctatggtgcatccatcagggccactggcatcccagccaggttcagtggcagtgggtctgggacagagttcactctcaccatcagcatcctgcagtctgaagattttgcagtttattactgtcagcagtataataactggcctcc

SEQ ID NO: 142315 - DNA, 445 bp, Homo sapiens
  Payload ID: 8079
  Gene Symbol: IGKV3D-20
  Gene Name: immunoglobulin kappa variable 3D-20
  ENST ID: ENST00000390270
  CDS Start-End: 98-445
gcatgtccctcccagccgccctgcagtccagagcccatatcaatgcctgggtcagagctctggggaggaactgctcagttaggacccagagggaaccatggaaaccccagcgcagcttctcttcctcctgctactctggctcccagataccaccggagaaattgtgttgacgcagtctccagccaccctgtctttgtctccaggggaaagagccaccctctcctgcggggccagtcagagtgttagcagcagctacttagcctggtaccagcagaaacctggcctggcgcccaggctcctcatctatgatgcatccagcagggccactggcatcccagacaggttcagtggcagtgggtctgggacagacttcactctcaccatcagcagactggagcctgaagattttgcagtgtattactgtcagcagtatggtagctcacct

SEQ ID NO: 142316 - DNA, 384 bp, Homo sapiens
  Payload ID: 8080
  Gene Symbol: IGKV3D-7
  Gene Name: immunoglobulin kappa variable 3D-7
  ENST ID: ENST00000443397
  CDS Start-End: 26-384
gaggaactgctcagttaggacccagatggaaccatggaagccccagcacagcttcttcttcctcctgctactctggctcccagataccaccggagaaattgtaatgacacagtctccagccaccctgtctttgtctccaggggaaagagccaccctctcctgcagggccagtcagagtgttagcagcagctacttatcctggtaccagcagaaacctgggcaggctcccaggctcctcatctatggtgcatccaccagggccactggcatcccagccaggttcagtggcagtgggtctgggacagacttcactctcaccatcagcagcctgcagcctgaagattttgcagtttattactgtcagcaggattataacttacctcc

SEQ ID NO: 142317 - DNA, 333 bp, Homo sapiens
  Payload ID: 8080
  Gene Symbol: IGKV3D-7
  Gene Name: immunoglobulin kappa variable 3D-7
  ENST ID: ENST00000614332
  CDS Start-End: 1-333
cagcttcttttcctcctgctactctggctcccagataccaccggagaaattgtaatgacacagtctccagccaccctgtctttgtctccaggggaaagagccaccctctcctgcagggccagtcagagtgttagcagcagctacttatcctggtaccagcagaaacctgggcaggctcccaggctcctcatctatggtgcatccaccagggccactggcatcccagccaggttcagtggcagtgggtctgggacagacttcactctcaccatcagcagcctgcagcctgaagattttgcagtttattactgtcagcaggattataacttacct

SEQ ID NO: 142318 - DNA, 384 bp, Homo sapiens; identical to SEQ ID NO: 142316
  Payload ID: 8080
  Gene Symbol: IGKV3D-7
  Gene Name: immunoglobulin kappa variable 3D-7
  ENST ID: ENST00000627132
  CDS Start-End: 26-384

SEQ ID NO: 142319 - DNA, 538 bp, Homo sapiens
  Payload ID: 8081
  Gene Symbol: IGKV4-1
  Gene Name: immunoglobulin kappa variable 4-1
  Uniprot ID: P06312
  ENST ID: ENST00000390243
  CDS Start-End: 176-538
tttggctcttgatttacattgggtactttcacaacccactgctcatgaaatttgcttttgtactcactggttgtttttgcataggcccctccaggccacgaccagctgtttggattttataaacgggccgtttgcattgtgaactgagctacaacaggcaggcaggggcagcaagatggtgttgcagacccaggtcttcatttctctgttgctctggatctctggtgcctacggggacatcgtgatgacccagtctccagactccctggctgtgtctctgggcgagagggccaccatcaactgcaagtccagccagagtgttttatacagctccaacaataagaactacttagcttggtaccagcagaaaccaggacagcctcctaagctgctcatttactgggcatctacccgggaatccggggtccctgaccgattcagtggcagcgggtctgggacagatttcactctcaccatcagcagcctgcaggctgaagatgtggcagtttattactgtcagcaatattatagtactcct

SEQ ID NO: 142320 - DNA, 408 bp, Homo sapiens
  Payload ID: 8082
  Gene Symbol: IGKV5-2
  Gene Name: immunoglobulin kappa variable 5-2
  Uniprot ID: P06315
  ENST ID: ENST00000390244
  CDS Start-End: 64-408
ataaaatctgtgctgtcaaactgattaggaactgactaccacctgcaggtcagggccaaggttatggggtcccaggttcacctcctcagcttcctcctcctttggatctctgataccagggcagaaacgacactcacgcagtctccagcattcatgtcagcgactccaggagacaaagtcaacatctcctgcaaagccagccaagacattgatgatgatatgaactggtaccaacagaaaccaggagaagctgctattttcattattcaagaagctactactctcgttcctggaatcccacctcgattcagtggcagcgggtatggaacagattttaccctcacaattaataacatagaatctgaggatgctgcatattacttctgtctacaacatgataatttccct

SEQ ID NO: 142321 - DNA, 408 bp, Homo sapiens; identical to SEQ ID NO: 142320
  Payload ID: 8082
  Gene Symbol: IGKV5-2
  Gene Name: immunoglobulin kappa variable 5-2
  Uniprot ID: P06315
  ENST ID: ENST00000632585
  CDS Start-End: 64-408

SEQ ID NO: 142322 - DNA, 406 bp, Homo sapiens
  Payload ID: 8083
  Gene Symbol: IGKV6-21
  Gene Name: immunoglobulin kappa variable 6-21 (non-functional)
  ENST ID: ENST00000390256
  CDS Start-End: 65-406
atcttaaaagaggttctttctctgggatgtggcatgagcaaaactgacaagtcaaggcaggaagatgttgccatcacaactcattgggtttctgctgctctgggttccagcctccaggggtgaaattgtgctgactcagtctccagactttcagtctgtgactccaaaggagaaagtcaccatcacctgccgggccagtcagagcattggtagtagcttacactggtaccagcagaaaccagatcagtctccaaagctcctcatcaagtatgcttcccagtccttctcaggggtcccctcgaggttcagtggcagtggatctgggacagatttcaccctcaccatcaatagcctggaagctgaagatgctgcaacgtattactgtcatcagagtagtagtttacct

SEQ ID NO: 142323 - DNA, 406 bp, Homo sapiens; identical to SEQ ID NO: 142322
  Payload ID: 8083
  Gene Symbol: IGKV6-21
  Gene Name: immunoglobulin kappa variable 6-21 (non-functional)
  ENST ID: ENST00000631699
  CDS Start-End: 65-406

SEQ ID NO: 142324 - DNA, 409 bp, Homo sapiens
  Payload ID: 8084
  Gene Symbol: IGKV6D-21
  Gene Name: immunoglobulin kappa variable 6D-21 (non-functional)
  ENST ID: ENST00000436451
  CDS Start-End: 68-409
ggtatcttaaaagaggttctttctctgggatgtggcatgagcaaaactgacaagtcaaggcaggaagatgtcgccatcacaactcattgggtttctgctgctctgggttccagcctccaggggtgaaattgtgctgactcagtctccagactttcagtctgtgactccaaaggagaaagtcaccatcacctgccgggccagtcagagcattggtagtagcttacactggtaccagcagaaaccagatcagtctccaaagctcctcatcaagtatgcttcccagtccatctcaggggtcccctcgaggttcagtggcagtggatctgggacagatttcaccctcaccatcaatagcctggaagctgaagatgctgcagcgtattactgtcatcagagtagtagtttacct

SEQ ID NO: 142325 - DNA, 371 bp, Homo sapiens
  Payload ID: 8085
  Gene Symbol: IGKV6D-41
  Gene Name: immunoglobulin kappa variable 6D-41 (non-functional)
  ENST ID: ENST00000390271
  CDS Start-End: 27-371
agcaaaactgaagtcaaaacactgagatggtgtccccgttgcaattcctgcggcttctgctcctctgggttccagcctccaggggtgatgttgtgatgacacagtctccagctttcctctctgtgactccaggggagaaagtcaccatcacctgccaggccagtgaaggcattggcaactacttatactggtaccagcagaaaccagatcaagccccaaagctcctcatcaagtatgcttcccagtccatctcaggggtcccctcgaggttcagtggcagtggatctgggacagatttcacctttaccatcagtagcctggaagctgaagatgctgcaacatattactgtcagcagggcaataagcaccct

SEQ ID NO: 142326 - DNA, 460 bp, Homo sapiens
  Payload ID: 8086
  Gene Symbol: IGLC1
  Gene Name: immunoglobulin lambda constant 1 (Mcg marker)
  ENST ID: ENST00000390321
  CDS Start-End: 1-320
gtcagcccaaggccaaccccactgtcactctgttcccgccctcctctgaggagctccaagccaacaaggccacactagtgtgtctgatcagtgacttctacccgggagctgtgacagtggcctggaaggcagatggcagccccgtcaaggcgggagtggagaccaccaaaccctccaaacagagcaacaacaagtacgcggccagcagctacctgagcctgacgcccgagcagtggaagtcccacagaagctacagctgccaggtcacgcatgaagggagcaccgtggagaagacagtggcccctacagaatgttcataggttcccaactctaaccccacccacgggagcctggagctgcaggatcccaggggaggggtctctctccccatcccaagtcatccagcccttctccctgcactcatgaaaccccaataaatatcctcattgacaaccagaaa

SEQ ID NO: 142327 - DNA, 462 bp, Homo sapiens
  Payload ID: 8087
  Gene Symbol: IGLC2
  Gene Name: immunoglobulin lambda constant 2 (Kern-Oz- marker)
  ENST ID: ENST00000390323
  CDS Start-End: 1-320
gtcagcccaaggctgccccctcggtcactctgttcccgccctcctctgaggagcttcaagccaacaaggccacactggtgtgtctcataagtgacttctacccgggagccgtgacagtggcctggaaggcagatagcagccccgtcaaggcgggagtggagaccaccacaccctccaaacaaagcaacaacaagtacgcggccagcagctatctgagcctgacgcctgagcagtggaagtcccacagaagctacagctgccaggtcacgcatgaagggagcaccgtggagaagacagtggcccctacagaatgttcataggttctcaaccctcaccccccaccacgggagactagagctgcaggatcccaggggaggggtctctcctcccaccccaaggcatcaagcccttctccctgcactcaataaaccctcaataaatattctcattgtcaatcagaaa

SEQ ID NO: 142328 - DNA, 462 bp, Homo sapiens
  Payload ID: 8088
  Gene Symbol: IGLC3
  Gene Name: immunoglobulin lambda constant 3 (Kern-Oz+ marker)
  ENST ID: ENST00000390325
  CDS Start-End: 1-320
gtcagcccaaggctgccccctcggtcactctgttcccaccctcctctgaggagcttcaagccaacaaggccacactggtgtgtctcataagtgacttctacccgggagccgtgacagtggcctggaaggcagatagcagccccgtcaaggcgggagtggagaccaccacaccctccaaacaaagcaacaacaagtacgcggccagcagctacctgagcctgacgcctgagcagtggaagtcccacaaaagctacagctgccaggtcacgcatgaagggagcaccgtggagaagacagtggcccctacagaatgttcataggttctcatccctcaccccccaccacgggagactagagctgcaggatcccaggggaggggtctctcctcccaccccaaggcatcaagcccttctccctgcactcaataaaccctcaataaatattctcattgtcaatcagaaa

SEQ ID NO: 142329 - DNA, 441 bp, Homo sapiens
  Payload ID: 8089
  Gene Symbol: IGLC7
  Gene Name: immunoglobulin lambda constant 7
  ENST ID: ENST00000390331
  CDS Start-End: 1-320
gtcagcccaaggctgccccctcggtcactctgttcccaccctcctctgaggagcttcaagccaacaaggccacactggtgtgtctcgtaagtgacttcaacccgggagccgtgacagtggcctggaaggcagatggcagccccgtcaaggtgggagtggagaccaccaaaccctccaaacaaagcaacaacaagtatgcggccagcagctacctgagcctgacgcccgagcagtggaagtcccacagaagctacagctgccgggtcacgcatgaagggagcaccgtggagaagacagtggcccctgcagaatgctcttaggcccccgaccctcaccccacccacaggggcctggagctgcaggttcccaggggaggggtctctgcccccatcccaagtcatccagcccttctcaataaatatcctcatcgtcaacgagaaa

SEQ ID NO: 142330 - DNA, 127 bp, Homo sapiens
  Payload ID: 8090
  Gene Symbol: IGLJ1
  Gene Name: immunoglobulin lambda joining 1
  ENST ID: ENST00000390320
  CDS Start-End: 1-127
cccagcaggctcctgctccagcccagcccccagagagcagaccccaggtgctggccccgggggttttggtctgagcctcagtcactgtgttatgtcttcggaactgggaccaaggtcaccgtcctag

SEQ ID NO: 142331 - DNA, 175 bp, Homo sapiens
  Payload ID: 8091
  Gene Symbol: IGLJ2
  Gene Name: immunoglobulin lambda joining 2
  ENST ID: ENST00000390322
  CDS Start-End: 34-175
gtgtgggggccatgtggactccctcatgagcagatgccaccagggccactggccccagcttcctccttcacagctgcagtgggggctggggctggggcatcccagggagggtttttgtatgagcctgtgtcacagtgtgtggtattcggcggagggaccaagctgaccgtcctag

SEQ ID NO: 142332 - DNA, 176 bp, Homo sapiens
  Payload ID: 8092
  Gene Symbol: IGLJ3
  Gene Name: immunoglobulin lambda joining 3
  ENST ID: ENST00000390324
  CDS Start-End: 26-176
gtgtgggggccatgtggactccctcatgagcagatgccaccaggaccactggtcccagcttcctccttcacagctgcagtgggggctggggctaggggcatcccagggagggtttttgtatgagcctgtgtcacagtgttgggtgttcggcggagggaccaagctgaccgtcctag

SEQ ID NO: 142333 - DNA, 33 bp, Homo sapiens
  Payload ID: 8093
  Gene Symbol: IGLJ4
  Gene Name: immunoglobulin lambda joining 4 (non-functional)
  ENST ID: ENST00000390326
  CDS Start-End: 1-33
gtatttggtggaggaacccagctgatcatttta

SEQ ID NO: 142334 - DNA, 72 bp, Homo sapiens
  Payload ID: 8094
  Gene Symbol: IGLJ5
  Gene Name: immunoglobulin lambda joining 5 (non-functional)
  ENST ID: ENST00000390327
  CDS Start-End: 1-72
cagagagggtttttgtatgagcctgtgtcacagcactgggtgtttggtgaggggaccgagctgaccgtccta

SEQ ID NO: 142335 - DNA, 70 bp, Homo sapiens
  Payload ID: 8095
  Gene Symbol: IGLJ6
  Gene Name: immunoglobulin lambda joining 6
  ENST ID: ENST00000390328
  CDS Start-End: 1-70
ggagggtttgtgtgcagggttatatcacagtgtaatgtgttcggcagtggcaccaaggtgaccgtcctcg

SEQ ID NO: 142336 - DNA, 46 bp, Homo sapiens
  Payload ID: 8096
  Gene Symbol: IGLJ7
  Gene Name: immunoglobulin lambda joining 7
  ENST ID: ENST00000390330
  CDS Start-End: 1-46
tcactgtgtgctgtgttcggaggaggcacccagctgaccgtcctcg

SEQ ID NO: 142337 - DNA, 365 bp, Homo sapiens
  Payload ID: 8097
  Gene Symbol: IGLV10-54
  Gene Name: immunoglobulin lambda variable 10-54
  ENST ID: ENST00000390287
  CDS Start-End: 14-365
gggaatctgcaccatgccctgggctctgctcctcctgaccctcctcactcactctgcagtgtcagtggtccaggcagggctgactcagccaccctcggtgtccaagggcttgagacagaccgccacactcacctgcactgggaacagcaacattgttggcaaccaaggagcagcttggctgcagcagcaccagggccaccctcccaaactcctatcctacaggaataacaaccggccctcagggatctcagagagattctctgcatccaggtcaggaaacacagcctccctgaccattactggactccagcctgaggacgaggctgactattactgctcagcattggacagcagcctcagtgctc

SEQ ID NO: 142338 - DNA, 426 bp, Homo sapiens
  Payload ID: 8098
  Gene Symbol: IGLV11-55
  Gene Name: immunoglobulin lambda variable 11-55 (non-functional)
  ENST ID: ENST00000390286
  CDS Start-End: 13-426
gctgtgtccactatggccctgactcctctcctcctcctgctcctctctcactgcacaggttccctctcccggcccgtgctgactcagccgccctccctgtctgcatccccgggagcaacagccagactcccctgcaccctgagcagtgacctcagtgttggtggtaaaaacatgttctggtaccagcagaagctagggagctctcccaggttattcctgtatcactactcagactcagacaagcagctgggacctggggtccccagtcgagtctctggctccaaggagacctcaagtaacacagcgtttttgctcatctctgggctccagcctgaggacgaggccgattattactgccaggtgtacgaaagtagtgctaatcacagtgagacagatgaggaagtcggacaaaaaccaaggttttaa

SEQ ID NO: 142339 - DNA, 393 bp, Homo sapiens
  Payload ID: 8099
  Gene Symbol: IGLV1-36
  Gene Name: immunoglobulin lambda variable 1-36
  ENST ID: ENST00000390301
  CDS Start-End: 41-393
gctgcgggtagagaagacaggactcaggacaatctccagcatggcctggtcccctctcttcctcaccctcatcactcactgtgcagggtcctgggcccagtctgtgctgactcagccaccctcggtgtctgaagcccccaggcagagggtcaccatctcctgttctggaagcagctccaacatcggaaataatgctgtaaactggtaccagcagctcccaggaaaggctcccaaactcctcatctattatgatgatctgctgccctcaggggtctctgaccgattctctggctccaagtctggcacctcagcctccctggccatcagtgggctccagtctgaggatgaggctgattattactgtgcagcatgggatgacagcctgaatggtcc

SEQ ID NO: 142340 - DNA, 351 bp, Homo sapiens
  Payload ID: 8099
  Gene Symbol: IGLV1-36
  Gene Name: immunoglobulin lambda variable 1-36
  ENST ID: ENST00000615359
  CDS Start-End: 1-351
atgacctgctcccctctcctcctcacccttctcattcactgcacagggtcctgggcccagtctgtgctgactcagccaccctcggtgtctgaagcccccaggcagagggtcaccatctcctgttctggaagcagctccaacatcggaaataatgctgtaaactggtaccagcagctcccaggaaaggctcccaaactcctcatctattatgatgatctgctgccctcaggggtctctgaccgattctctggctccaagtctggcacctcagcctccctggccatcagtgggctccagtctgaggatgaggctgattattactgtgcagcatgggatgacagcctgaatggt

SEQ ID NO: 142341 - DNA, 393 bp, Homo sapiens; identical to SEQ ID NO: 142339
  Payload ID: 8099
  Gene Symbol: IGLV1-36
  Gene Name: immunoglobulin lambda variable 1-36
  ENST ID: ENST00000618026
  CDS Start-End: 41-393

SEQ ID NO: 142342 - DNA, 407 bp, Homo sapiens
  Payload ID: 8100
  Gene Symbol: IGLV1-40
  Gene Name: immunoglobulin lambda variable 1-40
  ENST ID: ENST00000390299
  CDS Start-End: 52-407
gctctgcttcagctgtgggcacaagaggcagcactcaggacaatctccagcatggcctggtctcctctcctcctcactctcctcgctcactgcacagggtcctgggcccagtctgtgctgacgcagccgccctcagtgtctggggccccagggcagagggtcaccatctcctgcactgggagcagctccaacatcggggcaggttatgatgtacactggtaccagcagcttccaggaacagcccccaaactcctcatctatggtaacagcaatcggccctcaggggtccctgaccgattctctggctccaagtctggcacctcagcctccctggccatcactgggctccaggctgaggatgaggctgattattactgccagtcctatgacagcagcctgagtggttc

SEQ ID NO: 142343 - DNA, 407 bp, Homo sapiens; identical to SEQ ID NO: 142342
  Payload ID: 8100
  Gene Symbol: IGLV1-40
  Gene Name: immunoglobulin lambda variable 1-40
  ENST ID: ENST00000610349
  CDS Start-End: 52-407

SEQ ID NO: 142344 - DNA, 467 bp, Homo sapiens
  Payload ID: 8101
  Gene Symbol: IGLV1-44
  Gene Name: immunoglobulin lambda variable 1-44
  ENST ID: ENST00000390297
  CDS Start-End: 115-467
ctgatttgcatggatggactctccccctctcagagtatgaagagagggagagatctgggggaagctcagcttcagctgtgggtagagaagacaggactcaggacaatctccagcatggccagcttccctctcctcctcaccctcctcactcactgtgcagggtcctgggcccagtctgtgctgactcagccaccctcagcgtctgggacccccgggcagagggtcaccatctcttgttctggaagcagctccaacatcggaagtaatactgtaaactggtaccagcagctcccaggaacggcccccaaactcctcatctatagtaataatcagcggccctcaggggtccctgaccgattctctggctccaagtctggcacctcagcctccctggccatcagtgggctccagtctgaggatgaggctgattattactgtgcagcatgggatgacagcctgaatggtcc

SEQ ID NO: 142345 - DNA, 466 bp, Homo sapiens
  Payload ID: 8101
  Gene Symbol: IGLV1-44
  Gene Name: immunoglobulin lambda variable 1-44
  ENST ID: ENST00000628287
  CDS Start-End: 115-466
ctgatttgcatggatggactctccccctctcagagtatgaagagagggagagatctgggggaagctcagcttcagctgtgggtagagaagacaggactcaggacaatctccagcatggccagcttccctctcctcctcaccctcctcactcactgtgcagggtcctgggcccagtctgtgctgactcagccaccctcagcgtctgggacccccgggcagagggtcaccatctcttgttctggaagcagctccaacatcggaagtaatactgtaaactggtaccagcagctcccaggaacggcccccaaactcctcatctatagtaataatcagcggccctcaggggtccctgaccgattctctggctccaagtctggcacctcagcctccctggccatcagtgggctccagtctgaggatgaggctgattattactgtgcagcatgggatgacagcctgaatggtc

SEQ ID NO: 142346 - DNA, 407 bp, Homo sapiens
  Payload ID: 8102
  Gene Symbol: IGLV1-47
  Gene Name: immunoglobulin lambda variable 1-47
  ENST ID: ENST00000390294
  CDS Start-End: 57-407
ggggaagctcagcttcagctgtggtagagaagacaggattcaggacaatctccagcatggccggcttccctctcctcctcaccctcctcactcactgtgcagggtcctgggcccagtctgtgctgactcagccaccctcagcgtctgggacccccgggcagagggtcaccatctcttgttctggaagcagctccaacatcggaagtaattatgtatactggtaccagcagctcccaggaacggcccccaaactcctcatctatagtaataatcagcggccctcaggggtccctgaccgattctctggctccaagtctggcacctcagcctccctggccatcagtgggctccggtccgaggatgaggctgattattactgtgcagcatgggatgacagcctgagtggt

SEQ ID NO: 142347 - DNA, 405 bp, Homo sapiens
  Payload ID: 8103
  Gene Symbol: IGLV1-50
  Gene Name: immunoglobulin lambda variable 1-50 (non-functional)
  ENST ID: ENST00000390291
  CDS Start-End: 52-405
gctctgcttcagctgtgggcacaggaggcagcactcaggacaatctccagcatggcctggtcttctctcctcctcactctcctcgctcactgcacagggtcctgggcccagtctgtgctgacgcagccgccctcagtgtctggggccccagggcagagggtcaccatctcctgcactgggagcagctccaacattggggcgggttatgttgtacattggtaccagcagcttccaggaacagcccccaaactcctcatctatggtaacagcaatcggccctcaggggtccctgaccaattctctggctccaagtctggcacctcagcctccctggccatcactggactccagtctgaggatgaggctgattattactgcaaagcatgggataacagcctgaatgct

SEQ ID NO: 142348 - DNA, 400 bp, Homo sapiens
  Payload ID: 8104
  Gene Symbol: IGLV1-51
  Gene Name: immunoglobulin lambda variable 1-51
  ENST ID: ENST00000390290
  CDS Start-End: 37-400
tgagcgcagaaggcaggactcgggacaatcttcatcatgacctgctcccctctcctcctcacccttctcattcactgcacagggtcctgggcccagtctgtgttgacgcagccgccctcagtgtctgcggccccaggacagaaggtcaccatctcctgctctggaagcagctccaacattgggaataattatgtatcctggtaccagcagctcccaggaacagcccccaaactcctcatttatgacaataataagcgaccctcagggattcctgaccgattctctggctccaagtctggcacgtcagccaccctgggcatcaccggactccagactggggacgaggccgattattactgcggaacatgggatagcagcctgagtgctggcacagtgctcc

SEQ ID NO: 142349 - DNA, 400 bp, Homo sapiens
  Payload ID: 8105
  Gene Symbol: IGLV2-11
  Gene Name: immunoglobulin lambda variable 2-11
  ENST ID: ENST00000390314
  CDS Start-End: 43-400
tgctggggtctcaggaggcagcactctcgggacgtctccaccatggcctgggctctgctcctcctcagcctcctcactcagggcacaggatcctgggctcagtctgccctgactcagcctcgctcagtgtccgggtctcctggacagtcagtcaccatctcctgcactggaaccagcagtgatgttggtggttataactatgtctcctggtaccaacagcacccaggcaaagcccccaaactcatgatttatgatgtcagtaagcggccctcaggggtccctgatcgcttctctggctccaagtctggcaacacggcctccctgaccatctctgggctccaggctgaggatgaggctgattattactgctgctcatatgcaggcagctacactttccaca

SEQ ID NO: 142350 - DNA, 402 bp, Homo sapiens
  Payload ID: 8106
  Gene Symbol: IGLV2-14
  Gene Name: immunoglobulin lambda variable 2-14
  ENST ID: ENST00000390312
  CDS Start-End: 42-402
gctggggtctcaggaggcagcgctctcaggacatctccaccatggcctgggctctgctgctcctcaccctcctcactcagggcacagggtcctgggcccagtctgccctgactcagcctgcctccgtgtctgggtctcctggacagtcgatcaccatctcctgcactggaaccagcagtgacgttggtggttataactatgtctcctggtaccaacagcacccaggcaaagcccccaaactcatgatttatgaggtcagtaatcggccctcaggggtttctaatcgcttctctggctccaagtctggcaacacggcctccctgaccatctctgggctccaggctgaggacgaggctgattattactgcagctcatatacaagcagcagcactctccacagtg

SEQ ID NO: 142351 - DNA, 374 bp, Homo sapiens
  Payload ID: 8107
  Gene Symbol: IGLV2-18
  Gene Name: immunoglobulin lambda variable 2-18
  ENST ID: ENST00000390310
  CDS Start-End: 14-374
gaatatctccaccatggcctgggctctgctcctcctcaccctcctcactcagggcacaggatcctgggctcagtctgccctgactcagcctccctccgtgtccgggtctcctggacagtcagtcaccatctcctgcactggaaccagcagtgacgttggtagttataaccgtgtctcctggtaccagcagcccccaggcacagcccccaaactcatgatttatgaggtcagtaatcggccctcaggggtccctgatcgcttctctgggtccaagtctggcaacacggcctccctgaccatctctgggctccaggctgaggacgaggctgattattactgcagcttatatacaagcagcagcactttccacagag

SEQ ID NO: 142352 - DNA, 502 bp, Homo sapiens
  Payload ID: 8108
  Gene Symbol: IGLV2-23
  Gene Name: immunoglobulin lambda variable 2-23
  ENST ID: ENST00000390306
  CDS Start-End: 163-502
tctctgagcccaggcccacgtgagggtggggtgaggagaggagcccaggatgctgattttcatggaggccccgccctcctctgaggcaaaggggataagacagggctggggcagggccagtgctggggtcacaagaggcagcgctctcgggacgtctccaccatggcctgggctctgctgctcctcactctcctcactcaggacacagggtcctgggcccagtctgccctgactcagcctgcctccgtgtctgggtctcctggacagtcgatcaccatctcctgcactggaaccagcagtgatgttgggagttataaccttgtctcctggtaccaacagcacccaggcaaagcccccaaactcatgatttatgagggcagtaagcggccctcaggggtttctaatcgcttctctggctccaagtctggcaacacggcctccctgacaatctctgggctccaggctgaggacgaggctgattattactgctgctcatatgcag

SEQ ID NO: 142353 - DNA, 412 bp, Homo sapiens
  Payload ID: 8109
  Gene Symbol: IGLV2-33
  Gene Name: immunoglobulin lambda variable 2-33 (non-functional)
  ENST ID: ENST00000390302
  CDS Start-End: 59-412
ggctagaggcaggcccggtgctggggtctcaaggcagcgctctcgggacatctccaccatggcctgggctctgctcctcctcaccctcctcactcagggcacagggtcctgggcccaatctgccctgactcagcctccttttgtgtccggggctcctggacagtcggtcaccatctcctgcactggaaccagcagtgacgttggggattatgatcatgtcttctggtaccaaaagcgtctcagcactacctccagactcctgatttacaatgtcaatactcggccttcagggatctctgacctcttctcaggctccaagtctggcaacatggcttccctgaccatctctgggctcaagtccgaggttgaggctaattatcactgcagcttatattcaagtagttacactttc

SEQ ID NO: 142354 - DNA, 412 bp, Homo sapiens; identical to SEQ ID NO: 142353
  Payload ID: 8109
  Gene Symbol: IGLV2-33
  Gene Name: immunoglobulin lambda variable 2-33 (non-functional)
  ENST ID: ENST00000629472
  CDS Start-End: 59-412

SEQ ID NO: 142355 - DNA, 521 bp, Homo sapiens
  Payload ID: 8110
  Gene Symbol: IGLV2-8
  Gene Name: immunoglobulin lambda variable 2-8
  ENST ID: ENST00000620395
  CDS Start-End: 50-521
tctctaagcccaggcccaagtgagggtggggtgagaagaggagctcaggatgcagatttgcatggaggtcccgcccttctctgaggcagaggggataagacagggctgggggcaggcccagtgctggggtctcaggaggcagcgctctcaggacgtcaccaccatggcctgggctctgctcctcctcaccctcctcactcagggcacagggtcctgggcccagtctgccctgactcagcctccctccgcgtccgggtctcctggacagtcagtcaccatctcctgcactggaaccagcagtgacgttggtggttataactatgtctcctggtaccaacagcacccaggcaaagcccccaaactcatgatttatgaggtcagtaagcggccctcaggggtccctgatcgcttctctggctccaagtctggcaacacggcctccctgaccgtctctgggctccaggctgaggatgaggctgattattactgcagctcatatgcaggcagcaacaatttccaca

SEQ ID NO: 142356 - DNA, 398 bp, Homo sapiens
  Payload ID: 8111
  Gene Symbol: IGLV3-1
  Gene Name: immunoglobulin lambda variable 3-1
  ENST ID: ENST00000390319
  CDS Start-End: 53-398
aagaacctgcccagcctgggcctcaggaagcagcatcggaggtgcctcagccatggcatggatccctctcttcctcggcgtccttgcttactgcacaggatccgtggcctcctatgagctgactcagccaccctcagtgtccgtgtccccaggacagacagccagcatcacctgctctggagataaattgggggataaatatgcttgctggtatcagcagaagccaggccagtcccctgtgctggtcatctatcaagatagcaagcggccctcagggatccctgagcgattctctggctccaactctgggaacacagccactctgaccatcagcgggacccaggctatggatgaggctgactattactgtcaggcgtgggacagcagcactgcacaca

SEQ ID NO: 142357 - DNA, 386 bp, Homo sapiens
  Payload ID: 8112
  Gene Symbol: IGLV3-10
  Gene Name: immunoglobulin lambda variable 3-10
  ENST ID: ENST00000390315
  CDS Start-End: 36-386
gtgggctcaggaggcagagctctgggaatctcaccatggcctggacccctctcctgctccccctcctcactttctgcacagtctctgaggcctcctatgagctgacacagccaccctcggtgtcagtgtccccaggacaaacggccaggatcacctgctctggagatgcattgccaaaaaaatatgcttattggtaccagcagaagtcaggccaggcccctgtgctggtcatctatgaggacagcaaacgaccctccgggatccctgagagattctctggctccagctcagggacaatggccaccttgactatcagtggggcccaggtggaggatgaagctgactactactgttactcaacagacagcagtggtaatcatagcaca

SEQ ID NO: 142358 - DNA, 360 bp, Homo sapiens
  Payload ID: 8113
  Gene Symbol: IGLV3-12
  Gene Name: immunoglobulin lambda variable 3-12
  ENST ID: ENST00000390313
  CDS Start-End: 10-360
gcctcagccatggcctggacccctctcctcctcagcctcctcgctcactgcacaggctctgcgacctcctatgagctgactcagccacactcagtgtcagtggccacagcacagatggccaggatcacctgtgggggaaacaacattggaagtaaagctgtgcactggtaccagcaaaagccaggccaggaccctgtgctggtcatctatagcgatagcaaccggccctcagggatccctgagcgattctctggctccaacccagggaacaccgccaccctaaccatcagcaggatcgaggctggggatgaggctgactattactgtcaggtgtgggacagtagtagtgatcatcccacg

SEQ ID NO: 142359 - DNA, 375 bp, Homo sapiens
  Payload ID: 8114
  Gene Symbol: IGLV3-16
  Gene Name: immunoglobulin lambda variable 3-16
  ENST ID: ENST00000390311
  CDS Start-End: 39-375
tctgtgggtccaggaggcacagctctgggaatctcaccatggcctggatccctctcctgctccccctcctcactctctgcacaggctctgaggcctcctatgagctgacacagccaccctcggtgtcagtgtccctaggacagatggccaggatcacctgctctggagaagcattgccaaaaaaatatgcttattggtaccagcagaagccaggccagttccctgtgctggtgatatataaagacagcgagaggccctcagggatccctgagcgattctctggctccagctcagggacaatagtcacattgaccatcagtggagtccaggcagaagacgaggctgactattactgtctatcagcagacagcagtg

SEQ ID NO: 142360 - DNA, 377 bp, Homo sapiens
  Payload ID: 8115
  Gene Symbol: IGLV3-19
  Gene Name: immunoglobulin lambda variable 3-19
  ENST ID: ENST00000390309
  CDS Start-End: 41-377
agctgtgggctcagaagcagagttctggggtgtctccaccatggcctggacccctctctggctcactctcctcactctttgcataggttctgtggtttcttctgagctgactcaggaccctgctgtgtctgtggccttgggacagacagtcaggatcacatgccaaggagacagcctcagaagctattatgcaagctggtaccagcagaagccaggacaggcccctgtacttgtcatctatggtaaaaacaaccggccctcagggatcccagaccgattctctggctccagctcaggaaacacagcttccttgaccatcactggggctcaggcggaagatgaggctgactattactgtaactcccgggacagcagtg

SEQ ID NO: 142361 - DNA, 602 bp, Homo sapiens
  Payload ID: 8116
  Gene Symbol: IGLV3-21
  Gene Name: immunoglobulin lambda variable 3-21
  ENST ID: ENST00000390308
  CDS Start-End: 252-602
gcacagaggagctgtgccctggaatggggcctgtacctgtccaaggcttgtgccgtcccctgtgggagatgagaagcgtccctgcattgggctcttggggacccgtcttggacatgaatctcctccagcagcagcctctgactctgctgatttgcatcatgggccgctctctccagcaaggggataagagaggcctgggaggaacctgctcagtctgggcctaaggaagcagcactggtggtgcctcagccatggcctggaccgttctcctcctcggcctcctctctcactgcacaggctctgtgacctcctatgtgctgactcagccaccctcggtgtcagtggccccaggacagacggccaggattacctgtgggggaaacaacattggaagtaaaagtgtgcactggtaccagcagaagccaggccaggcccctgtgctggtcgtctatgatgatagcgaccggccctcagggatccctgagcgattctctggctccaactctgggaacacggccaccctgaccatcagcagggtcgaagccggggatgaggccgactattactgtcaggtgtgggatagtagtagtgatcatcccacg

SEQ ID NO: 142362 - DNA, 409 bp, Homo sapiens
  Payload ID: 8117
  Gene Symbol: IGLV3-22
  Gene Name: immunoglobulin lambda variable 3-22 (gene/pseudogene)
  ENST ID: ENST00000390307
  CDS Start-End: 65-409
aagagaggcctgggaagcccagctgtgctgtgggctcaggaggcagagctgtgggtgtctcaccatggcatgggccacactcctgctcccactcctcaacctctacacaggctctgttgcctcctatgagctgacacagctaccctcggtgtcagtgtccccaggacagacagccaggatcacctgctctggagatgtactgggggaaaattatgctgactggtaccagcagaagccaggccaggcccctgagttggtgatatacgaagatagtgagcggtaccctggaatccctgaacgattctctgggtccacctcagggaacacgaccaccctgaccatcagcagggtcctgaccgaagacgaggctgactattactgtttgtctggggatgaggacaatccctca

SEQ ID NO: 142363 - DNA, 380 bp, Homo sapiens
  Payload ID: 8118
  Gene Symbol: IGLV3-25
  Gene Name: immunoglobulin lambda variable 3-25
  ENST ID: ENST00000390305
  CDS Start-End: 44-380
gctgtgctgtgggtccaggaggcagaactctgggtgtctcaccatggcctggatccctctacttctccccctcctcactctctgcacaggctctgaggcctcctatgagctgacacagccaccctcggtgtcagtgtccccaggacagacggccaggatcacctgctctggagatgcattgccaaagcaatatgcttattggtaccagcagaagccaggccaggcccctgtgctggtgatatataaagacagtgagaggccctcagggatccctgagcgattctctggctccagctcagggacaacagtcacgttgaccatcagtggagtccaggcagaagacgaggctgactattactgtcaatcagcagacagcagtg

SEQ ID NO: 142364 - DNA, 377 bp, Homo sapiens
  Payload ID: 8119
  Gene Symbol: IGLV3-27
  Gene Name: immunoglobulin lambda variable 3-27
  ENST ID: ENST00000390304
  CDS Start-End: 39-377
gctgtaggctcaggaggcagagctctgaatgtctcaccatggcctggatccctctcctgctccccctcctcattctctgcacagtctctgtggcctcctatgagctgacacagccatcctcagtgtcagtgtctccgggacagacagccaggatcacctgctcaggagatgtactggcaaaaaaatatgctcggtggttccagcagaagccaggccaggcccctgtgctggtgatttataaagacagtgagcggccctcagggatccctgagcgattctccggctccagctcagggaccacagtcaccttgaccatcagcggggcccaggttgaggatgaggctgactattactgttactctgcggctgacaacaat

SEQ ID NO: 142365 - DNA, 383 bp, Homo sapiens
  Payload ID: 8120
  Gene Symbol: IGLV3-32
  Gene Name: immunoglobulin lambda variable 3-32 (non-functional)
  ENST ID: ENST00000390303
  CDS Start-End: 40-383
gctgtggactcagaggcagagctctggggcatttccattatggcctggacccctcccctgctcgtcctcactctctgcacaggctccgttatttcctctgggccaactcaggtgcctgcagtgtctgtggccttgggacaaatggccaggatcacctgccagggagacagcatggaaggctcttatgaacactggtaccagcagaagccaggccaggcccccgtgctggtcatctatgatagcagtgaccggccctcaaggatccctgagcgattctctggctccaaatcaggcaacacaaccaccctgaccatcactggggcccaggctgaggatgaggctgattattactatcagttgatagacaaccatgctactcaact

SEQ ID NO: 142366 - DNA, 383 bp, Homo sapiens; identical to SEQ ID NO: 142365
  Payload ID: 8120
  Gene Symbol: IGLV3-32
  Gene Name: immunoglobulin lambda variable 3-32 (non-functional)
  ENST ID: ENST00000627634
  CDS Start-End: 40-383

SEQ ID NO: 142367 - DNA, 461 bp, Homo sapiens
  Payload ID: 8121
  Gene Symbol: IGLV3-9
  Gene Name: immunoglobulin lambda variable 3-9 (gene/pseudogene)
  ENST ID: ENST00000390316
  CDS Start-End: 116-461
cttgactctgctgatttgcatcacaggctgctctcttcagcaaggggataagagagggctggaaggaacctgcccagcctgggcctcaggaagcagcatcgggggtgccgcagccatggcctggaccgctctccttctgagcctccttgctcactttacaggttctgtggcctcctatgagctgactcagccactctcagtgtcagtggccctgggacagacggccaggattacctgtgggggaaacaacattggaagtaaaaatgtgcactggtaccagcagaagccaggccaggcccctgtgctggtcatctatagggatagcaaccggccctctgggatccctgagcgattctctggctccaactcggggaacacggccaccctgaccatcagcagagcccaagccggggatgaggctgactattactgtcaggtgtgggacagcagcactgcacaca

SEQ ID NO: 142368 - DNA, 403 bp, Homo sapiens
  Payload ID: 8122
  Gene Symbol: IGLV4-3
  Gene Name: immunoglobulin lambda variable 4-3
  ENST ID: ENST00000390318
  CDS Start-End: 33-401
ctcgaatagagctcttggaagtccctccaaccatggcctgggtctccttctacctactgcccttcattttctccacaggtctctgtgctctgcctgtgctgactcagcccccgtctgcatctgccttgctgggagcctcgatcaagctcacctgcaccctaagcagtgagcacagcacctacaccatcgaatggtatcaacagagaccagggaggtccccccagtatataatgaaggttaagagtgatggcagccacagcaagggggacgggatccccgatcgcttcatgggctccagttctggggctgaccgctacctcaccttctccaacctccagtctgacgatgaggctgagtatcactgtggagagagccacacgattgatggccaagtcggttgagc

SEQ ID NO: 142369 - DNA, 362 bp, Homo sapiens
  Payload ID: 8123
  Gene Symbol: IGLV4-60
  Gene Name: immunoglobulin lambda variable 4-60
  ENST ID: ENST00000390284
  CDS Start-End: 1-362
atggcctggaccccactcctcctcctcttccctctcctcctccactgcacagggtctctctcccagcctgtgctgactcaatcatcctctgcctctgcttccctgggatcctcggtcaagctcacctgcactctgagcagtgggcacagtagctacatcatcgcatggcatcagcagcagccagggaaggcccctcggtacttgatgaagcttgaaggtagtggaagctacaacaaggggagcggagttcctgatcgcttctcaggctccagctctggggctgaccgctacctcaccatctccaacctccagtttgaggatgaggctgattattactgtgagacctgggacagtaacactca

SEQ ID NO: 142370 - DNA, 419 bp, Homo sapiens
  Payload ID: 8124
  Gene Symbol: IGLV4-69
  Gene Name: immunoglobulin lambda variable 4-69
  ENST ID: ENST00000390282
  CDS Start-End: 61-419
agggtgggtaagaaatacctgcaactgtcagcctcagcagagctctggggagtctgcaccatggcttggaccccactcctcttcctcaccctcctcctccactgcacagggtctctctcccagcttgtgctgactcaatcgccctctgcctctgcctccctgggagcctcggtcaagctcacctgcactctgagcagtgggcacagcagctacgccatcgcatggcatcagcagcagccagagaagggccctcggtacttgatgaagcttaacagtgatggcagccacagcaagggggacgggatccctgatcgcttctcaggctccagctctggggctgagcgctacctcaccatctccagcctccagtctgaggatgaggctgactattactgtcagacctggggcactggcattca

SEQ ID NO: 142371 - DNA, 374 bp, Homo sapiens
  Payload ID: 8125
  Gene Symbol: IGLV5-37
  Gene Name: immunoglobulin lambda variable 5-37
  ENST ID: ENST00000390300
  CDS Start-End: 6-374
ccaccatggcctggactcctcttcttctcttgctcctctctcactgcacaggttccctctcccagcctgtgctgactcagccaccttcctcctccgcatctcctggagaatccgccagactcacctgcaccttgcccagtgacatcaatgttggtagctacaacatatactggtaccagcagaagccagggagccctcccaggtatctcctgtactactactcagactcagataagggccagggctctggagtccccagccgcttctctggatccaaagatgcttcagccaatacagggattttactcatctccgggctccagtctgaggatgaggctgactattactgtatgatttggccaagcaatgcttct

SEQ ID NO: 142372 - DNA, 374 bp, Homo sapiens; identical to SEQ ID NO: 142371
  Payload ID: 8125
  Gene Symbol: IGLV5-37
  Gene Name: immunoglobulin lambda variable 5-37
  ENST ID: ENST00000628968
  CDS Start-End: 6-374

SEQ ID NO: 142373 - DNA, 397 bp, Homo sapiens
  Payload ID: 8126
  Gene Symbol: IGLV5-45
  Gene Name: immunoglobulin lambda variable 5-45
  ENST ID: ENST00000390296
  CDS Start-End: 29-397
actgcgggggtaagaggttgtgtccaccatggcctggactcctctcctcctcctgttcctctctcactgcacaggttccctctcgcaggctgtgctgactcagccgtcttccctctctgcatctcctggagcatcagccagtctcacctgcaccttgtgcagtggcatcaatgttggtacctacaggatatactggtaccagcagaagccagggagtcctccccagtatctcctgaggtacaaatcagactcagataagcagcagggctctggagtccccagccgcttctctggatccaaagatgcttcggccaatgcagggattttactcatctctgggctccagtctgaggatgaggctgactattactgtatgatttggcacagcagcgcttct

SEQ ID NO: 142374 - DNA, 397 bp, Homo sapiens
  Payload ID: 8126
  Gene Symbol: IGLV5-45
  Gene Name: immunoglobulin lambda variable 5-45
  ENST ID: ENST00000626489
  CDS Start-End: 29-397
actgcgggggtaagaggttgtgtccaccatggcctggactcctctcctcctcctgttcctctctcactgcacaggttccctctcgcaggctgtgctgactcagccgtcttccctctctgcatctcctggagcatcagccagtctcacctgcaccttgcgcagtggcatcaatgttggtacctacaggatatactggtaccagcagaagccagggagtcctccccagtatctcctgaggtacaaatcagactcagataagcagcagggctctggagtccccagccgcttctctggatccaaagatgcttcggccaatgcagggattttactcatctctgggctccagtctgaggatgaggctgactattactgtatgatttggcacagcagcgcttct

SEQ ID NO: 142375 - DNA, 369 bp, Homo sapiens
  Payload ID: 8127
  Gene Symbol: IGLV5-48
  Gene Name: immunoglobulin lambda variable 5-48 (non-functional)
  ENST ID: ENST00000390293
  CDS Start-End: 1-318
atggcctggactcctctccttctcctgttcctctctcactgcacaggttccctctcgcaggctgtgctgactcagccaacttccctctcagcatctcctggagcatcagccagactcacctgcaccttgcgcagtggcatcagtgttggtagctacaggatatactggtaccagcagaagccagggagtcctcccaggtatctcctgaactactactcagactcagataagcaccagggctctggagtccccagccgcttctctggatccaaagatgcttcgaccaatgcagggattttattcatctctgggctctagtctgaggatgaggctgactattactgtatgatttggcacagcagtgcttct

SEQ ID NO: 142376 - DNA, 379 bp, Homo sapiens
  Payload ID: 8128
  Gene Symbol: IGLV5-52
  Gene Name: immunoglobulin lambda variable 5-52
  ENST ID: ENST00000390289
  CDS Start-End: 6-379
ccaccatggcctggactcttctccttctcgtgctcctctctcactgcacaggttccctctcccagcctgtgctgactcagccatcttcccattctgcatcttctggagcatcagtcagactcacctgcatgctgagcagtggcttcagtgttggggacttctggataaggtggtaccaacaaaagccagggaaccctccccggtatctcctgtactaccactcagactccaataagggccaaggctctggagttcccagccgcttctctggatccaacgatgcatcagccaatgcagggattctgcgtatctctgggctccagcctgaggatgaggctgactattactgtggtacatggcacagcaactctaagactca

SEQ ID NO: 142377 - DNA, 623 bp, Homo sapiens
  Payload ID: 8129
  Gene Symbol: IGLV6-57
  Gene Name: immunoglobulin lambda variable 6-57
  ENST ID: ENST00000390285
  CDS Start-End: 87-533
tctgaggatacgcgtgacagataagaagggctggtgggatcagtcctggtggtagctcaggaagcagagcctggagcatctccactatggcctgggctccactacttctcaccctcctcgctcactgcacaggttcttgggccaattttatgctgactcagccccactctgtgtcggagtctccggggaagacggtaaccatctcctgcaccggcagcagtggcagcattgccagcaactatgtgcagtggtaccagcagcgcccgggcagtgcccccaccactgtgatctatgaggataaccaaagaccctctggggtccctgatcggttctctggctccatcgacagctcctccaactctgcctccctcaccatctctggactgaagactgaggacgaggctgactactactgtcagtcttatgatagcagcaatcacacagtgctccagacccatggggaagtgagacagaaactccccagagcatctctacctgggccagtctcagcctgtctccaccggagagggtagctctcccatctctcctgtctaagtgcttgaggtgaactttgcttatgacttcctcttttccttttcaaaataccaatctgtttttccaca

SEQ ID NO: 142378 - DNA, 385 bp, Homo sapiens
  Payload ID: 8130
  Gene Symbol: IGLV7-43
  Gene Name: immunoglobulin lambda variable 7-43
  ENST ID: ENST00000390298
  CDS Start-End: 35-385
tctggcgccaggggtcccttccaatatcagcaccatggcctggactcctctctttctgttcctcctcacttgctgcccagggtccaattctcagactgtggtgactcaggagccctcactgactgtgtccccaggagggacagtcactctcacctgtgcttccagcactggagcagtcaccagtggttactatccaaactggttccagcagaaacctggacaagcacccagggcactgatttatagtacaagcaacaaacactcctggacccctgcccggttctcaggctccctccttgggggcaaagctgccctgacactgtcaggtgtgcagcctgaggacgaggctgagtattactgcctgctctactatggtggtgctcag

SEQ ID NO: 142379 - DNA, 385 bp, Homo sapiens; identical to SEQ ID NO: 142378
  Payload ID: 8130
  Gene Symbol: IGLV7-43
  Gene Name: immunoglobulin lambda variable 7-43
  ENST ID: ENST00000618644
  CDS Start-End: 35-385

SEQ ID NO: 142380 - DNA, 385 bp, Homo sapiens
  Payload ID: 8131
  Gene Symbol: IGLV7-46
  Gene Name: immunoglobulin lambda variable 7-46 (gene/pseudogene)
  ENST ID: ENST00000390295
  CDS Start-End: 35-385
tctggcaccaggggtcccttccaatatcagcaccatggcctggactcctctctttctgttcctcctcacttgctgcccagggtccaattcccaggctgtggtgactcaggagccctcactgactgtgtccccaggagggacagtcactctcacctgtggctccagcactggagctgtcaccagtggtcattatccctactggttccagcagaagcctggccaagcccccaggacactgatttatgatacaagcaacaaacactcctggacacctgcccggttctcaggctccctccttgggggcaaagctgccctgacccttttgggtgcgcagcctgaggatgaggctgagtattactgcttgctctcctatagtggtgctcgg

SEQ ID NO: 142381 - DNA, 414 bp, Homo sapiens
  Payload ID: 8132
  Gene Symbol: IGLV8-61
  Gene Name: immunoglobulin lambda variable 8-61
  ENST ID: ENST00000390283
  CDS Start-End: 47-414
gaggaaaacaaaccccagctgggaagcctgagaacacttagccttcatgagtgtccccaccatggcctggatgatgcttctcctcggactccttgcttatggatcaggagtggattctcagactgtggtgacccaggagccatcgttctcagtgtcccctggagggacagtcacactcacttgtggcttgagctctggctcagtctctactagttactaccccagctggtaccagcagaccccaggccaggctccacgcacgctcatctacagcacaaacactcgctcttctggggtccctgatcgcttctctggctccatccttgggaacaaagctgccctcaccatcacgggggcccaggcagatgatgaatctgattattactgtgtgctgtatatgggtagtggcatttc

SEQ ID NO: 142382 - DNA, 409 bp, Homo sapiens
  Payload ID: 8133
  Gene Symbol: IGLV9-49
  Gene Name: immunoglobulin lambda variable 9-49
  ENST ID: ENST00000427632
  CDS Start-End: 38-409
gagagactgaagaacccagcattgcagcagctccaccatggcctgggctcctctgctcctcaccctcctcagtctcctcacagggtccctctcccagcctgtgctgactcagccaccttctgcatcagcctccctgggagcctcggtcacactcacctgcaccctgagcagcggctacagtaattataaagtggactggtaccagcagagaccagggaagggcccccggtttgtgatgcgagtgggcactggtgggattgtgggatccaagggggatggcatccctgatcgcttctcagtcttgggctcaggcctgaatcggtacctgaccatcaagaacatccaggaagaggatgagagtgactaccactgtggggcagaccatggcagtgggagcaacttcgtgtaa

SEQ ID NO: 142383 - DNA, 716 bp, Homo sapiens
  Payload ID: 8134
  Gene Symbol: IGLL1
  Gene Name: immunoglobulin lambda-like polypeptide 1
  Uniprot ID: P15814
  ENST ID: ENST00000249053
  CDS Start-End: 50-304
gagcccacactgcaagtcaggccacaaggacctctgaccctgagggccgatgaggccagggacaggccaggggggccttgaggcccctggtgagccaggccccaacctcaggcagcgctggcccctgctgctgctgggtctggccgtggtaacccatggcctgctgcgcccaacagctgcatcgcagagcagggccctgggccctggagcccctggaggaagcagccggtccagcctgaggagccggtggggcaggtcagcccaaggccaccccctcggtcactctgttcccgccgtcctctgaggagctccaagccaacaaggctacactggtgtgtctcatgaatgacttttatccgggaatcttgacggtgacctggaaggcagatggtacccccatcacccagggcgtggagatgaccacgccctccaaacagagcaacaacaagtacgcggccagcagctacctgagcctgacgcccgagcagtggaggtcccgcagaagctacagctgccaggtcatgcacgaagggagcaccgtggagaagacggtggcccctgcagaatgttcataggttcccagccccgaccccacccaaaggggcctggagctgcaggatcccaggggaagggtctctctctgcatcccaagccatccagcccttctccctgtacccagtaaaccctaaataaataccctctttgtcaaccagaaa

SEQ ID NO: 142384 - DNA, 901 bp, Homo sapiens
  Payload ID: 8134
  Gene Symbol: IGLL1
  Gene Name: immunoglobulin lambda-like polypeptide 1
  Uniprot ID: P15814
  ENST ID: ENST00000330377
  CDS Start-End: 119-760
ggccacatggactggggtgcaatgggacagctgctgccagcgagagggaccagggcaccactctctagggagcccacactgcaagtcaggccacaaggacctctgaccctgagggccgatgaggccagggacaggccaggggggccttgaggcccctggtgagccaggccccaacctcaggcagcgctggcccctgctgctgctgggtctggccgtggtaacccatggcctgctgcgcccaacagctgcatcgcagagcagggccctgggccctggagcccctggaggaagcagccggtccagcctgaggagccggtggggcaggttcctgctccagcgcggctcctggactggccccaggtgctggccccgggggtttcaatccaagcataactcagtgacgcatgtgtttggcagcgggacccagctcaccgttttaagtcagcccaaggccaccccctcggtcactctgttcccgccgtcctctgaggagctccaagccaacaaggctacactggtgtgtctcatgaatgacttttatccgggaatcttgacggtgacctggaaggcagatggtacccccatcacccagggcgtggagatgaccacgccctccaaacagagcaacaacaagtacgcggccagcagctacctgagcctgacgcccgagcagtggaggtcccgcagaagctacagctgccaggtcatgcacgaagggagcaccgtggagaagacggtggcccctgcagaatgttcataggttcccagccccgaccccacccaaaggggcctggagctgcaggatcccaggggaagggtctctctctgcatcccaagccatccagcccttctccctgtacccagtaaaccctaaataaataccctctttgtcaaccagaaa

SEQ ID NO: 142385 - DNA, 654 bp, Homo sapiens
  Payload ID: 8134
  Gene Symbol: IGLL1
  Gene Name: immunoglobulin lambda-like polypeptide 1
  ENST ID: ENST00000438703
  CDS Start-End: 113-654
atggactggggtgcaatgggacagctgctgccagcgagagggaccagggcaccactctctagggagcccacactgcaagtcaggccacaaggacctctgaccctgagggccgatgaggccagggacaggccaggggggccttgaggcccctggtgagccaggccccaacctcaggcagcgctggcccctgctgctgctgggtctggccgtggtaacccatggcctgctgcgcccaacagctgcatcgcagagcagggccctgggccctggagcccctggaggaagcagccggtccagcctgaggagccggtggggcagcaggttcctgctccagcgcggctcctggactggccccaggtgctggccccgggggtttcaatccaagcataactcagtgacgcatgtgtttggcagcgggacccagctcaccgttttaagtcagcccaaggccaccccctcggtcactctgttcccgccgtcctctgaggagctccaagccaacaaggctacactggtgtgtctcatgaatgacttttatccgggaatcttgacggtgacctggaaggcagatggtacccccatcacccagggcgtggagatgaccacgccctccaaacagagcaacaacaagtacgcggccagcagctacctgag

SEQ ID NO: 142386 - DNA, 1050 bp, Homo sapiens
  Payload ID: 8135
  Gene Symbol: IGLL5
  Gene Name: immunoglobulin lambda-like polypeptide 5
  Uniprot ID: B9A064
  ENST ID: ENST00000526893
  CDS Start-End: 275-919
agccggctgtggtgggaggcagttgagccctggattgtgaccgcttcagggcagttggtagatgcccctctgggagagatccccaggggtgacagccatggaccctggaagggcctgggctagggacagggaccagagccagtccagggagaggacagagccaatggactggggtgtactgtaacagccctgctggcgagagggaccagggcaccgtcctccagggagcccatgctgcaagtcgggccagaggtgcccctgaacctgaaggccaatgagacccaagacaggccaagtgggttgtgagacccctgaggagctgggccctggtcccaggcagcgctggcccctgctgctgctgggtctggccatggtcgcccatggcctgctgcgcccaatggttgcaccgcaaagcggggacccagaccctggagcctcagttggaagcagccgatccagcctgcggagcctgtggggcaggctcctgctccagcccagcccccagagagcagaccccaggtgctggccccgggggttttggtctgagcctcagtcactgtgttatgtcttcggaactgggaccaaggtcaccgtcctaggtcagcccaaggccaaccccactgtcactctgttcccgccctcctctgaggagctccaagccaacaaggccacactagtgtgtctgatcagtgacttctacccgggagctgtgacagtggcctggaaggcagatggcagccccgtcaaggcgggagtggagaccaccaaaccctccaaacagagcaacaacaagtacgcggccagcagctacctgagcctgacgcccgagcagtggaagtcccacagaagctacagctgccaggtcacgcatgaagggagcaccgtggagaagacagtggcccctacagaatgttcataggttcccaactctaaccccacccacgggagcctggagctgcaggatcccaggggaggggtctctctccccatcccaagtcatccagcccttctccctgcactcatgaaaccccaataaatatcctcattgac

SEQ ID NO: 142387 - DNA, 882 bp, Homo sapiens
  Payload ID: 8135
  Gene Symbol: IGLL5
  Gene Name: immunoglobulin lambda-like polypeptide 5
  Uniprot ID: B9A064
  ENST ID: ENST00000531372
  CDS Start-End: 226-480
ggcagttggtagatgcccctctgggagagatccccaggggtgacagccatggaccctggaagggcctgggctagggacagggaccagagccagtccagggagaggacagagccaatggactggggtgtactgtaacagccctgctggcgagagggaccagggcaccgtcctccagggagcccatgctgcaagtcgggccagaggtgcccctgaacctgaaggccaatgagacccaagacaggccaagtgggttgtgagacccctgaggagctgggccctggtcccaggcagcgctggcccctgctgctgctgggtctggccatggtcgcccatggcctgctgcgcccaatggttgcaccgcaaagcggggacccagaccctggagcctcagttggaagcagccgatccagcctgcggagcctgtggggcaggtcagcccaaggccaaccccactgtcactctgttcccgccctcctctgaggagctccaagccaacaaggccacactagtgtgtctgatcagtgacttctacccgggagctgtgacagtggcctggaaggcagatggcagccccgtcaaggcgggagtggagaccaccaaaccctccaaacagagcaacaacaagtacgcggccagcagctacctgagcctgacgcccgagcagtggaagtcccacagaagctacagctgccaggtcacgcatgaagggagcaccgtggagaagacagtggcccctacagaatgttcataggttcccaactctaaccccacccacgggagcctggagctgcaggatcccaggggaggggtctctctccccatcccaagtcatccagcccttctccctgcactcatgaaaccccaataaatatcctcattgac

SEQ ID NO: 142388 - DNA, 1335 bp, Homo sapiens
  Payload ID: 8135
  Gene Symbol: IGLL5
  Gene Name: immunoglobulin lambda-like polypeptide 5
  ENST ID: ENST00000532223
  CDS Start-End: 275-922
agccggctgtggtgggaggcagttgagccctggattgtgaccgcttcagggcagttggtagatgcccctctgggagagatccccaggggtgacagccatggaccctggaagggcctgggctagggacagggaccagagccagtccagggagaggacagagccaatggactggggtgtactgtaacagccctgctggcgagagggaccagggcaccgtcctccagggagcccatgctgcaagtcgggccagaggtgcccctgaacctgaaggccaatgagacccaagacaggccaagtgggttgtgagacccctgaggagctgggccctggtcccaggcagcgctggcccctgctgctgctgggtctggccatggtcgcccatggcctgctgcgcccaatggttgcaccgcaaagcggggacccagaccctggagcctcagttggaagcagccgatccagcctgcggagcctgtggggcagcaggctcctgctccagcccagcccccagagagcagaccccaggtgctggccccgggggttttggtctgagcctcagtcactgtgttatgtcttcggaactgggaccaaggtcaccgtcctaggtcagcccaaggccaaccccactgtcactctgttcccgccctcctctgaggagctccaagccaacaaggccacactagtgtgtctgatcagtgacttctacccgggagctgtgacagtggcctggaaggcagatggcagccccgtcaaggcgggagtggagaccaccaaaccctccaaacagagcaacaacaagtacgcggccagcagctacctgagcctgacgcccgagcagtggaagtcccacagaagctacagctgccaggtcacgcatgaagggagcaccgtggagaagacagtggcccctacagaatgttcataggttcccaactctaaccccacccacgggagcctggagctgcaggatcccaggggaggggtctctctccccatcccaagtcatccagcccttctccctgcactcatgaaaccccaataaatatcctcattgacaaccagaaatcttgttttatctcattttttttctcacataaattgctagcctccccggggttctcagtgtggggtacagggaattctgcacccagtgtgaaaatcacccaagggaggaggctcacagcctccctgagtcatctccccagagggtccttcctctcccagtcaccccttctccaactctccactgtacccctgagctaccagtctggcatcagttcagaccagtcccacaccctcctaaattttacttctcaataaatacctgatcatgtaaaa

SEQ ID NO: 142389 - DNA, 3961 bp, Homo sapiens
  Payload ID: 8136
  Gene Symbol: IGHMBP2
  Gene Name: immunoglobulin mu binding protein 2
  Uniprot ID: P38935
  ENST ID: ENST00000255078
  CDS Start-End: 112-3093
gcgaaccgcgtgcgtaacgcacgggcccggcggggaacaccggtccgctgtaacaccggcccggcgcagaagcgggacgtcggcttctaggggcccaggccggcggcggcgatggcctcggcagctgtggagagcttcgtgaccaagcaactggacctgctggagcttgagagagacgcggaggtggaggagcgcaggtcctggcaggagaacatctctctgaaagagctccagagccgaggcgtgtgtttgctgaagctgcaggtatccagccagcgcactgggctgtacggacggctgctggtcacctttgagcccaggcgatacgggtccgcggcagctcttcccagtaacagctttacttctggtgatatcgtgggcctgtacgatgctgctaatgagggcagtcagctggccactgggatcttgacccgggtcacccagaagtcggtcacggtggcctttgatgagtcccacgatttccagttgagcttggaccgagagaattcctacagactgttaaaacttgccaatgatgtcacttacaggcgactgaaaaaagccctgattgctctaaagaagtatcattctggcccagcctcctcactcatagaagtgctctttggcagatctgctcccagtcctgccagtgaaatacacccgctgacattcttcaacacctgcctggacacctcccagaaagaagcggttttatttgcgctgtctcagaaagaacttgccatcatccatggacctcctggcactgggaaaaccacgactgtggttgagatcattcttcaagctgtgaaacaaggcttaaaggttctgtgctgcgccccctccaacatcgccgtggacaatctggtggagcgcctggctctgtgtaagcagcggattctgcgcctgggacaccctgcccgcctcctggagtccattcagcagcactccctggatgcggttttagcgcggagcgacagtgcccagattgttgcagatatcaggaaggacatcgaccaggtctttgtgaaaaacaaaaagacccaggataagagagagaaaagtaattttcgaaatgaaattaagctgttaagaaaagaactgaaggagagggaagaagcagctatgctcgagagcctcacttcggcaaacgtggtccttgcaacaaacacaggtgcgtctgccgatggccccctgaagttgctgcccgagagctacttcgacgtggtggtcattgacgagtgtgcccaggccctcgaggcgagctgctggatccccctgctgaaggccagaaagtgcatcctggcgggcgatcacaagcagctgccccccaccacagtctctcacaaggctgcgctggcaggactgtcactcagcctgatggaacgcctggctgaggagtacggcgcgagggtggtgcggacactgacggtgcagtaccgcatgcaccaggctatcatgcgctgggcctcagacaccatgtaccttgggcagctcacagcccactcttccgtggcaaggcacctcctgagggacctcccaggtgtggctgccacagaagagacgggtgtgcccctgctcttggtggacaccgccggctgcgggctgtttgagctggaggaggaggacgaacagtcgaaagggaaccctggcgaagtccgcctcgtcagtttgcacatccaggctctggtggacgctggtgttccagcccgtgacattgctgtggtctcgccatacaacctccaggtggacctgctcagacagagccttgtgcacaggcaccctgagcttgaaatcaagtctgtcgatggcttccaaggccgagagaaggaggccgtgatactgtccttcgtcagatccaacaggaaaggtgaagttggttttcttgctgaggaccggaggatcaacgtggctgtcacccgtgcccgacgccacgtggcggtcatctgtgactcccgtactgtcaacaaccatgcatttttgaagaccctggtggagtatttcacacagcatggggaagtacgcacggcctttgagtatcttgacgatattgtcccagaaaactattcccatgagaactcccagggttccagccacgctgccaccaagccccagggacctgctacgtccaccaggaccggaagccagcggcaggagggaggccaggaggctgcagcacctgccagacagggccggaagaagccggctgggaagtctctggcctctgaagctccatctcagcccagcctcaacggaggcagcccagagggagtggagagccaagatggcgtggaccacttccgggccatgatagtggagttcatggccagcaagaagatgcagttggagtttcctccttccctcaattcccacgacaggctgcgggtccaccaaatagccgaggagcacgggctgaggcacgacagttccggggaagggaagaggaggttcatcactgtgagcaagagggccccgcgaccccgagcagccctgggacccccagcagggaccggtggcccagcccctctccagccagtgccccctacccctgcgcagacagagcagcctcccagggagcagcgtggcccagaccagcctgatctgaggacgctgcacctggagagactgcagagggtcaggagcgcgcaggggcagcccgccagcaaggagcagcaggcctcagggcagcagaaacttccagaaaagaaaaagaaaaaagccaaaggacatccggccacagatctgcccacggaggaggactttgaggccctggtttctgccgccgttaaggctgataacacctgcggctttgccaagtgcacagccggcgtcacaaccctgggccagttctgccagctctgcagccgccgctactgcctcagccaccacctgcccgagatccatggctgcggtgagagggctcgcgcccatgcccggcagagaatcagccgggaaggggtcctctatgccggcagcgggaccaagaacggatccctggacccagccaagagggcccagctgcagaggaggctggataagaagctgagtgagctcagcaaccagaggaccagccggaggaaggagagggggacgtgaccggccgcatccttgcacgccccgcggagctctctccatggtagcccagggcgctggcagaccatgctccgcctccaccagggccacagaggagcggaggggcctatgggggaggagcggagggccctgttggggaaggttgggtttttggaccccagggataagcttttccgatgtcacaatgtggaggaaagcacctgggggacaacagtgctcgtgcaggtggggcttgggaaatgcacgtcccttccccttactccccgccaaaacccacatcccagcctctggatcctggggaaggttccagtccctggagaatacccagggcctcaaacttgaagtcactcctccaatgtctgggacttgccagctcagcccgttaggatgagggtgctgagaggaaacaggaaacaagactgcgaatggcgctcaggcagggagcagggagtggcgtttggcttgcacgttcccatgtggccagatgctggggccactttccttctgtctgctggtgactgcagtgttccccctcctcctcaccacggggctcctgtgagtctggggggcacctctttctggcctgtgcacctctctctggcttataaaggtgcctggcctgtgccagcccctccttgttgcgcctcaccgtggggaccaggtgagccggctctcccacgtggttgtcccgggaaagctgccccacagcctcagcatcttcagcacttaccgatccagagcctcccggccttctccggtgtcctgtaccaactcttctatttaagagaacctcagatgatgtacctgagcctcagggttttgtttcagagggatataaattatttaaaaattaaatgaaaacgttgcacac

SEQ ID NO: 142390 - DNA, 785 bp, Homo sapiens
  Payload ID: 8136
  Gene Symbol: IGHMBP2
  Gene Name: immunoglobulin mu binding protein 2
  ENST ID: ENST00000539224
  CDS Start-End: 57-635
ccggcccggcgcagaagcgggacgtcggcttctaggggcccaggccggcggcggcgatggcctcggcagctgtggagagcttcgtgaccaagcaactggacctgctggagcttgagagagacgcggaggtggaggagcgcaggtcctggcaggagaacatctctctgaaagagctccagagccgaggcgtgtgtttgctgaagctgcaggtatccagccagcgcactgggctgtacggacggctgctggtcacctttgagcccaggcgatacgggtccgcggcagctcttcccagtaacagctttacttctggtgatatcgtgggcctgtacgatgctgctaatgagggcagtcagctggccactgggatcttgacccgggtcacccagaagtcggtcacggtggcctttgatgagtcccacgatttccagttgagcttggaccgagagaattcctacagactgttaaaacttgccaatgatgtcacttacaggcgactgaaaaaacccgctgacattcttcaacacctgcctggacacctcccagaaagaagcggttttatttgcgctgtctcagaaagaacttgccatcatccatggacctcctggcactgggaaaaccacgactgtggttgagatcattcttcaagctgtgaaacaaggcttaaaggttctgtgctgcgccccctccaacatcgccgtggacaatctggtggagcgcctggctctgtgtaagcagcggattctgcgcctgggacaccctgcccgcctcctggagtccattca

SEQ ID NO: 142391 - DNA, 479 bp, Homo sapiens
  Payload ID: 8136
  Gene Symbol: IGHMBP2
  Gene Name: immunoglobulin mu binding protein 2
  ENST ID: ENST00000544541
  CDS Start-End: 63-152
gtaacaccggcccggcgcagaagcgggacgtcggcttctaggggcccaggccggcggcggcgatggcctcggcagctgtggagagcttcgtgaccaagcaactggacctgctggagcttgagagagacgcggaggtggaggagcgcaggtgatatcgtgggcctgtacgatgctgctaatgagggcagtcagctggccactgggatcttgacccgggtcacccagaagtcggtcacggtggcctttgatgagtcccacgatttccagttgagcttggaccgagagaattcctacagactgttaaaacttgccaatgatgtcacttacaggcgactgaaaaaagccctgattgctctaaagaagtatcattctggcccagcctcctcactcatagaagtgctctttggcagatctgctcccagtcctgccagtgaaatacacccgctgacattcttcaacacctgcctggacacctccca

SEQ ID NO: 142392 - DNA, 477 bp, Homo sapiens
  Payload ID: 8136
  Gene Symbol: IGHMBP2
  Gene Name: immunoglobulin mu binding protein 2
  ENST ID: ENST00000545146
  CDS Start-End: 28-303
ttctaggggcccaggccggcggcggcgatggcctcggcagctgtggagagcttcgtgaccaagcaactggacctgctggagcttgagagagacgcggaggtggaggagcgcaggtcctggcaggagaacatctctctgaaagagctccagagccgaggcgtgtgtttgctgaagctgcaggtatccagccagcgcactgggctgtacggacggctgctggtcacctttgagcccaggcgatacgggtccgcggcagctcttcccagtaacagctttacttctggtgtgtgcgtattgacctagacagacattgaaatttactggcattcagaccgtgacttgtaccctcgtaaagactggattaaaatgaccagttggagaataaagcgttgcaatgaagaactcttaatcagaagtccaacaattgatgtgatatcgtgggcctgtacgatgctgctaatgagggcagtcagctgg

SEQ ID NO: 142393 - DNA, 2371 bp, Homo sapiens
  Payload ID: 8137
  Gene Symbol: ISLR
  Gene Name: immunoglobulin superfamily containing leucine-rich repeat
  Uniprot ID: O14498
  ENST ID: ENST00000249842
  CDS Start-End: 358-1644
aaaaaaatttggcatctcttcccccctcaagtttctggtgtcacttatgaaacacaggtccttgttgctgcagagaagcagttgttttgctggaaggagggagtgcgcgggctgccccgggctcctccctgccgcctcctctcagtggatggttccaggcaccctgtctggggcagggagggcacaggcctgcacatcgaaggtggggtgggaccaggctgcccctcgccccagcatccaagtcctcccttgggcgcccgtggccctgcagactctcagggctaaggtcctctgttgctttttggttccaccttagaagaggctccgcttgactaagagtagcttgaaggaggcaccatgcaggagctgcatctgctctggtgggcgcttctcctgggcctggctcaggcctgccctgagccctgcgactgtggggaaaagtatggcttccagatcgccgactgtgcctaccgcgacctagaatccgtgccgcctggcttcccggccaatgtgactacactgagcctgtcagccaaccggctgccaggcttgccggagggtgccttcagggaggtgcccctgctgcagtcgctgtggctggcacacaatgagatccgcacggtggccgccggagccctggcctctctgagccatctcaagagcctggacctcagccacaatctcatctctgactttgcctggagcgacctgcacaacctcagtgccctccaattgctcaagatggacagcaacgagctgaccttcatcccccgcgacgccttccgcagcctccgtgctctgcgctcgctgcaactcaaccacaaccgcttgcacacattggccgagggcaccttcaccccgctcaccgcgctgtcccacctgcagatcaacgagaaccccttcgactgcacctgcggcatcgtgtggctcaagacatgggccctgaccacggccgtgtccatcccggagcaggacaacatcgcctgcacctcaccccatgtgctcaagggtacgccgctgagccgcctgccgccactgccatgctcggcgccctcagtgcagctcagctaccaacccagccaggatggtgccgagctgcggcctggttttgtgctggcactgcactgtgatgtggacgggcagccggcccctcagcttcactggcacatccagatacccagtggcattgtggagatcaccagccccaacgtgggcactgatgggcgtgccctgcctggcacccctgtggccagctcccagccgcgcttccaggcctttgccaatggcagcctgcttatccccgactttggcaagctggaggaaggcacctacagctgcctggccaccaatgagctgggcagtgctgagagctcagtggacgtggcactggccacgcccggtgagggtggtgaggacacactggggcgcaggttccatggcaaagcggttgagggaaagggctgctatacggttgacaacgaggtgcagccatcagggccggaggacaatgtggtcatcatctacctcagccgtgctgggaaccctgaggctgcagtcgcagaaggggtccctgggcagctgcccccaggcctgctcctgctgggccaaagcctcctcctcttcttcttcctcacctccttctagccccacccagggcttccctaactcctccccttgcccctaccaatgcccctttaagtgctgcaggggtctggggttggcaactcctgaggcctgcatgggtgacttcacattttcctacctctccttctaatctcttctagagcacctgctatccccaacttctagacctgctccaaactagtgactaggatagaatttgatcccctaactcactgtctgcggtgctcattgctgctaacagcattgcctgtgctctcctctcaggggcagcatgctaacggggcgacgtcctaatccaactgggagaagcctcagtggtggaattccaggcactgtgactgtcaagctggcaagggccaggattgggggaatggagctggggcttagctgggaggtggtctgaagcagacagggaatgggagaggaggatgggaagtagacagtggctggtatggctctgaggctccctggggcctgctcaagctcctcctgctccttgctgttttctgatgatttgggggcttgggagtccctttgtcctcatctgagactgaaatgtggggatccaggatggccttccttcctcttacccttcctccctcagcctgcaacctctatcctggaacctgtcctccctttctccccaactatgcatctgttgtctgctcctctgcaaaggccagccagcttgggagcagcagagaaataaacagcatttctgatgccc

SEQ ID NO: 142394 - DNA, 2175 bp, Homo sapiens
  Payload ID: 8137
  Gene Symbol: ISLR
  Gene Name: immunoglobulin superfamily containing leucine-rich repeat
  Uniprot ID: O14498
  ENST ID: ENST00000395118
  CDS Start-End: 162-1448
gcaaagtgctgggggaggggggtggctggaaaacagatttcaagtcataaagtcagctaggaacaggccgaggcagggagaactctccactcggaggaggagctggggtcctcttccatcccgtcttcatcctgcctggctgcgtgacctcgggaggcaccatgcaggagctgcatctgctctggtgggcgcttctcctgggcctggctcaggcctgccctgagccctgcgactgtggggaaaagtatggcttccagatcgccgactgtgcctaccgcgacctagaatccgtgccgcctggcttcccggccaatgtgactacactgagcctgtcagccaaccggctgccaggcttgccggagggtgccttcagggaggtgcccctgctgcagtcgctgtggctggcacacaatgagatccgcacggtggccgccggagccctggcctctctgagccatctcaagagcctggacctcagccacaatctcatctctgactttgcctggagcgacctgcacaacctcagtgccctccaattgctcaagatggacagcaacgagctgaccttcatcccccgcgacgccttccgcagcctccgtgctctgcgctcgctgcaactcaaccacaaccgcttgcacacattggccgagggcaccttcaccccgctcaccgcgctgtcccacctgcagatcaacgagaaccccttcgactgcacctgcggcatcgtgtggctcaagacatgggccctgaccacggccgtgtccatcccggagcaggacaacatcgcctgcacctcaccccatgtgctcaagggtacgccgctgagccgcctgccgccactgccatgctcggcgccctcagtgcagctcagctaccaacccagccaggatggtgccgagctgcggcctggttttgtgctggcactgcactgtgatgtggacgggcagccggcccctcagcttcactggcacatccagatacccagtggcattgtggagatcaccagccccaacgtgggcactgatgggcgtgccctgcctggcacccctgtggccagctcccagccgcgcttccaggcctttgccaatggcagcctgcttatccccgactttggcaagctggaggaaggcacctacagctgcctggccaccaatgagctgggcagtgctgagagctcagtggacgtggcactggccacgcccggtgagggtggtgaggacacactggggcgcaggttccatggcaaagcggttgagggaaagggctgctatacggttgacaacgaggtgcagccatcagggccggaggacaatgtggtcatcatctacctcagccgtgctgggaaccctgaggctgcagtcgcagaaggggtccctgggcagctgcccccaggcctgctcctgctgggccaaagcctcctcctcttcttcttcctcacctccttctagccccacccagggcttccctaactcctccccttgcccctaccaatgcccctttaagtgctgcaggggtctggggttggcaactcctgaggcctgcatgggtgacttcacattttcctacctctccttctaatctcttctagagcacctgctatccccaacttctagacctgctccaaactagtgactaggatagaatttgatcccctaactcactgtctgcggtgctcattgctgctaacagcattgcctgtgctctcctctcaggggcagcatgctaacggggcgacgtcctaatccaactgggagaagcctcagtggtggaattccaggcactgtgactgtcaagctggcaagggccaggattgggggaatggagctggggcttagctgggaggtggtctgaagcagacagggaatgggagaggaggatgggaagtagacagtggctggtatggctctgaggctccctggggcctgctcaagctcctcctgctccttgctgttttctgatgatttgggggcttgggagtccctttgtcctcatctgagactgaaatgtggggatccaggatggccttccttcctcttacccttcctccctcagcctgcaacctctatcctggaacctgtcctccctttctccccaactatgcatctgttgtctgctcctctgcaaaggccagccagcttgggagcagcagagaaataaacagcatttctgatgccc

SEQ ID NO: 142395 - DNA, 585 bp, Homo sapiens
  Payload ID: 8137
  Gene Symbol: ISLR
  Gene Name: immunoglobulin superfamily containing leucine-rich repeat
  ENST ID: ENST00000560862
  CDS Start-End: 35-585
gcacaaggggcctcgtctgggccaaggaggcaccatgcaggagctgcatctgctctggtgggcgcttctcctgggcctggctcaggcctgccctgagccctgcgactgtggggaaaagtatggcttccagatcgccgactgtgcctaccgcgacctagaatccgtgccgcctggcttcccggccaatgtgactacactgagcctgtcagccaaccggctgccaggcttgccggagggtgccttcagggaggtgcccctgctgcagtcgctgtggctggcacacaatgagatccgcacggtggccgccggagccctggcctctctgagccatctcaagagcctggacctcagccacaatctcatctctgactttgcctggagcgacctgcacaacctcagtgccctccaattgctcaagatggacagcaacgagctgaccttcatcccccgcgacgccttccgcagcctccgtgctctgcgctcgctgcaactcaaccacaaccgcttgcacacattggccgagggcaccttcaccccgctcaccgcgctgtcccacctgcagatcaacgagaaccccttcgactg

SEQ ID NO: 142396 - DNA, 570 bp, Homo sapiens
  Payload ID: 8137
  Gene Symbol: ISLR
  Gene Name: immunoglobulin superfamily containing leucine-rich repeat
  ENST ID: ENST00000559510
  CDS Start-End: 130-570
acaatccctagcttggagccgtccagggggcatctgcttcttccacaacccacaactgaggccccagaaatcccagctgcgtttgggctgagcctctggcctcacccaagtcagctgagaggaggcaccatgcaggagctgcatctgctctggtgggcgcttctcctgggcctggctcaggcctgccctgagccctgcgactgtggggaaaagtatggcttccagatcgccgactgtgcctaccgcgacctagaatccgtgccgcctggcttcccggccaatgtgactacactgagcctgtcagccaaccggctgccaggcttgccggagggtgccttcagggaggtgcccctgctgcagtcgctgtggctggcacacaatgagatccgcacggtggccgccggagccctggcctctctgagccatctcaagagcctggacctcagccacaatctcatctctgactttgcctggagcgacctgcacaacctcagtgccctccaattgctcaagatggacagcaacgagctgaccttcatcccccgcgacgccttccgcagcctccgtgct

SEQ ID NO: 142397 - DNA, 4817 bp, Homo sapiens
  Payload ID: 8138
  Gene Symbol: ISLR2
  Gene Name: immunoglobulin superfamily containing leucine-rich repeat 2
  Uniprot ID: Q6UXK2
  ENST ID: ENST00000361742
  CDS Start-End: 770-3007
ctcaaatcggggtattgatctccacggaagccccaaaccctcgccatcgagagacccccatggcccggggtgatggctgtggggcttggtgctcccagagagctcagtggctacagaatgggtggggattctgcgtgtctcccggagcctgaacccctttcctggttatggccggtagctgtctccagggctaacgtgggcagcgcaggggggcggaaaccgggttttagccaaatgcctcgacatcgccgcgcctccgcctcctcgtcgctgaaagaaatgtcggggtttcatcagagctagggagcgacagtcgggaacagcgagtctgccgaagccggctgttgtgtgagggtgtgagacggcggggcggtgaggggccaccgcggcttgggggatagtgcgtgtggggttgaccgtgtgtctgcttgagaggctgtgaagatatggggggcagatatgggagaaatgctcgggcctgaagtccccagcccaccgtgctcaagagtagcggacgttttgccaccatccttgtctgtgctactgtctgctgcagcttccgtgccccgttctcctggagcagggcgtaaaagcggcttgcattcaattagcagcgaagctcgcgggcgctggcgggacaggcgcgtgaggccacaacacatgcgtgtatcttgcttgggctatcttccctgctctgccacgccgggtctggagaaggggtttcagccccaggacatttactgagagtcggcgaatattgggagccgcgatgttcccccttcgggccctgtggttggtctgggcgcttctaggagtggccggatcatgcccggagccgtgcgcctgcgtggacaagtacgctcaccagttcgcggactgcgcttacaaagagttgcgtgaggtgccggaaggactgcctgccaacgtgacgacgcttagtctgtccgcgaacaagatcactgtgctgcggcgcggggccttcgccgacgtcacacaggtcacgtcgctgtggctggcgcacaatgaggtgcgcaccgtggagccaggcgcactggccgtgctgagtcagctcaagaacctcgatctgagccacaacttcatatccagctttccgtggagcgacctgcgcaacctgagcgcgctgcagctgctcaaaatgaaccacaaccgcctgggctctctgccccgggacgcactcggtgcgctacccgacctgcgttccctgcgcatcaacaacaaccggctgcgtacgctggcgcctggcaccttcgacgcgcttagcgcgctgtcacacttgcaactctatcacaatcccttccactgcggctgcggccttgtgtggctgcaggcctgggccgcgagcacccgggtgtccttacccgagcccgactccattgcttgtgcctcgcctcccgcgctgcagggggtgccggtgtaccgcctgcccgccctgccctgtgcaccgcccagcgtgcatctgagtgccgagccaccgcttgaagcacccggcaccccactgcgcgcaggactggcgttcgtgttacactgcatcgccgacggccaccctacgcctcgcctgcaatggcaacttcagatccccggtggcaccgtagtcttagagccaccggttctgagcggggaggacgacggggttggggcggaggaaggagagggagaaggagatggggatttgctgacgcagacccaagcccaaacgccgactccagcacccgcttggccggcgcccccagccacaccgcgcttcctggccctcgcaaatggctccctgttggtgcccctcctgagtgccaaggaggcgggcgtctacacttgccgtgcacacaatgagctgggcgccaactctacgtcaatacgcgtggcggtggcagcaaccgggcccccaaaacacgcgcctggcgccgggggagaacccgacggacaggccccgacctctgagcgcaagtccacagccaagggccggggcaacagcgtcctgccttccaaacccgagggcaaaatcaaaggccaaggcctggccaaggtcagcattctcggggagaccgagacggagccggaggaggacacaagtgagggagaggaggccgaagaccagatcctcgcggacccggcggaggagcagcgctgtggcaacggggacccctctcggtacgtttctaaccacgcgttcaaccagagcgcagagctcaagccgcacgtcttcgagctgggcgtcatcgcgctggatgtggcggagcgcgaggcgcgggtgcagctgactccgctggctgcgcgctggggccctgggcccggcggggctggcggagccccgcgacccgggcggcgacccctgcgcctactctatctgtgtccagcggggggcggcgcggcagtgcagtggtcccgcgtagaggaaggcgtcaacgcctactggttccgcggcctgcggccgggtaccaactactccgtgtgcctggcgctggcgggcgaagcctgccacgtgcaagtggtgttttccaccaagaaggagctcccatcgctgctggtcatagtggcagtgagcgtattcctcctggtgctggccacagtgccccttctgggcgccgcctgctgccatctgctggctaaacacccgggcaagccctaccgtctgatcctgcggcctcaggcccctgaccctatggagaagcgcatcgccgcagacttcgacccgcgtgcttcgtacctcgagtccgagaaaagctacccggcaggcggcgaggcgggcggcgaggagccagaggacgtgcagggggagggccttgatgaagacgcggagcagggagacccaagtggggacctgcagagagaggagagcctggcggcctgctcactggtggagtcccagtccaaggccaaccaagaggagttcgaggcgggctctgagtacagcgatcggctgcccctgggcgccgaggcggtcaacatcgcccaggagattaatggcaactacaggcagacggcaggctgaacctccgcccgtccggcccgcccattcccgacctccacctagggtgcctgggagcagcagtctagggctggcaggacttatgtcccccgtccccaaccttcacctactcctcccccttactactccccaaccttgactaccagggacttctattagggagtgggccgatttcaccagtccctgctacccacggctgccattctccctgcgggctgaatccccttccccgccaagcacagtgtttatcttaccccatgcaagactccacccgcagacggtgggcgatatctatgtccctccattcccgtcgcgattatctgcgaaatccaccccgcagcccgccccaccgtgggctctggagccagaggaaacgagcgaagactttggaaacctcgcggtaacgcggtggtttcgggggccagccaaggccagtggagtgctgtggggtcccacctcgacccctcctcctccctttctttctttcctttttttttattttttaattttatttatttatttatttattttttgacggagtcttggtctgtcgccaggctggagtgcagtggcgcgatctcggctcactgcatcttccgcctcccgggttcaagcgattctcctgcctcagcctgcctagtagctgggactacaggcgcgcgccaccacgaccagctaatttcttctatttttagtagagacggggtttcaccatgttggccaggatggtctggatctcttgacctcaggtgatccatctgcctcggcctctcaaagtgctgggattacaggcgtgaggcaccgcgcccggcccctcctccctttcaatccctactcccagaagccgggattcgtggcaacccctagtttttagttccaaagcctcctgccggcagggaaccaaatccttctgtcctcccacccccaccccacttctggccagttggagtccagcccggtgcctggggcgcctttcagctccgcgctcagattttcctgttttcgttgttttcaaagacagcgacatttcgggtctggtgctaacacccccttcccagcctctgggaaaatcgagtgtgtgtgtcggggggtagggagggaatgcgttttctgtcgtctctctcctaacttaaagcgccgcaggaccgcgcgccccttggcggctgagcctgtggacttggtcgcgggccaatttcgttgtccgtgtgttgggctttccggaggtctgtgcgcccaacagcgccgctcccgcggctccacccgacccagaccctagctggaaagcgccggaggcggaggaagctgactgtggcctcccgggccgcggctctctggagggctcgcgccctagttcgcacaaagcctgctcgtgactgtgcgactgtgcgacgggatccggatggagccgagcccctccgtcctcgcgtctcggtcctcgcgtcgccccgccccacccgcccctgcttcggcgggaatcgtgtttgcccggcgtgtagtccctgacaagcgtgccctgtaggagaaaagtctgtgtcctgtgaagtgtgaccgtgtagtgtaggggggcgggcgggggggcggatgggcggggagggagggaaggggaggggcgcggcgcggcgactcggggcggggttcttttttccattttgaaagaaagcgtcggggttggggtggggggagtttcagtcctcgggatcagccctctccgcgaagcgcagcacaagcgcgggcctgggacggagtagccccccggagcccgtgcccttttctaaacgcgtctgtatgcagtcaataaaacaatcgatttgaa

SEQ ID NO: 142398 - DNA, 2306 bp, Homo sapiens
  Payload ID: 8138
  Gene Symbol: ISLR2
  Gene Name: immunoglobulin superfamily containing leucine-rich repeat 2
  ENST ID: ENST00000419208
  CDS Start-End: 86-1090
cttccctgctctgccacgccgggtctggagaaggggtttcagccccaggacatttactgagagtcggcgaatattgggagccgcgatgttcccccttcgggccctgtggttggtctgggcgcttctaggagtggccggatcatgcccggagccgtgcgcctgcgtggacaagtacgctcaccagttcgcggactgcgcttacaaagagttgcgtgaggtgccggaaggactgcctgccaacgtgacgacgcttagtctgtccgcgaacaagatcactgtgctgcggcgcggggccttcgccgacgtcacacaggtcacgtcgctgtggctggcgcacaatgaggtgcgcaccgtggagccaggcgcactggccgtgctgagtcagctcaagaacctcgatctgagccacaacttcatatccagctttccgtggagcgacctgcgcaacctgagcgcgctgcagctgctcaaaatgaaccacaaccgcctgggctctctgccccgggacgcactcggtgcgctacccgacctgcgttccctgcgcatcaacaacaaccggctggcgggcgaagcctgccacgtgcaagtggtgttttccaccaagaaggagctcccatcgctgctggtcatagtggcagtgagcgtattcctcctggtgctggccacagtgccccttctgggcgccgcctgctgccatctgctggctaaacacccgggcaagccctaccgtctgatcctgcggcctcaggcccctgaccctatggagaagcgcatcgccgcagacttcgacccgcgtgcttcgtacctcgagtccgagaaaagctacccggcaggcggcgaggcgggcggcgaggagccagaggacgtgcagggggagggccttgatgaagacgcggagcagggagacccaagtggggacctgcagagagaggagagcctggcggcctgctcactggtggagtcccagtccaaggccaaccaagaggagttcgaggcgggctctgagtacagcgatcggctgcccctgggcgccgaggcggtcaacatcgcccaggagattaatggcaactacaggcagacggcaggctgaacctccgcccgtccggcccgcccattcccgacctccacctagggtgcctgggagcagcagtctagggctggcaggacttatgtcccccgtccccaaccttcacctactcctcccccttactactccccaaccttgactaccagggacttctattagggagtgggccgatttcaccagtccctgctacccacggctgccattctccctgcgggctgaatccccttccccgccaagcacagtgtttatcttaccccatgcaagactccacccgcagacggtgggcgatatctatgtccctccattcccgtcgcgattatctgcgaaatccaccccgcagcccgccccaccgtgggctctggagccagaggaaacgagcgaagactttggaaacctcgcggtaacgcggtggtttcgggggccagccaaggccagtggagtgctgtggggtcccacctcgacccctcctcctccctttctttctttcctttttttttattttttaattttatttatttatttatttattttttgacggagtcttggtctgtcgccaggctggagtgcagtggcgcgatctcggctcactgcatcttccgcctcccgggttcaagcgattctcctgcctcagcctgcctagtagctgggactacaggcgcgcgccaccacgaccagctaatttcttctatttttagtagagacggggtttcaccatgttggccaggatggtctggatctcttgacctcaggtgatccatctgcctcggcctctcaaagtgctgggattacaggcgtgaggcaccgcgcccggcccctcctccctttcaatccctactcccagaagccgggattcgtggcaacccctagtttttagttccaaagcctcctgccggcagggaaccaaatccttctgtcctcccacccccaccccacttctggccagttggagtccagcccggtgcctggggcgcctttcagctccgcgctcagattttcctgttttcgttgttttcaaagacagcgacatttcgggtctggtgctaacacccccttcccagcctctgggaaaatcgagtgtgtgtgtcggggggtagggagggaatgcgttttctgtcgtctctctcctaacttaaagcgccgcaggaccgcgcgccccttggcggctgagcctgtggacttggtcgcgggccaatttcgttgtccgtgtgttgggctttcc

SEQ ID NO: 142399 - DNA, 4259 bp, Homo sapiens
  Payload ID: 8138
  Gene Symbol: ISLR2
  Gene Name: immunoglobulin superfamily containing leucine-rich repeat 2
  Uniprot ID: Q6UXK2
  ENST ID: ENST00000435464
  CDS Start-End: 214-2451
atatcagcccagatccaggcaaaaatgggcgtaaaagcggcttgcattcaattagcagcgaagctcgcgggcgctggcgggacaggcgcgtgaggccacaacacatgcgtgtatcttgcttgggctatcttccctgctctgccacgccgggtctggagaaggggtttcagccccaggacatttactgagagtcggcgaatattgggagccgcgatgttcccccttcgggccctgtggttggtctgggcgcttctaggagtggccggatcatgcccggagccgtgcgcctgcgtggacaagtacgctcaccagttcgcggactgcgcttacaaagagttgcgtgaggtgccggaaggactgcctgccaacgtgacgacgcttagtctgtccgcgaacaagatcactgtgctgcggcgcggggccttcgccgacgtcacacaggtcacgtcgctgtggctggcgcacaatgaggtgcgcaccgtggagccaggcgcactggccgtgctgagtcagctcaagaacctcgatctgagccacaacttcatatccagctttccgtggagcgacctgcgcaacctgagcgcgctgcagctgctcaaaatgaaccacaaccgcctgggctctctgccccgggacgcactcggtgcgctacccgacctgcgttccctgcgcatcaacaacaaccggctgcgtacgctggcgcctggcaccttcgacgcgcttagcgcgctgtcacacttgcaactctatcacaatcccttccactgcggctgcggccttgtgtggctgcaggcctgggccgcgagcacccgggtgtccttacccgagcccgactccattgcttgtgcctcgcctcccgcgctgcagggggtgccggtgtaccgcctgcccgccctgccctgtgcaccgcccagcgtgcatctgagtgccgagccaccgcttgaagcacccggcaccccactgcgcgcaggactggcgttcgtgttacactgcatcgccgacggccaccctacgcctcgcctgcaatggcaacttcagatccccggtggcaccgtagtcttagagccaccggttctgagcggggaggacgacggggttggggcggaggaaggagagggagaaggagatggggatttgctgacgcagacccaagcccaaacgccgactccagcacccgcttggccggcgcccccagccacaccgcgcttcctggccctcgcaaatggctccctgttggtgcccctcctgagtgccaaggaggcgggcgtctacacttgccgtgcacacaatgagctgggcgccaactctacgtcaatacgcgtggcggtggcagcaaccgggcccccaaaacacgcgcctggcgccgggggagaacccgacggacaggccccgacctctgagcgcaagtccacagccaagggccggggcaacagcgtcctgccttccaaacccgagggcaaaatcaaaggccaaggcctggccaaggtcagcattctcggggagaccgagacggagccggaggaggacacaagtgagggagaggaggccgaagaccagatcctcgcggacccggcggaggagcagcgctgtggcaacggggacccctctcggtacgtttctaaccacgcgttcaaccagagcgcagagctcaagccgcacgtcttcgagctgggcgtcatcgcgctggatgtggcggagcgcgaggcgcgggtgcagctgactccgctggctgcgcgctggggccctgggcccggcggggctggcggagccccgcgacccgggcggcgacccctgcgcctactctatctgtgtccagcggggggcggcgcggcagtgcagtggtcccgcgtagaggaaggcgtcaacgcctactggttccgcggcctgcggccgggtaccaactactccgtgtgcctggcgctggcgggcgaagcctgccacgtgcaagtggtgttttccaccaagaaggagctcccatcgctgctggtcatagtggcagtgagcgtattcctcctggtgctggccacagtgccccttctgggcgccgcctgctgccatctgctggctaaacacccgggcaagccctaccgtctgatcctgcggcctcaggcccctgaccctatggagaagcgcatcgccgcagacttcgacccgcgtgcttcgtacctcgagtccgagaaaagctacccggcaggcggcgaggcgggcggcgaggagccagaggacgtgcagggggagggccttgatgaagacgcggagcagggagacccaagtggggacctgcagagagaggagagcctggcggcctgctcactggtggagtcccagtccaaggccaaccaagaggagttcgaggcgggctctgagtacagcgatcggctgcccctgggcgccgaggcggtcaacatcgcccaggagattaatggcaactacaggcagacggcaggctgaacctccgcccgtccggcccgcccattcccgacctccacctagggtgcctgggagcagcagtctagggctggcaggacttatgtcccccgtccccaaccttcacctactcctcccccttactactccccaaccttgactaccagggacttctattagggagtgggccgatttcaccagtccctgctacccacggctgccattctccctgcgggctgaatccccttccccgccaagcacagtgtttatcttaccccatgcaagactccacccgcagacggtgggcgatatctatgtccctccattcccgtcgcgattatctgcgaaatccaccccgcagcccgccccaccgtgggctctggagccagaggaaacgagcgaagactttggaaacctcgcggtaacgcggtggtttcgggggccagccaaggccagtggagtgctgtggggtcccacctcgacccctcctcctccctttctttctttcctttttttttattttttaattttatttatttatttatttattttttgacggagtcttggtctgtcgccaggctggagtgcagtggcgcgatctcggctcactgcatcttccgcctcccgggttcaagcgattctcctgcctcagcctgcctagtagctgggactacaggcgcgcgccaccacgaccagctaatttcttctatttttagtagagacggggtttcaccatgttggccaggatggtctggatctcttgacctcaggtgatccatctgcctcggcctctcaaagtgctgggattacaggcgtgaggcaccgcgcccggcccctcctccctttcaatccctactcccagaagccgggattcgtggcaacccctagtttttagttccaaagcctcctgccggcagggaaccaaatccttctgtcctcccacccccaccccacttctggccagttggagtccagcccggtgcctggggcgcctttcagctccgcgctcagattttcctgttttcgttgttttcaaagacagcgacatttcgggtctggtgctaacacccccttcccagcctctgggaaaatcgagtgtgtgtgtcggggggtagggagggaatgcgttttctgtcgtctctctcctaacttaaagcgccgcaggaccgcgcgccccttggcggctgagcctgtggacttggtcgcgggccaatttcgttgtccgtgtgttgggctttccggaggtctgtgcgcccaacagcgccgctcccgcggctccacccgacccagaccctagctggaaagcgccggaggcggaggaagctgactgtggcctcccgggccgcggctctctggagggctcgcgccctagttcgcacaaagcctgctcgtgactgtgcgactgtgcgacgggatccggatggagccgagcccctccgtcctcgcgtctcggtcctcgcgtcgccccgccccacccgcccctgcttcggcgggaatcgtgtttgcccggcgtgtagtccctgacaagcgtgccctgtaggagaaaagtctgtgtcctgtgaagtgtgaccgtgtagtgtaggggggcgggcgggggggcggatgggcggggagggagggaaggggaggggcgcggcgcggcgactcggggcggggttcttttttccattttgaaagaaagcgtcggggttggggtggggggagtttcagtcctcgggatcagccctctccgcgaagcgcagcacaagcgcgggcctgggacggagtagccccccggagcccgtgcccttttctaaacgcgtctgtatgcagtcaataaaacaatcgatttg

SEQ ID NO: 142400 - DNA, 2812 bp, Homo sapiens
  Payload ID: 8138
  Gene Symbol: ISLR2
  Gene Name: immunoglobulin superfamily containing leucine-rich repeat 2
  Uniprot ID: Q6UXK2
  ENST ID: ENST00000453268
  CDS Start-End: 441-2678
aacactatcaattatgcatcatgttgaacgtggcttcggggaggaggcggctagcagcggggggtgcgggagggaagggtccgcgcgagctcggctgcgcgcagctcagcgggtcccgctcgaagtctgtcggtgccaccgcctgcatttgcaaaaagagtttaaaggcaaagacacgccttccccccccacttcagccgcgcgcctttccttcccccaaattcctcaaagatggtttgtctcacgtgttgcagggcgtaaaagcggcttgcattcaattagcagcgaagctcgcgggcgctggcgggacaggcgcgtgaggccacaacacatgcgtgtatcttgcttgggctatcttccctgctctgccacgccgggtctggagaaggggtttcagccccaggacatttactgagagtcggcgaatattgggagccgcgatgttcccccttcgggccctgtggttggtctgggcgcttctaggagtggccggatcatgcccggagccgtgcgcctgcgtggacaagtacgctcaccagttcgcggactgcgcttacaaagagttgcgtgaggtgccggaaggactgcctgccaacgtgacgacgcttagtctgtccgcgaacaagatcactgtgctgcggcgcggggccttcgccgacgtcacacaggtcacgtcgctgtggctggcgcacaatgaggtgcgcaccgtggagccaggcgcactggccgtgctgagtcagctcaagaacctcgatctgagccacaacttcatatccagctttccgtggagcgacctgcgcaacctgagcgcgctgcagctgctcaaaatgaaccacaaccgcctgggctctctgccccgggacgcactcggtgcgctacccgacctgcgttccctgcgcatcaacaacaaccggctgcgtacgctggcgcctggcaccttcgacgcgcttagcgcgctgtcacacttgcaactctatcacaatcccttccactgcggctgcggccttgtgtggctgcaggcctgggccgcgagcacccgggtgtccttacccgagcccgactccattgcttgtgcctcgcctcccgcgctgcagggggtgccggtgtaccgcctgcccgccctgccctgtgcaccgcccagcgtgcatctgagtgccgagccaccgcttgaagcacccggcaccccactgcgcgcaggactggcgttcgtgttacactgcatcgccgacggccaccctacgcctcgcctgcaatggcaacttcagatccccggtggcaccgtagtcttagagccaccggttctgagcggggaggacgacggggttggggcggaggaaggagagggagaaggagatggggatttgctgacgcagacccaagcccaaacgccgactccagcacccgcttggccggcgcccccagccacaccgcgcttcctggccctcgcaaatggctccctgttggtgcccctcctgagtgccaaggaggcgggcgtctacacttgccgtgcacacaatgagctgggcgccaactctacgtcaatacgcgtggcggtggcagcaaccgggcccccaaaacacgcgcctggcgccgggggagaacccgacggacaggccccgacctctgagcgcaagtccacagccaagggccggggcaacagcgtcctgccttccaaacccgagggcaaaatcaaaggccaaggcctggccaaggtcagcattctcggggagaccgagacggagccggaggaggacacaagtgagggagaggaggccgaagaccagatcctcgcggacccggcggaggagcagcgctgtggcaacggggacccctctcggtacgtttctaaccacgcgttcaaccagagcgcagagctcaagccgcacgtcttcgagctgggcgtcatcgcgctggatgtggcggagcgcgaggcgcgggtgcagctgactccgctggctgcgcgctggggccctgggcccggcggggctggcggagccccgcgacccgggcggcgacccctgcgcctactctatctgtgtccagcggggggcggcgcggcagtgcagtggtcccgcgtagaggaaggcgtcaacgcctactggttccgcggcctgcggccgggtaccaactactccgtgtgcctggcgctggcgggcgaagcctgccacgtgcaagtggtgttttccaccaagaaggagctcccatcgctgctggtcatagtggcagtgagcgtattcctcctggtgctggccacagtgccccttctgggcgccgcctgctgccatctgctggctaaacacccgggcaagccctaccgtctgatcctgcggcctcaggcccctgaccctatggagaagcgcatcgccgcagacttcgacccgcgtgcttcgtacctcgagtccgagaaaagctacccggcaggcggcgaggcgggcggcgaggagccagaggacgtgcagggggagggccttgatgaagacgcggagcagggagacccaagtggggacctgcagagagaggagagcctggcggcctgctcactggtggagtcccagtccaaggccaaccaagaggagttcgaggcgggctctgagtacagcgatcggctgcccctgggcgccgaggcggtcaacatcgcccaggagattaatggcaactacaggcagacggcaggctgaacctccgcccgtccggcccgcccattcccgacctccacctagggtgcctgggagcagcagtctagggctggcaggacttatgtcccccgtccccaaccttcacctactcctcccccttactactccccaacctt

SEQ ID NO: 142401 - DNA, 586 bp, Homo sapiens
  Payload ID: 8138
  Gene Symbol: ISLR2
  Gene Name: immunoglobulin superfamily containing leucine-rich repeat 2
  ENST ID: ENST00000565332
  CDS Start-End: 245-586
aacctgcagccagagaggtgggggaaacggacgcaaaaggaaaaattgaagtggtactttggggccaccaagtccccaaacttacctgtccctttctttgccccccgccccccgttttccccacagccacaacacatgcgtgtatcttgcttgggctatcttccctgctctgccacgccgggtctggagaaggggtttcagccccaggacatttactgagagtcggcgaatattgggagccgcgatgttcccccttcgggccctgtggttggtctgggcgcttctaggagtggccggatcatgcccggagccgtgcgcctgcgtggacaagtacgctcaccagttcgcggactgcgcttacaaagagttgcgtgaggtgccggaaggactgcctgccaacgtgacgacgcttagtctgtccgcgaacaagatcactgtgctgcggcgcggggccttcgccgacgtcacacaggtcacgtcgctgtggctggcgcacaatgaggtgcgcaccgtggagccaggcgcactggccgtgctgagtcagctcaagaacctcgatctgagccacaacttcatatccagcttt

SEQ ID NO: 142402 - DNA, 636 bp, Homo sapiens
  Payload ID: 8138
  Gene Symbol: ISLR2
  Gene Name: immunoglobulin superfamily containing leucine-rich repeat 2
  ENST ID: ENST00000569886
  CDS Start-End: 369-636
attagacccgcttctgcgcgccggacggcgccggacgaggtgcgcgcagtcttctagctgagctcggaggcagatccagaagtcgcggctcccaccccaggcctcggcggactctgcctggggcgactcgggctccagccctgcccgggcgggcactgggctctccagggtcgaaggcagggggcgtaaaagcggcttgcattcaattagcagcgaagctcgcgggcgctggcgggacaggcgcgtgaggccacaacacatgcgtgtatcttgcttgggctatcttccctgctctgccacgccgggtctggagaaggggtttcagccccaggacatttactgagagtcggcgaatattgggagccgcgatgttcccccttcgggccctgtggttggtctgggcgcttctaggagtggccggatcatgcccggagccgtgcgcctgcgtggacaagtacgctcaccagttcgcggactgcgcttacaaagagttgcgtgaggtgccggaaggactgcctgccaacgtgacgacgcttagtctgtccgcgaacaagatcactgtgctgcggcgcggggccttcgccgacgtcacacaggtcacgtcgctgtggctggcgcacaatgaggtgcgcaccg

SEQ ID NO: 142403 - DNA, 623 bp, Homo sapiens
  Payload ID: 8138
  Gene Symbol: ISLR2
  Gene Name: immunoglobulin superfamily containing leucine-rich repeat 2
  ENST ID: ENST00000567206
  CDS Start-End: 609-623
atcagagctagggagcgacagtcgggaacagcgagtctgccgaagccggctgttgtgtgagggtgtgagacggcggggcggtgaggggccaccgcggcttgggggatagtgcgtgtggggttgaccgtgtgtctgcttgagaggctgtgaagatatggggggcagatatgggagaaatgctcgggcctgaagtccccagcccaccgtgctcaagagtagcggacgttttgccaccatccttgtctgtgctactgtctgctgcagcttccgtgccccgttctcctggagcaggcaagacctggagtgaggtgcttgggtgcgctcgagagagcttccccctgctccacctgtcccgcggtgcgcgcaggccaacgcgtcgggcagtgggcttcaagcgctggtttagccacaaaagaccagaaggcgtaaaagcggcttgcattcaattagcagcgaagctcgcgggcgctggcgggacaggcgcgtgaggccacaacacatgcgtgtatcttgcttgggctatcttccctgctctgccacgccgggtctggagaaggggtttcagccccaggacatttactgagagtcggcgaatattgggagccgcgatgttcccccttcgg

SEQ ID NO: 142404 - DNA, 630 bp, Homo sapiens
  Payload ID: 8138
  Gene Symbol: ISLR2
  Gene Name: immunoglobulin superfamily containing leucine-rich repeat 2
  ENST ID: ENST00000561740
  CDS Start-End: 217-630
cttatatcagcccagatccaggcaaaaatgggcgtaaaagcggcttgcattcaattagcagcgaagctcgcgggcgctggcgggacaggcgcgtgaggccacaacacatgcgtgtatcttgcttgggctatcttccctgctctgccacgccgggtctggagaaggggtttcagccccaggacatttactgagagtcggcgaatattgggagccgcgatgttcccccttcgggccctgtggttggtctgggcgcttctaggagtggccggatcatgcccggagccgtgcgcctgcgtggacaagtacgctcaccagttcgcggactgcgcttacaaagagttgcgtgaggtgccggaaggactgcctgccaacgtgacgacgcttagtctgtccgcgaacaagatcactgtgctgcggcgcggggccttcgccgacgtcacacaggtcacgtcgctgtggctggcgcacaatgaggtgcgcaccgtggagccaggcgcactggccgtgctgagtcagctcaagaacctcgatctgagccacaacttcatatccagctttccgtggagcgacctgcgcaacctgagcgcgctgcagctgctcaaaatgaaccacaaccgcctgggctctctg

SEQ ID NO: 142405 - DNA, 2824 bp, Homo sapiens
  Payload ID: 8138
  Gene Symbol: ISLR2
  Gene Name: immunoglobulin superfamily containing leucine-rich repeat 2
  Uniprot ID: Q6UXK2
  ENST ID: ENST00000565159
  CDS Start-End: 502-2739
gggtttcatcagagctagggagcgacagtcgggaacagcgagtctgccgaagccggctgttgtgtgagggtgtgagacggcggggcggtgaggggccaccgcggcttgggggatagtgcgtgtggggttgaccgtgtgtctgcttgagaggctgtgaagatatggggggcagatatgggagaaatgctcgggcctgaagtccccagcccaccgtgctcaagagtagcggacgttttgccaccatccttgtctgtgctactgtctgctgcagcttccgtgccccgttctcctggagcaggcaagacctggagtgagggcgtaaaagcggcttgcattcaattagcagcgaagctcgcgggcgctggcgggacaggcgcgtgaggccacaacacatgcgtgtatcttgcttgggctatcttccctgctctgccacgccgggtctggagaaggggtttcagccccaggacatttactgagagtcggcgaatattgggagccgcgatgttcccccttcgggccctgtggttggtctgggcgcttctaggagtggccggatcatgcccggagccgtgcgcctgcgtggacaagtacgctcaccagttcgcggactgcgcttacaaagagttgcgtgaggtgccggaaggactgcctgccaacgtgacgacgcttagtctgtccgcgaacaagatcactgtgctgcggcgcggggccttcgccgacgtcacacaggtcacgtcgctgtggctggcgcacaatgaggtgcgcaccgtggagccaggcgcactggccgtgctgagtcagctcaagaacctcgatctgagccacaacttcatatccagctttccgtggagcgacctgcgcaacctgagcgcgctgcagctgctcaaaatgaaccacaaccgcctgggctctctgccccgggacgcactcggtgcgctacccgacctgcgttccctgcgcatcaacaacaaccggctgcgtacgctggcgcctggcaccttcgacgcgcttagcgcgctgtcacacttgcaactctatcacaatcccttccactgcggctgcggccttgtgtggctgcaggcctgggccgcgagcacccgggtgtccttacccgagcccgactccattgcttgtgcctcgcctcccgcgctgcagggggtgccggtgtaccgcctgcccgccctgccctgtgcaccgcccagcgtgcatctgagtgccgagccaccgcttgaagcacccggcaccccactgcgcgcaggactggcgttcgtgttacactgcatcgccgacggccaccctacgcctcgcctgcaatggcaacttcagatccccggtggcaccgtagtcttagagccaccggttctgagcggggaggacgacggggttggggcggaggaaggagagggagaaggagatggggatttgctgacgcagacccaagcccaaacgccgactccagcacccgcttggccggcgcccccagccacaccgcgcttcctggccctcgcaaatggctccctgttggtgcccctcctgagtgccaaggaggcgggcgtctacacttgccgtgcacacaatgagctgggcgccaactctacgtcaatacgcgtggcggtggcagcaaccgggcccccaaaacacgcgcctggcgccgggggagaacccgacggacaggccccgacctctgagcgcaagtccacagccaagggccggggcaacagcgtcctgccttccaaacccgagggcaaaatcaaaggccaaggcctggccaaggtcagcattctcggggagaccgagacggagccggaggaggacacaagtgagggagaggaggccgaagaccagatcctcgcggacccggcggaggagcagcgctgtggcaacggggacccctctcggtacgtttctaaccacgcgttcaaccagagcgcagagctcaagccgcacgtcttcgagctgggcgtcatcgcgctggatgtggcggagcgcgaggcgcgggtgcagctgactccgctggctgcgcgctggggccctgggcccggcggggctggcggagccccgcgacccgggcggcgacccctgcgcctactctatctgtgtccagcggggggcggcgcggcagtgcagtggtcccgcgtagaggaaggcgtcaacgcctactggttccgcggcctgcggccgggtaccaactactccgtgtgcctggcgctggcgggcgaagcctgccacgtgcaagtggtgttttccaccaagaaggagctcccatcgctgctggtcatagtggcagtgagcgtattcctcctggtgctggccacagtgccccttctgggcgccgcctgctgccatctgctggctaaacacccgggcaagccctaccgtctgatcctgcggcctcaggcccctgaccctatggagaagcgcatcgccgcagacttcgacccgcgtgcttcgtacctcgagtccgagaaaagctacccggcaggcggcgaggcgggcggcgaggagccagaggacgtgcagggggagggccttgatgaagacgcggagcagggagacccaagtggggacctgcagagagaggagagcctggcggcctgctcactggtggagtcccagtccaaggccaaccaagaggagttcgaggcgggctctgagtacagcgatcggctgcccctgggcgccgaggcggtcaacatcgcccaggagattaatggcaactacaggcagacggcaggctgaacctccgcccgtccggcccgcccattcccgacctccacctagggtgcctgggagcagcagtctagggctggcaggacttatgtcc

SEQ ID NO: 142406 - DNA, 2780 bp, Homo sapiens
  Payload ID: 8138
  Gene Symbol: ISLR2
  Gene Name: immunoglobulin superfamily containing leucine-rich repeat 2
  Uniprot ID: Q6UXK2
  ENST ID: ENST00000565540
  CDS Start-End: 117-2354
agatcccacatctcaagtcgtgcagtgcaggtcctcctattgcttctctgctgggtttcggtcacagtggagggctgtatgcacacacaggcacatgcctgtgttcttgagccgcgatgttcccccttcgggccctgtggttggtctgggcgcttctaggagtggccggatcatgcccggagccgtgcgcctgcgtggacaagtacgctcaccagttcgcggactgcgcttacaaagagttgcgtgaggtgccggaaggactgcctgccaacgtgacgacgcttagtctgtccgcgaacaagatcactgtgctgcggcgcggggccttcgccgacgtcacacaggtcacgtcgctgtggctggcgcacaatgaggtgcgcaccgtggagccaggcgcactggccgtgctgagtcagctcaagaacctcgatctgagccacaacttcatatccagctttccgtggagcgacctgcgcaacctgagcgcgctgcagctgctcaaaatgaaccacaaccgcctgggctctctgccccgggacgcactcggtgcgctacccgacctgcgttccctgcgcatcaacaacaaccggctgcgtacgctggcgcctggcaccttcgacgcgcttagcgcgctgtcacacttgcaactctatcacaatcccttccactgcggctgcggccttgtgtggctgcaggcctgggccgcgagcacccgggtgtccttacccgagcccgactccattgcttgtgcctcgcctcccgcgctgcagggggtgccggtgtaccgcctgcccgccctgccctgtgcaccgcccagcgtgcatctgagtgccgagccaccgcttgaagcacccggcaccccactgcgcgcaggactggcgttcgtgttacactgcatcgccgacggccaccctacgcctcgcctgcaatggcaacttcagatccccggtggcaccgtagtcttagagccaccggttctgagcggggaggacgacggggttggggcggaggaaggagagggagaaggagatggggatttgctgacgcagacccaagcccaaacgccgactccagcacccgcttggccggcgcccccagccacaccgcgcttcctggccctcgcaaatggctccctgttggtgcccctcctgagtgccaaggaggcgggcgtctacacttgccgtgcacacaatgagctgggcgccaactctacgtcaatacgcgtggcggtggcagcaaccgggcccccaaaacacgcgcctggcgccgggggagaacccgacggacaggccccgacctctgagcgcaagtccacagccaagggccggggcaacagcgtcctgccttccaaacccgagggcaaaatcaaaggccaaggcctggccaaggtcagcattctcggggagaccgagacggagccggaggaggacacaagtgagggagaggaggccgaagaccagatcctcgcggacccggcggaggagcagcgctgtggcaacggggacccctctcggtacgtttctaaccacgcgttcaaccagagcgcagagctcaagccgcacgtcttcgagctgggcgtcatcgcgctggatgtggcggagcgcgaggcgcgggtgcagctgactccgctggctgcgcgctggggccctgggcccggcggggctggcggagccccgcgacccgggcggcgacccctgcgcctactctatctgtgtccagcggggggcggcgcggcagtgcagtggtcccgcgtagaggaaggcgtcaacgcctactggttccgcggcctgcggccgggtaccaactactccgtgtgcctggcgctggcgggcgaagcctgccacgtgcaagtggtgttttccaccaagaaggagctcccatcgctgctggtcatagtggcagtgagcgtattcctcctggtgctggccacagtgccccttctgggcgccgcctgctgccatctgctggctaaacacccgggcaagccctaccgtctgatcctgcggcctcaggcccctgaccctatggagaagcgcatcgccgcagacttcgacccgcgtgcttcgtacctcgagtccgagaaaagctacccggcaggcggcgaggcgggcggcgaggagccagaggacgtgcagggggagggccttgatgaagacgcggagcagggagacccaagtggggacctgcagagagaggagagcctggcggcctgctcactggtggagtcccagtccaaggccaaccaagaggagttcgaggcgggctctgagtacagcgatcggctgcccctgggcgccgaggcggtcaacatcgcccaggagattaatggcaactacaggcagacggcaggctgaacctccgcccgtccggcccgcccattcccgacctccacctagggtgcctgggagcagcagtctagggctggcaggacttatgtcccccgtccccaaccttcacctactcctcccccttactactccccaaccttgactaccagggacttctattagggagtgggccgatttcaccagtccctgctacccacggctgccattctccctgcgggctgaatccccttccccgccaagcacagtgtttatcttaccccatgcaagactccacccgcagacggtgggcgatatctatgtccctccattcccgtcgcgattatctgcgaaatccaccccgcagcccgccccaccgtgggctctggagccagaggaaacgagcgaagactttggaaacctcgcggtaacgcggtggtttcgggggccagccaa

SEQ ID NO: 142407 - DNA, 4479 bp, Homo sapiens
  Payload ID: 8139
  Gene Symbol: IGDCC3
  Gene Name: immunoglobulin superfamily, DCC subclass, member 3
  Uniprot ID: Q8IVU1
  ENST ID: ENST00000327987
  CDS Start-End: 253-2697
agcggtgcgagtgtggagcgcgcaccccgggcgaggctgacagatcgcccgggtgggtgcaagatggcgcaagcggcgctccccctgcgccccccgcgctgctgagcaggcatgcggccccagtcccccaccgcctgggctcggccccggccggagccccagccccggccccggcgccggccccgcgggacgctgtgagccgcgagaggcccgggagccgcgcgtcgccgagccgagctgaccgagagccccatggctgtgcagcgcgccgcgtctccgcgccgcccgcccgccccgctctggccccggctcctgctgccgctgctgttgctgctgctgcccgcgccgagcgagggtcttggccactctgctgaactggcatttgctgtggagccaagtgatgatgttgccgtccccgggcagcctatagtgctggactgcagggtggaggggacccctccagtgcgaatcacctggaggaagaatggggtagagctgccagagagtacccactccaccttgctggccaatgggtccttgatgatccgtcacttcaggctggagccgggaggcagcccttcggatgaaggtgactatgagtgtgtggcccagaaccgctttgggctggtggtcagccggaaggctcgcatccaagctgcaaccatgtcggacttccacgtgcatccccaggccaccgtgggtgaggagggtggtgtggcccgcttccagtgccaaatccatgggcttcccaaacccctgatcacttgggagaagaacagagtcccaattgacacggacaatgagaggtacacattgctgcccaagggggtcctgcagatcacaggacttcgagctgaggacggtggcatcttccactgtgtggcctcaaacatcgccagtatccggatcagccacggggccaggctcactgtgtcaggctcgggctctggggcctacaaggagccagccatcctcgtggggcctgagaacctcaccctgacagtgcaccagaccgcggtgcttgagtgtgtcgccacgggcaacccgcgccccattgtgtcctggagccgcctggatggtcgccctatcggggtggagggcatccaggtgctgggcacaggaaacctcatcatctcagacgtgacggtccagcactctggcgtctacgtctgtgcagccaacagacctggcacccgggtgaggagaacggcacagggccggctggtggtgcaagccccagctgagtttgtgcagcatccccagtccatctccaggccagctgggaccacagccatgttcacctgccaagcccagggtgagccaccgcctcatgtcacgtggctgaaaaatggacaggtgctggggccaggaggccacgtcaggctcaagaataacaacagcacactgaccatttctggaatcggtcctgaggatgaagccatttatcagtgtgtggccgagaacagtgcgggctcatcacaggccagtgccaggctgaccgtactgtgggctgaggggctccccgggcctccccgcaatgtgcgggcagtctctgtgtcttccactgaggtgcgtgtgtcctggagtgagccgctggccaacaccaaggagatcatcggctacgtcctgcacatcaggaaggctgctgacccaccggagctggagtatcaggaggcagtcagcaagagcacctttcagcacctggtcagcgacctggagccctccacagcctacagtttctacatcaaggcctacacaccaaggggggccagctcagcctctgtgcccaccctagctagcaccctgggtgaagcccctgccccacccccactgtcagtgcgagtcctgggcagctcctccttgcagctgctgtgggagccttggccccggctggcccagcacgagggcggcttcaagctgttttaccgcccagcaagcaagacctccttcaccggccccatcctgctgcctggaaccgtctcctcctacaacctcagccagctcgaccccactgcagtgtatgaggtgaagctgctcgcctacaaccagcatggagatggcaatgccacagtccgctttgtgtctttgaggggagcatctgagaggacagccttgagcccaccatgtgactgccggaaggaggaggccgccaaccagacgtccaccacaggcatcgtcatcggcatccacatcggggtcacttgcatcatcttctgtgtcctcttcctcctgttcggccaaaggggcagggtcctcctgtgtaaagatgtggaaaaccagctgtcccctccacagggtccccggagccagagggaccctggcattctagccctaaatggggcgagacggggacagcggggccagctgggccgagacgagaaacgtgtggatatgaaggagctggagcagctgttccccccggccagcgcagcagggcagccggaccccagacccacacaggatcctgcagcccccgctccgtgtgaggagacccagctctccgtgctgccacttcaggggtgcggcctgatggaggggaagacgacggaggcgaagaccacagaggccacggctccctgcgccggcctggcggctgccccaccacccccagatggaggccctggcctcctcagtgaaggccaggcttccaggcctgcagcggcccgggttacccagccagctcactcggaacagtagccagtgtctggcaggctccagagggtggacggagcggggcccattctcaggtcaaaagcaagatttctactgtcatgtgggatttggatggtcctgggggctccccagcatttctatcctgactgcctcttgggttgtcaaaacccaaggcagccttgacagggaccccccggccctaacacccatcaggagttggagcagttcctgcaggagcctgttccttccctgggctgacgcccccttgcctctgcctggtacccacatgacttggaactgaactaacatttttctttaaaaagcaaaacttaaaaaaaaaaaaaaagaggagagagatagaggaaggtgaattagactccaaaagatgaccctgctgtagctgggccctgacactgtcaccctccaccgactttgttttctcaggatggatttttgctgttttggctctcagcacctacctcagccggaatgaatgtcctggggggcagtggggcggtggcctcagcccccttaccccacagagcccgaatgcactcctacctcaagtccccttgctggggaccccctctcccttcccacactgttgtccagagtaaaaaaaaaaaaaaaaaaaaaagcacttccccgtttccaggtgtgaaagaaaaaaaaaagcacttccccatttccagatgtgaaagaaaatgtctacctcaaggctcgctggctctgtgggctgtgttgtcactggacctgcctccccgcccctcctgcccacagcccacctacctctcctgcagaggagaggccagaggttgggccaccaaggggaactcttgtggcctacagaaatagaaatggattgggcagagaaaaaatgtgaaagcagccaaaaatgagaggaaatttgttccttgaagtataaattgtccaaacgagccacctcccagcacaccgcctgtccccgtcttgtctgtccactcccattttgagccagcccatccttgatggggatgcccatgaggaacctgggcttgggagggtggcatcagctggccgcctgcctcctgtcctgcaggcccggcccctggaatgtaccatgtgtgggatgggtgtgtgggagggtgagggggtgtgggtgtcccctgcagaggcgccccagcctcaggcacccagccagcctgatccacccctcgacaggggagcatccactgtcagcagccatggccggaagctatttttatacaaggtgtgttaagggttatgttcttgtgactttttgttactcttttctgttgtgttgttctttgaactacttagttaaagaagaagaaaagaaaaccaaggaaacaaatacctatttttggttatactcagaaacatttttttaaatagcagaagaaaaactttttttaaagaaaaaagataagtgtattccttaagaatgagaccataaatatccctgacccccaatcctctagggacacctccaccctgaactttagttaattagctgaagaagatagaatttgtggtgttttcctagaaaactagagctgtgtccgcgtggacttggggaagggtagtcccttcccttctcccaaatgatgtgtggatgcccagggctccacaaagctccaaggcagtgccccctctgttcccaaagcagcttctctcgggagcctccctctcccttgggaagggtgcggctggggcaggagggggctggggggccacctggccttacttgggttttgtcacactctgctcattttgactgaataaaagtcctgttgccaaagtgaa

SEQ ID NO: 142408 - DNA, 564 bp, Homo sapiens
  Payload ID: 8139
  Gene Symbol: IGDCC3
  Gene Name: immunoglobulin superfamily, DCC subclass, member 3
  ENST ID: ENST00000559058
  CDS Start-End: 154-564
cgcgagtgcgccggggccgggcccagctggggaatccgaggctctgggggagggggtggcgggaaatggtgcctcgctcgccccagcgacatcaaaccctcgtttggcgtgcgaggacaatggctgtcttattttctccattcgccgcgcacaatgccggattctctcattcacccgcggtggtgcgagcgagccatgtcggacttccacgtgcatccccaggccaccgtgggtgaggagggtggtgtggcccgcttccagtgccaaatccatgggcttcccaaacccctgatcacttgggagaagaacagagtcccaattgacacggacaatgagaggtacacattgctgcccaagggggtcctgcagatcacaggacttcgagctgaggacggtggcatcttccactgtgtggcctcaaacatcgccagtatccggatcagccacggggccaggctcactgtgtcaggctcgggctctggggcctacaaggagccagccatcctcgtggggcctgagaacctcaccctgacagtgcaccagaccgcggtgcttgagtgtgtc

SEQ ID NO: 142409 - DNA, 1783 bp, Homo sapiens
  Payload ID: 8139
  Gene Symbol: IGDCC3
  Gene Name: immunoglobulin superfamily, DCC subclass, member 3
  ENST ID: ENST00000558354
  CDS Start-End: 179-1783
atttccctcttcccgactcctctagtcccttcatcagtccaggctccccacagtgccccatcttccctcttcttttcccagtctttctctcctgccttctctacccgcatctctcccagccattgcctaaacctcggcagtcctttcaggttggtggcacacagctgggcactaagccatgtcggacttccacgtgcatccccaggccaccgtgggtgaggagggtggtgtggcccgcttccagtgccaaatccatgggcttcccaaacccctgatcacttgggagaagaacagagtcccaattgacacggacaatgagaggtacacattgctgcccaagggggtcctgcagatcacaggacttcgagctgaggacggtggcatcttccactgtgtggcctcaaacatcgccagtatccggatcagccacggggccaggctcactgtgtcaggctcgggctctggggcctacaaggagccagccatcctcgtggggcctgagaacctcaccctgacagtgcaccagaccgcggtgcttgagtgtgtcgccacgggcaacccgcgccccattgtgtcctggagccgcctggatggtcgccctatcggggtggagggcatccaggtgctgggcacaggaaacctcatcatctcagacgtgacggtccagcactctggcgtctacgtctgtgcagccaacagacctggcacccgggtgaggagaacggcacagggccggctggtggtgcaagccccagctgagtttgtgcagcatccccagtccatctccaggccagctgggaccacagccatgttcacctgccaagcccagggtgagccaccgcctcatgtcacgtggctgaaaaatggacaggtgctggggccaggaggccacgtcaggctcaagaataacaacagcacactgaccatttctggaatcggtcctgaggatgaagccatttatcagtgtgtggccgagaacagtgcgggctcatcacaggccagtgccaggctgaccgtactgtgggctgaggggctccccgggcctccccgcaatgtgcgggcagtctctgtgtcttccactgaggtgcgtgtgtcctggagtgagccgctggccaacaccaaggagatcatcggctacgtcctgcacatcaggaaggctgctgacccaccggagctggagtatcaggaggcagtcagcaagagcacctttcagcacctggtcagcgacctggagccctccacagcctacagtttctacatcaaggcctacacaccaaggggggccagctcagcctctgtgcccaccctagctagcaccctgggtgaagcccctgccccacccccactgtcagtgcgagtcctgggcagctcctccttgcagctgctgtgggagccttggccccggctggcccagcacgagggcggcttcaagctgttttaccgcccagcaagcaagacctccttcaccggccccatcctgctgcctggaaccgtctcctcctacaacctcagccagctcgaccccactgcagtgtatgaggtgaagctgctcgcctacaaccagcatggagatggcaatgccacagtccgctttgtgtctttgaggggagcatctgagaggacagccttgagcccaccatgtgactgccggaaggaggaggccgccaaccagacgtccaccacaggcatcgtcatcggcatccacatcggggtcacttgcatcatcttctgtgtcctcttcctcctgttcggccaaaggggcagggtcctcctgtgtaaagat

SEQ ID NO: 142410 - DNA, 6508 bp, Homo sapiens
  Payload ID: 8140
  Gene Symbol: IGDCC4
  Gene Name: immunoglobulin superfamily, DCC subclass, member 4
  Uniprot ID: Q8TDY8
  ENST ID: ENST00000352385
  CDS Start-End: 211-3963
ctcgcccaagatggcgatggaggggcgggtgaggcggcagcggccctggcccccgcgccggccccagctcgggcccgggcccccgaggccgcgcccccgcccgcggcgccgcgcctccccgggccactgacgcccggcgcgctctccccccgcggcggcggccgaagcacggggaggcggcggcggcggcggcggcccgagcccagccccatggcgcggggggacgccggccgcggccgcgggctcctcgcgttgaccttctgcctgttggccgcgcgcggggagctgctgttgccccaggagacgactgtggagctgagctgtggagtggggccactgcaagtgatcctgggcccagagcaggctgcagtgctaaactgtagcctgggggctgctgccgctggaccccccaccagggtgacctggagcaaggatggggacaccctgctggagcacgaccacttacacctgctgcccaatggttccctgtggctgtcccagccactagcacccaatggcagtgacgagtcagtccctgaggctgtgggggtcattgaaggcaactattcgtgcctagcccacggccccctcggagtgctggccagccagactgctgtcgtcaagcttgccacactcgcagacttctctctgcacccggagtctcagacggtggaggagaacgggacagctcgctttgagtgccacattgaagggctgccagctcccatcattacttgggagaaggaccaggtgacattgcctgaggagcctcggctcatcgtgcttcccaacggcgtccttcagatcctggatgttcaggagagtgatgcaggcccctaccgctgcgtggccaccaactcagctcgccagcacttcagccaggaggccctactcagtgtggcccacagagggtccctggcgtccaccagggggcaggacgtggtcattgtggcagccccagagaacaccacagtggtgtctggccagagtgtggtgatggaatgtgtggcctcagctgaccccaccccttttgtgtcctgggtccgacaagacgggaagcccatctccacagatgtcatcgtcctgggccgcaccaacctactaattgccaacgcgcagccctggcactccggcgtctatgtctgccgcgccaacaagccccgcacgcgcgacttcgccactgcagccgctgagctccgtgtgctggcggctcccgccatcactcaggcgcccgaggcgctgtcgcggacgcgggcgagcacagcgcgcttcgtgtgccgcgcgtcgggggagccgcggccagcgctgcgctggctgcacaacggggcgccgctgcggcccaacgggcgcgtcaaggtccagggcggcggtggcagcctggtcatcacacagatcggcctgcaggacgccggctactaccagtgcgtggctgagaacagcgcgggaatggcgtgcgctgccgcgtcgctggccgtggtggtgcgcgaggggctgcccagcgcccccacgcgggtcactgctacgccactgagcagctccgctgtgttggtggcctgggagcggcccgagatgcacagcgagcagatcatcggcttctctctccactaccagaaggcacggggcatggacaatgtggaataccagtttgcagtgaacaacgacaccacagaactacaggttcgggacctggaacccaacacagattatgagttctacgtggtggcctactcccagctgggagccagccgcacctccaccccagcactggtgcacacactggatgatgtccccagtgcagcaccccagctctccctgtccagccccaacccttcggacatcagggtggcgtggctgcccctgccccccagcctgagcaatgggcaggtggtgaagtacaagatagaatacggtttgggaaaggaagatcagattttctctactgaggtgcgaggaaatgagacacagcttatgctgaactcgcttcagccaaacaaggtgtatcgagtacggatttcggctggtacagcagccggcttcggggccccctcccagtggatgcatcacaggacgcccagtatgcacaaccagagccatgtcccttttgcccctgcagagttgaaggtgcaggcaaagatggagtccctggtcgtgtcatggcagccaccccctcaccccacccagatctctggctacaaactatattggcgggaggtgggggctgaggaggaggccaatggcgatcgcctgccagggggccgtggagaccaggcttgggatgtggggcctgtccggctcaagaagaaagtgaagcagtatgagctgacccagctagtccctggccggctgtacgaggtgaagctcgtggctttcaacaaacatgaggatggctatgcagcagtgtggaagggcaagacggagaaggcgccggcaccagacatgcctatccagaggggaccacccctgcctccagcccacgtccatgcggaatcaaacagctccacatccatctggcttcggtggaaaaagccagatttcaccacagtcaagattgtcaactacactgtgcgcttcagcccctgggggctcaggaatgcctccctggtcacctattacaccagttctggagaagacatcctcattggcggcttgaagccattcaccaaatacgagtttgcagtgcagtctcacggcgtggacatggatgggcctttcggctctgtggtggagcgctccaccctgcctgaccggccctccacacccccatccgacctgcgactgagccccctgacaccgtccacggttcggctgcactggtgcccccccacagagcccaacggggagatcgtggagtatctgatcctgtacagcagcaaccacacgcagcctgagcaccagtggaccttgctcaccacgcagggaaacatcttcagtgctgaggtccatggcctggagagcgacactcggtacttcttcaagatgggggcgcgcacagaggtgggacctgggcctttctcccgcctgcaggatgtgatcacgctccaggagaagctgtcagactcgctggacatgcactcagtcacgggcatcatcgtgggtgtctgcctgggcctcctctgcctcctggcctgcatgtgtgctggcctgcgccgcagcccccacagggaatccctcccaggcctgtcctccaccgccacccccgggaatcccgcgctgtactccagagctcggcttggcccccccagccccccagctgcccatgaattggagtcccttgtgcacccccatccccaggactggtccccgccaccctcagacgtggaggacagggctgaagtgcacagccttatgggtggcggtgtttctgaaggccggagtcactccaaaagaaagatctcctgggctcaaccaagcgggctgagctgggctggttcctgggcaggctgtgagctgccccaggcaggcccccggccggctctgacccgggccctgctgccccctgctggaactgggcagacgctgttgctgcaggctctggtgtacgacgccataaagggcaatgggaggaagaagtcacccccagcctgcaggaaccaggtggaggctgaagtcattgtccactctgactttagtgcatctaacgggaaccctgacctccatctccaagacctggagcctgaggaccccctgcctccagaggctcctgatctcatctcgggtgttggggatccagggcagggggcagcctggctggacagggagttgggagggtgtgagctggcagcccccgggccagacagacttacctgcttgccagaggcagccagtgcttcctgctcctacccggacctccagccaggcgaggtgctagaggagacccctggagatagctgccagctcaaatccccctgccctctaggagccagcccaggcctgcccagatccccggtctcctcctctgcctagctcttcccagaggatgtggtttggggcaggcaggtatggatcacataggatgcgatacctgtggccgtgtatgtccacatgtgtgcctgtagatacatcatcaagccctttggagcttcctaagttgctttggctgaggggagaggaaaacatggattattcactccccccatactctttgtgatacacatgtgacatgtgaaagacatacgagacatagctacatgtgatgtgcacatgtgtgaagtgcatgtatgcgtactggttgttgagctgggaaaccgtggcccaggcagtggtcactacagcctgattggtcctccaggtcagaacggtgccccacagtggtcagtccccagccctgtgggcccccacctccatcgcccagccttttattacacactctgagagtgtctccaatgcctgtctgacaaagacagtcccagcccattctcctgtctggctgggttgggtgcaagcaggctctgaatgcctggcatttcagctgcatcacctcccagctccttattgcccaaatagagagggtggccctggctcccctccgagcaactctgcatttaattttgtaatctgggaagtgcctggttttgaaaatccgctttctctcactcttcccctccttccttgcccctggctgctctagtgttctgtctcccagtcacctcgctctcccagcaccagtgcccttctcctgctcccagatactctttcctttcctctctcctgttttccttcctctgctatctctcacacctctcccagactatgtcatcttgttctcctgcctgggttcaaactctgcatccttctctaacaacgtgactacctcatgtctgcttcaaggcccccgtgcccttcctgtatccgcggctgccgcgcactcgcctgccatcctcctgcctcctcttcactcagtgcttctgcttgccctgccccaggcagcccacccacgcccagtgcgggtgtggagaagatcttctggcttccctgcatcttgcctttgggattgggatccaagggttctccatggatggatccaagtcatagaggggaatgtttgagacagggaagggggctgtgatccagaggctcagaataaaaagatgccctcccttctatgcaggggggcaagtttactggatggagatgatttgggcctctcttccagaagaagctaaaggaagagaaggggagtgagagttcagggaggcccttcccaccctgtgaggcttgacttgatctggattggggatgacaggaatctcaccctctggggtgctggcaaggaggtctttgcacaggaaaaggggtagctcatttcagtttgttttttctttaaattgaatcctcaagtcattttctgttcacctgccgcacagggacaagcttgacttctattttctgtgtagtgaaaacaatgtcatttatttggtttttcacctcagccctctcataggagcatagaatgttagggtctttactccctaatgatgtctgattggcacatcaagagttaactctgccttctgggccaaattcgaaataaccagtccatttttccttttttttttttttttttttaaatggtggaatgtctctcagcacagttgcggcttcctcaaaccctgaaagcatctgtgtttattatactcgggtgtcactcactgttgatgtctgcacctacgtttccacctcctccccctccttcagccagcctatgataacactaaagattattaatgttggttttgtatctcgttaaagacagaattgtcacttgtagtatttctgtagcattcagcgctgctgtggctaacaccactgtgtatgtttcatcattgctctgaaggtcaaaagcctcattttattttgctggtttgattttttttttttaaagaagaaaaaaaaactgccctgaattaaatggctgttttaacagtaggctcttagcattataccacatagtcatttttcatgttcttgtttaacaggcactgaggttctggtttaaattaaatagctgcaaatgagacaatttataacccattaggttgggtggaaaattgtttctcaaaagcaaataagtaataaatctggtatctgcctataactcacagttgataagaaagtggccatttctcactagcactatatatgatttgggctctgggtaatttggaagtgttaggtttgtgtctttgtagcagtatttttattagaaaagaatctattggccttttacagggtattaatccctttgtcacctaccattgatgccttaagttttctgagtctcaattaaaaatcttccttttcttgatgcatgacaagtgtaatcagtacttgctcatttatttgtctgtatttagtttatgctgtactatttaattatccttccagcgttttttttttctccttacaaatatgatactctttagtgttaagctaaggcattgattcatgtatctgtccttataatgaattaataaactattttccagaaatgtggaattctcttttggaa

SEQ ID NO: 142411 - DNA, 4378 bp, Homo sapiens
  Payload ID: 8141
  Gene Symbol: IGSF1
  Gene Name: immunoglobulin superfamily, member 1
  Uniprot ID: Q8N6C5
  ENST ID: ENST00000361420
  CDS Start-End: 81-4091
gccttcaactaccatcccaccacctgctgaggagaaaaattcttcaagactcagagcacacagccagcaccagaggccccatgaccctggacagaccaggggagggggccaccatgctgaagacattcactgttttgctcttttgcattcggatgagtctgggtatgacatcaatagtgatggaccctcaaccagagttgtggatagagtccaactacccccaggccccttgggagaacatcacgctttggtgccgaagcccctctcggatatcaagcaagttcctgctgctgaaggataagacacagatgacctggatccgcccttcccacaagaccttccaagtttcattccttataggtgcccttactgagtccaatgcaggtctttaccggtgctgctactggaaggagacaggctggtcaaagcccagtaaagttctagagttggaggcaccaggccaactgcccaagcccatcttctggattcaggctgagacccccgctcttcctgggtgtaatgttaacatcctctgccatggctggctgcaggatttggtattcatgctgtttaaagagggatatgcagagcctgtggattaccaagtcccaactgggacaatggccatattctccattgacaacctgacacctgaggatgaaggggtttacatctgccgcactcatatccagatgctccccaccctgtggtcagagcccagcaaccccctgaagctggttgtagcaggactctaccccaaaccaactttgacagcccatcctgggcccatcatggcacctggagaaagcctgaatctcaggtgccaagggccaatctatggaatgacctttgctctaatgagggttgaagacttggagaagtccttttaccacaagaagacaataaaaaatgaggcaaatttcttcttccagtctttgaagatccaagatactggacattacctctgtttttactatgacgcatcatatagaggttcactccttagtgatgtcctgaaaatctgggtgactgacactttccccaagacctggctacttgctcggcccagtgctgtggtccaaatgggtcagaatgtgagcctacggtgtcgaggaccagtggatggagtgggtcttgcactctataagaaaggagaagacaaaccacttcaatttttggatgccaccagcatcgatgacaacacatcattcttcctcaacaatgtaacctacagtgatactggcatctatagctgccactatcttctcacctggaagacctccattaggatgccatcacacaacactgtggagcttatggttgtagataagccccccaaaccctccctgtcagcttggccaagcactgtgttcaagctaggaaaggccatcacccttcagtgccgagtatctcatccagtactggaattttctctggaatgggaagaaagagaaacattccaaaaattctcagtaaacggagacttcatcatcagtaatgttgacgggaaaggcacagggacctacagttgcagctatcgcgtagagacacatcctaacatctggtcacatcgcagtgagcccctgaagctgatggggccagcaggctatctcacctggaattacgttctgaatgaagctatcaggttgtctctaatcatgcagcttgttgccttgctgttggtagtgctgtggataaggtggaagtgtcggagactcagaatcagagaagcctggttgctgggaacagctcaaggggtcaccatgctcttcatagtcacggcccttctctgctgtggactgtgcaatggggtattgatagaagagactgaaatagtcatgccaacccctaagcctgagctgtgggcagagaccaactttcctctggccccgtggaagaacttaaccctctggtgcagaagcccttctggctcaactaaggagtttgtgttgctgaaggatgggaccgggtggatcgccactcgcccggcctcagagcaggtccgggctgccttcccccttggcgccctgacccagagccacaccgggagctaccactgccattcatgggaggagatggctgtatcggagcccagtgaggcacttgagctggtggggacagacatcctccccaaacctgtcatttctgcttcccccacaatccggggccaggaactacaactccggtgcaaaggatggctggcaggcatggggtttgctctgtataaggagggagagcaagaacctgtccagcaacttggtgctgttggaagagaagccttctttacaatccagagaatggaggataaagacgaaggcaattacagctgccgcactcacactgaaaaacgccccttcaagtggtctgagcccagtgagccgctggagcttgtcataaaagaaatgtaccctaagcccttcttcaagacatgggccagccctgtggtcacccctggtgcccgagtgactttcaattgctccaccccccaccagcatatgagctttattctttacaaagatggaagtgaaatagcatccagtgacaggtcctgggcaagtccgggggccagtgcagctcactttctaatcatttcggtgggcattggtgatggagggaattacagctgccgatattatgacttttctatctggtctgagcccagcgaccctgtggagctcgtggtgacagaattctaccccaaacccactctcctggcacagccaggtcctgtggtgtttcctgggaagagtgtgatcctgcgctgccaagggactttccagggcatgaggttcgccctcttgcaggagggagcccatgttcccttacagtttcggagtgtctcagggaactcagctgacttccttctccacactgttggagcagaggactctgggaactatagctgtatctactatgagacaaccatgtcaaacagggggtcatatctcagtatgccccttatgatctgggtgactgacacattccctaagccatggttgtttgctgagcccagttctgtggttcccatggggcagaatgttactctctggtgccgagggccggtccatggagtaggatacattctgcacaaagaaggagaagccacttcaatgcagctctggggatccaccagtaatgacggggcattccccatcaccaatatatctggtactagcatggggcgttacagctgctgctaccaccctgactggaccagttctatcaagatacaacctagcaacaccctggaactcctagtcacaggcttactccccaaacccagcctattagcccagcctggtcccatggtggcccctggcgaaaatatgactcttcagtgtcaaggggaactgccagactcaacatttgtcctgttgaaggagggggctcaggagcctttagagcaacagaggccaagtgggtacagggctgacttctggatgccagcagtgagaggtgaagactctgggatctatagctgtgtttattatttggactctactccctttgcagcttcaaatcacagtgactccctggagatctgggtgactgataagccccctaaaccctctctgtcagcctggcccagcaccatgttcaagttagggaaggacatcacccttcagtgccgaggacccctgccaggtgttgaatttgtcctagaacatgatggagaagaagcacctcagcagttttcagaggatggagactttgtcatcaacaacgtagaaggaaaaggcattggaaactacagctgcagctaccgcctccaggcctaccctgatatctggtcagagcctagtgatcccctggagctggtgggggcagcagggcctgttgctcaggagtgcactgtagggaacattgtccgaagtagcctaatcgtggtggttgttgtagccttgggggtagtgctagccatagagtggaagaagtggcctcgactgcgaaccagaggctcagagacagacggaagagaccagaccattgcccttgaagagtgtaaccaagaaggagaaccaggcacccctgccaattctccttcatcaacctctcagagaatctctgtggaactgcccgttccaatataataatctcctcctttacaagagctttcctctcctctctcttgctctcagagacctataaatccaaccagttaccctgcaagtcagccccatctgctgttccttggtctctaatcacctgagctgggtaaaggggattctgggagttgagagctctgccagggtgagatgtttcctgaagagaggttccccacccctgtaactcctcactgtactgatttactggcgcatgaaattctattaaaaatgcattcttctgaataaaaagagtattcactatttaacttcaa

SEQ ID NO: 142412 - DNA, 1786 bp, Homo sapiens
  Payload ID: 8141
  Gene Symbol: IGSF1
  Gene Name: immunoglobulin superfamily, member 1
  Uniprot ID: Q8N6C5
  ENST ID: ENST00000370900
  CDS Start-End: 107-835
gcctttctcctttccttcccggatcccagacctgcctcgatcccaccacctgctgaggagaaaaattcttcaagactcagagcacacagccagcaccagaggccccatgaccctggacagaccaggggagggggccaccatgctgaagacattcactgttttgctcttttgcattcggatgagtctgggtatgacatcaatagtgatggaccctcaaccagagttgtggatagagtccaactacccccaggccccttgggagaacatcacgctttggtgccgaagcccctctcggatatcaagcaagttcctgctgctgaaggataagacacagatgacctggatccgcccttcccacaagaccttccaagtttcattccttataggtgcccttactgagtccaatgcaggtctttaccggtgctgctactggaaggagacaggctggtcaaagcccagtaaagttctagagttggaggcaccaggccaactgcccaagcccatcttctggattcaggctgagacccccgctcttcctgggtgtaatgttaacatcctctgccatggctggctgcaggatttggtattcatgctgtttaaagagggatatgcagagcctgtggattaccaagtcccaactgggacaatggccatattctccattgacaacctgacacctgaggatgaaggggtttacatctgccgcactcatatccagatgctccccaccctgtggtcagagcccagcaaccccctgaagctggttgtagcaggtgggtgtggctatggctgctggcatctggcaattgttgtcccaggtatcatggctggctgagctagggtttctgattttactttcctcagccagtttctaggccctgcaaggccccatgagctacagtcgtttgaagttttactgagatataaattagaatggcatgtgctgcaaggcagatgtatgggagccaatcatttggctagtaaaggagcccagccaactggccagcagcttcagctcatcacagctttgttgttctcaacttgttgaatatcatgcattcattcattaattcaaccagtatttattgagcacctaatatgtgccaggcactgccactgcaatcttataaatggagttttaaatttgcaaatgtattttatttgtaattgttatttttatgtgtggaaaacagaatggattgctagtgttggtgagtaaaaacaaaaaaaaacaaatgacaaagaatgtgatagctcatattttagaaatggctttataaatcaccttggttccctatcagtagagctagtaaggcagcaccaatctctaaatatagaagaaatttccccaaaatgtaaaatgccagacatgtcccagcccgaactcccccaccccatggcctggaggtttctagatggaattggccacatttgctttagtctctctatccagctaaataggcttggggaaagctgtggtgctacagaaagtaccctagacttagaagcagtaatactggtttctagttctatttctgacactgcctccctgtgtggtcttgagcaagtcacttcacttttctgtgctttggcttcctctactctaaaaatgggataacagtatctatctgatctactgtgtaatgcttctctctgtgcctcagcttcctgatctgcaaaattggtttaataataatgcctacctcacagggttgttgtgaggatttgcctaaatatatatgtacagtgcctggcatataagttctcaataaatggtagatattaa

SEQ ID NO: 142413 - DNA, 1820 bp, Homo sapiens
  Payload ID: 8141
  Gene Symbol: IGSF1
  Gene Name: immunoglobulin superfamily, member 1
  Uniprot ID: Q8N6C5
  ENST ID: ENST00000370901
  CDS Start-End: 141-869
atgccgggcagtttgctgcatctggaggagctcactggagaatctccaacatcggagcgggccttcaactaccatcccaccacctgctgaggagaaaaattcttcaagactcagagcacacagccagcaccagaggccccatgaccctggacagaccaggggagggggccaccatgctgaagacattcactgttttgctcttttgcattcggatgagtctgggtatgacatcaatagtgatggaccctcaaccagagttgtggatagagtccaactacccccaggccccttgggagaacatcacgctttggtgccgaagcccctctcggatatcaagcaagttcctgctgctgaaggataagacacagatgacctggatccgcccttcccacaagaccttccaagtttcattccttataggtgcccttactgagtccaatgcaggtctttaccggtgctgctactggaaggagacaggctggtcaaagcccagtaaagttctagagttggaggcaccaggccaactgcccaagcccatcttctggattcaggctgagacccccgctcttcctgggtgtaatgttaacatcctctgccatggctggctgcaggatttggtattcatgctgtttaaagagggatatgcagagcctgtggattaccaagtcccaactgggacaatggccatattctccattgacaacctgacacctgaggatgaaggggtttacatctgccgcactcatatccagatgctccccaccctgtggtcagagcccagcaaccccctgaagctggttgtagcaggtgggtgtggctatggctgctggcatctggcaattgttgtcccaggtatcatggctggctgagctagggtttctgattttactttcctcagccagtttctaggccctgcaaggccccatgagctacagtcgtttgaagttttactgagatataaattagaatggcatgtgctgcaaggcagatgtatgggagccaatcatttggctagtaaaggagcccagccaactggccagcagcttcagctcatcacagctttgttgttctcaacttgttgaatatcatgcattcattcattaattcaaccagtatttattgagcacctaatatgtgccaggcactgccactgcaatcttataaatggagttttaaatttgcaaatgtattttatttgtaattgttatttttatgtgtggaaaacagaatggattgctagtgttggtgagtaaaaacaaaaaaaaacaaatgacaaagaatgtgatagctcatattttagaaatggctttataaatcaccttggttccctatcagtagagctagtaaggcagcaccaatctctaaatatagaagaaatttccccaaaatgtaaaatgccagacatgtcccagcccgaactcccccaccccatggcctggaggtttctagatggaattggccacatttgctttagtctctctatccagctaaataggcttggggaaagctgtggtgctacagaaagtaccctagacttagaagcagtaatactggtttctagttctatttctgacactgcctccctgtgtggtcttgagcaagtcacttcacttttctgtgctttggcttcctctactctaaaaatgggataacagtatctatctgatctactgtgtaatgcttctctctgtgcctcagcttcctgatctgcaaaattggtttaataataatgcctacctcacagggttgttgtgaggatttgcctaaatatatatgtacagtgcctggcatataagttctcaataaatggtagatattaa

SEQ ID NO: 142414 - DNA, 4594 bp, Homo sapiens
  Payload ID: 8141
  Gene Symbol: IGSF1
  Gene Name: immunoglobulin superfamily, member 1
  Uniprot ID: Q8N6C5
  ENST ID: ENST00000370903
  CDS Start-End: 284-4309
aggtgccaggcagagttggtgtaggtgggctccccgagcccggcgcagggaggggaggaggttggggcgggccggcaggcgggcgggggagagaggaaggcggggctcagagccgaagaggctgtccttagacagctcttctcatgccgggcagtttgctgcatctggaggagctcactggagaatctccaacatcggagcgggccttcaactaccatcccaccacctgctgaggagaaaaattcttcaagactcagagcacacagccagcaccagaggccccatgaccctggacagaccaggggagggggccaccatgctgaagacattcactgttttgctcttttgcattcggatgagtctgggtatgacatcaatagtgatggaccctcaaccagagttgtggatagagtccaactacccccaggccccttgggagaacatcacgctttggtgccgaagcccctctcggatatcaagcaagttcctgctgctgaaggataagacacagatgacctggatccgcccttcccacaagaccttccaagtttcattccttataggtgcccttactgagtccaatgcaggtctttaccggtgctgctactggaaggagacaggctggtcaaagcccagtaaagttctagagttggaggcaccaggccaactgcccaagcccatcttctggattcaggctgagacccccgctcttcctgggtgtaatgttaacatcctctgccatggctggctgcaggatttggtattcatgctgtttaaagagggatatgcagagcctgtggattaccaagtcccaactgggacaatggccatattctccattgacaacctgacacctgaggatgaaggggtttacatctgccgcactcatatccagatgctccccaccctgtggtcagagcccagcaaccccctgaagctggttgtagcaggactctaccccaaaccaactttgacagcccatcctgggcccatcatggcacctggagaaagcctgaatctcaggtgccaagggccaatctatggaatgacctttgctctaatgagggttgaagacttggagaagtccttttaccacaagaagacaataaaaaatgaggcaaatttcttcttccagtctttgaagatccaagatactggacattacctctgtttttactatgacgcatcatatagaggttcactccttagtgatgtcctgaaaatctgggtgactgacactttccccaagacctggctacttgctcggcccagtgctgtggtccaaatgggtcagaatgtgagcctacggtgtcgaggaccagtggatggagtgggtcttgcactctataagaaaggagaagacaaaccacttcaatttttggatgccaccagcatcgatgacaacacatcattcttcctcaacaatgtaacctacagtgatactggcatctatagctgccactatcttctcacctggaagacctccattaggatgccatcacacaacactgtggagcttatggttgtagataagccccccaaaccctccctgtcagcttggccaagcactgtgttcaagctaggaaaggccatcacccttcagtgccgagtatctcatccagtactggaattttctctggaatgggaagaaagagaaacattccaaaaattctcagtaaacggagacttcatcatcagtaatgttgacgggaaaggcacagggacctacagttgcagctatcgcgtagagacacatcctaacatctggtcacatcgcagtgagcccctgaagctgatggggccagcaggctatctcacctggaattacgttctgaatgaagctatcaggttgtctctaatcatgcagcttgttgccttgctgttggtagtgctgtggataaggtggaagtgtcggagactcagaatcagagaagcctggttgctgggaacagctcaaggggtcaccatgctcttcatagtcacggcccttctctgctgtgcaatttcttttgcaggactgtgcaatggggtattgatagaagagactgaaatagtcatgccaacccctaagcctgagctgtgggcagagaccaactttcctctggccccgtggaagaacttaaccctctggtgcagaagcccttctggctcaactaaggagtttgtgttgctgaaggatgggaccgggtggatcgccactcgcccggcctcagagcaggtccgggctgccttcccccttggcgccctgacccagagccacaccgggagctaccactgccattcatgggaggagatggctgtatcggagcccagtgaggcacttgagctggtggggacagacatcctccccaaacctgtcatttctgcttcccccacaatccggggccaggaactacaactccggtgcaaaggatggctggcaggcatggggtttgctctgtataaggagggagagcaagaacctgtccagcaacttggtgctgttggaagagaagccttctttacaatccagagaatggaggataaagacgaaggcaattacagctgccgcactcacactgaaaaacgccccttcaagtggtctgagcccagtgagccgctggagcttgtcataaaagaaatgtaccctaagcccttcttcaagacatgggccagccctgtggtcacccctggtgcccgagtgactttcaattgctccaccccccaccagcatatgagctttattctttacaaagatggaagtgaaatagcatccagtgacaggtcctgggcaagtccgggggccagtgcagctcactttctaatcatttcggtgggcattggtgatggagggaattacagctgccgatattatgacttttctatctggtctgagcccagcgaccctgtggagctcgtggtgacagaattctaccccaaacccactctcctggcacagccaggtcctgtggtgtttcctgggaagagtgtgatcctgcgctgccaagggactttccagggcatgaggttcgccctcttgcaggagggagcccatgttcccttacagtttcggagtgtctcagggaactcagctgacttccttctccacactgttggagcagaggactctgggaactatagctgtatctactatgagacaaccatgtcaaacagggggtcatatctcagtatgccccttatgatctgggtgactgacacattccctaagccatggttgtttgctgagcccagttctgtggttcccatggggcagaatgttactctctggtgccgagggccggtccatggagtaggatacattctgcacaaagaaggagaagccacttcaatgcagctctggggatccaccagtaatgacggggcattccccatcaccaatatatctggtactagcatggggcgttacagctgctgctaccaccctgactggaccagttctatcaagatacaacctagcaacaccctggaactcctagtcacaggcttactccccaaacccagcctattagcccagcctggtcccatggtggcccctggcgaaaatatgactcttcagtgtcaaggggaactgccagactcaacatttgtcctgttgaaggagggggctcaggagcctttagagcaacagaggccaagtgggtacagggctgacttctggatgccagcagtgagaggtgaagactctgggatctatagctgtgtttattatttggactctactccctttgcagcttcaaatcacagtgactccctggagatctgggtgactgataagccccctaaaccctctctgtcagcctggcccagcaccatgttcaagttagggaaggacatcacccttcagtgccgaggacccctgccaggtgttgaatttgtcctagaacatgatggagaagaagcacctcagcagttttcagaggatggagactttgtcatcaacaacgtagaaggaaaaggcattggaaactacagctgcagctaccgcctccaggcctaccctgatatctggtcagagcctagtgatcccctggagctggtgggggcagcagggcctgttgctcaggagtgcactgtagggaacattgtccgaagtagcctaatcgtggtggttgttgtagccttgggggtagtgctagccatagagtggaagaagtggcctcgactgcgaaccagaggctcagagacagacggaagagaccagaccattgcccttgaagagtgtaaccaagaaggagaaccaggcacccctgccaattctccttcatcaacctctcagagaatctctgtggaactgcccgttccaatataataatctcctcctttacaagagctttcctctcctctctcttgctctcagagacctataaatccaaccagttaccctgcaagtcagccccatctgctgttccttggtctctaatcacctgagctgggtaaaggggattctgggagttgagagctctgccagggtgagatgtttcctgaagagaggttccccacccctgtaactcctcactgtactgatttactggcgcatgaaattctattaaaaatgcattcttctgaataaaaagagtattcactatttaacttc

SEQ ID NO: 142415 - DNA, 5413 bp, Homo sapiens
  Payload ID: 8141
  Gene Symbol: IGSF1
  Gene Name: immunoglobulin superfamily, member 1
  Uniprot ID: Q8N6C5
  ENST ID: ENST00000370904
  CDS Start-End: 1145-5128
ctccctgaccccttgcgcttcccgagtgaggcaatgcctcgccctgcttcggctcgcggacggtgcgcgcacccactgacctgcgcccactgtctggcactccctagtgagatgaacccggtacctcagatggaaatgcagaaatcacccgtcttctgcgtcgctcacgctgggagctgtagatcgcagctgttcctattcggccatcttggctcctccattctgcttttaagatacaagtgatgccttcaaatttgagctcagtttcttatggtcgtttaggagcatgagggtttctgcaataatctaccagtgaaatgatgatcaagatcttggaaagcactctactggtcaagcagaatagttcctgtcatctccattaagaatcagcttattggccgggcgcagtggctcatgcctgtaatcccagcactttgggaggctgaggcgggtggatcacgaggtcaggagatcgagaccatcctgtctaacaaggaatcctttctggcactcaagagttttcaattcaatcctgatgaatgaatcattatttgataccagcctaagtgaagactctgcctggtgacttttgcaaggtggtttctggctgcaacatgggaagatttgggatcagtgagatggaagagatttttctggctactagcgttcctaagaaagagctttagtgtttatccagctattggtatgcagacaactatacccttatgagaaacactagcagagaagaagagttcttgactgggtctgggccatgaaactgaccggataaaagtgggagaagaagagatgttgaaggaggagtttgctgttttctcagtctcctgagaaattccagatatcttctttctacacacatcctggagaggggaaagaaagcctctctctgtcacccaggctggaatgcactggtgccatctccactcactgcagcttcaacctcctgggttcaagtgatcctcctgcctctcagccttccgagtagctgggactacagtttgctgcatctggaggagctcactggagaatctccaacatcggagcgggccttcaactaccatcccaccacctgctgaggagaaaaattcttcaagactcagagcacacagccagcaccagaggccccatgaccctggacagaccaggggagggggccaccatgctgaagacattcactgttttgctcttttgcattctgatggaccctcaaccagagttgtggatagagtccaactacccccaggccccttgggagaacatcacgctttggtgccgaagcccctctcggatatcaagcaagttcctgctgctgaaggataagacacagatgacctggatccgcccttcccacaagaccttccaagtttcattccttataggtgcccttactgagtccaatgcaggtctttaccggtgctgctactggaaggagacaggctggtcaaagcccagtaaagttctagagttggaggcaccaggccaactgcccaagcccatcttctggattcaggctgagacccccgctcttcctgggtgtaatgttaacatcctctgccatggctggctgcaggatttggtattcatgctgtttaaagagggatatgcagagcctgtggattaccaagtcccaactgggacaatggccatattctccattgacaacctgacacctgaggatgaaggggtttacatctgccgcactcatatccagatgctccccaccctgtggtcagagcccagcaaccccctgaagctggttgtagcaggactctaccccaaaccaactttgacagcccatcctgggcccatcatggcacctggagaaagcctgaatctcaggtgccaagggccaatctatggaatgacctttgctctaatgagggttgaagacttggagaagtccttttaccacaagaagacaataaaaaatgaggcaaatttcttcttccagtctttgaagatccaagatactggacattacctctgtttttactatgacgcatcatatagaggttcactccttagtgatgtcctgaaaatctgggtgactgacactttccccaagacctggctacttgctcggcccagtgctgtggtccaaatgggtcagaatgtgagcctacggtgtcgaggaccagtggatggagtgggtcttgcactctataagaaaggagaagacaaaccacttcaatttttggatgccaccagcatcgatgacaacacatcattcttcctcaacaatgtaacctacagtgatactggcatctatagctgccactatcttctcacctggaagacctccattaggatgccatcacacaacactgtggagcttatggttgtagataagccccccaaaccctccctgtcagcttggccaagcactgtgttcaagctaggaaaggccatcacccttcagtgccgagtatctcatccagtactggaattttctctggaatgggaagaaagagaaacattccaaaaattctcagtaaacggagacttcatcatcagtaatgttgacgggaaaggcacagggacctacagttgcagctatcgcgtagagacacatcctaacatctggtcacatcgcagtgagcccctgaagctgatggggccagcaggctatctcacctggaattacgttctgaatgaagctatcaggttgtctctaatcatgcagcttgttgccttgctgttggtagtgctgtggataaggtggaagtgtcggagactcagaatcagagaagcctggttgctgggaacagctcaaggggtcaccatgctcttcatagtcacggcccttctctgctgtggactgtgcaatggggtattgatagaagagactgaaatagtcatgccaacccctaagcctgagctgtgggcagagaccaactttcctctggccccgtggaagaacttaaccctctggtgcagaagcccttctggctcaactaaggagtttgtgttgctgaaggatgggaccgggtggatcgccactcgcccggcctcagagcaggtccgggctgccttcccccttggcgccctgacccagagccacaccgggagctaccactgccattcatgggaggagatggctgtatcggagcccagtgaggcacttgagctggtggggacagacatcctccccaaacctgtcatttctgcttcccccacaatccggggccaggaactacaactccggtgcaaaggatggctggcaggcatggggtttgctctgtataaggagggagagcaagaacctgtccagcaacttggtgctgttggaagagaagccttctttacaatccagagaatggaggataaagacgaaggcaattacagctgccgcactcacactgaaaaacgccccttcaagtggtctgagcccagtgagccgctggagcttgtcataaaagaaatgtaccctaagcccttcttcaagacatgggccagccctgtggtcacccctggtgcccgagtgactttcaattgctccaccccccaccagcatatgagctttattctttacaaagatggaagtgaaatagcatccagtgacaggtcctgggcaagtccgggggccagtgcagctcactttctaatcatttcggtgggcattggtgatggagggaattacagctgccgatattatgacttttctatctggtctgagcccagcgaccctgtggagctcgtggtgacagaattctaccccaaacccactctcctggcacagccaggtcctgtggtgtttcctgggaagagtgtgatcctgcgctgccaagggactttccagggcatgaggttcgccctcttgcaggagggagcccatgttcccttacagtttcggagtgtctcagggaactcagctgacttccttctccacactgttggagcagaggactctgggaactatagctgtatctactatgagacaaccatgtcaaacagggggtcatatctcagtatgccccttatgatctgggtgactgacacattccctaagccatggttgtttgctgagcccagttctgtggttcccatggggcagaatgttactctctggtgccgagggccggtccatggagtaggatacattctgcacaaagaaggagaagccacttcaatgcagctctggggatccaccagtaatgacggggcattccccatcaccaatatatctggtactagcatggggcgttacagctgctgctaccaccctgactggaccagttctatcaagatacaacctagcaacaccctggaactcctagtcacaggcttactccccaaacccagcctattagcccagcctggtcccatggtggcccctggcgaaaatatgactcttcagtgtcaaggggaactgccagactcaacatttgtcctgttgaaggagggggctcaggagcctttagagcaacagaggccaagtgggtacagggctgacttctggatgccagcagtgagaggtgaagactctgggatctatagctgtgtttattatttggactctactccctttgcagcttcaaatcacagtgactccctggagatctgggtgactgataagccccctaaaccctctctgtcagcctggcccagcaccatgttcaagttagggaaggacatcacccttcagtgccgaggacccctgccaggtgttgaatttgtcctagaacatgatggagaagaagcacctcagcagttttcagaggatggagactttgtcatcaacaacgtagaaggaaaaggcattggaaactacagctgcagctaccgcctccaggcctaccctgatatctggtcagagcctagtgatcccctggagctggtgggggcagcagggcctgttgctcaggagtgcactgtagggaacattgtccgaagtagcctaatcgtggtggttgttgtagccttgggggtagtgctagccatagagtggaagaagtggcctcgactgcgaaccagaggctcagagacagacggaagagaccagaccattgcccttgaagagtgtaaccaagaaggagaaccaggcacccctgccaattctccttcatcaacctctcagagaatctctgtggaactgcccgttccaatataataatctcctcctttacaagagctttcctctcctctctcttgctctcagagacctataaatccaaccagttaccctgcaagtcagccccatctgctgttccttggtctctaatcacctgagctgggtaaaggggattctgggagttgagagctctgccagggtgagatgtttcctgaagagaggttccccacccctgtaactcctcactgtactgatttactggcgcatgaaattctattaaaaatgcattcttctgaataaaaagagtattcactatttaacttc

SEQ ID NO: 142416 - DNA, 4406 bp, Homo sapiens
  Payload ID: 8141
  Gene Symbol: IGSF1
  Gene Name: immunoglobulin superfamily, member 1
  Uniprot ID: Q8N6C5
  ENST ID: ENST00000370910
  CDS Start-End: 133-4116
cagtttgctgcatctggaggagctcactggagaatctccaacatcggagcgggccttcaactaccatcccaccacctgctgaggagaaaaattcttcaagactcagagcacacagccagcaccagaggccccatgaccctggacagaccaggggagggggccaccatgctgaagacattcactgttttgctcttttgcattctgatggaccctcaaccagagttgtggatagagtccaactacccccaggccccttgggagaacatcacgctttggtgccgaagcccctctcggatatcaagcaagttcctgctgctgaaggataagacacagatgacctggatccgcccttcccacaagaccttccaagtttcattccttataggtgcccttactgagtccaatgcaggtctttaccggtgctgctactggaaggagacaggctggtcaaagcccagtaaagttctagagttggaggcaccaggccaactgcccaagcccatcttctggattcaggctgagacccccgctcttcctgggtgtaatgttaacatcctctgccatggctggctgcaggatttggtattcatgctgtttaaagagggatatgcagagcctgtggattaccaagtcccaactgggacaatggccatattctccattgacaacctgacacctgaggatgaaggggtttacatctgccgcactcatatccagatgctccccaccctgtggtcagagcccagcaaccccctgaagctggttgtagcaggactctaccccaaaccaactttgacagcccatcctgggcccatcatggcacctggagaaagcctgaatctcaggtgccaagggccaatctatggaatgacctttgctctaatgagggttgaagacttggagaagtccttttaccacaagaagacaataaaaaatgaggcaaatttcttcttccagtctttgaagatccaagatactggacattacctctgtttttactatgacgcatcatatagaggttcactccttagtgatgtcctgaaaatctgggtgactgacactttccccaagacctggctacttgctcggcccagtgctgtggtccaaatgggtcagaatgtgagcctacggtgtcgaggaccagtggatggagtgggtcttgcactctataagaaaggagaagacaaaccacttcaatttttggatgccaccagcatcgatgacaacacatcattcttcctcaacaatgtaacctacagtgatactggcatctatagctgccactatcttctcacctggaagacctccattaggatgccatcacacaacactgtggagcttatggttgtagataagccccccaaaccctccctgtcagcttggccaagcactgtgttcaagctaggaaaggccatcacccttcagtgccgagtatctcatccagtactggaattttctctggaatgggaagaaagagaaacattccaaaaattctcagtaaacggagacttcatcatcagtaatgttgacgggaaaggcacagggacctacagttgcagctatcgcgtagagacacatcctaacatctggtcacatcgcagtgagcccctgaagctgatggggccagcaggctatctcacctggaattacgttctgaatgaagctatcaggttgtctctaatcatgcagcttgttgccttgctgttggtagtgctgtggataaggtggaagtgtcggagactcagaatcagagaagcctggttgctgggaacagctcaaggggtcaccatgctcttcatagtcacggcccttctctgctgtggactgtgcaatggggtattgatagaagagactgaaatagtcatgccaacccctaagcctgagctgtgggcagagaccaactttcctctggccccgtggaagaacttaaccctctggtgcagaagcccttctggctcaactaaggagtttgtgttgctgaaggatgggaccgggtggatcgccactcgcccggcctcagagcaggtccgggctgccttcccccttggcgccctgacccagagccacaccgggagctaccactgccattcatgggaggagatggctgtatcggagcccagtgaggcacttgagctggtggggacagacatcctccccaaacctgtcatttctgcttcccccacaatccggggccaggaactacaactccggtgcaaaggatggctggcaggcatggggtttgctctgtataaggagggagagcaagaacctgtccagcaacttggtgctgttggaagagaagccttctttacaatccagagaatggaggataaagacgaaggcaattacagctgccgcactcacactgaaaaacgccccttcaagtggtctgagcccagtgagccgctggagcttgtcataaaagaaatgtaccctaagcccttcttcaagacatgggccagccctgtggtcacccctggtgcccgagtgactttcaattgctccaccccccaccagcatatgagctttattctttacaaagatggaagtgaaatagcatccagtgacaggtcctgggcaagtccgggggccagtgcagctcactttctaatcatttcggtgggcattggtgatggagggaattacagctgccgatattatgacttttctatctggtctgagcccagcgaccctgtggagctcgtggtgacagaattctaccccaaacccactctcctggcacagccaggtcctgtggtgtttcctgggaagagtgtgatcctgcgctgccaagggactttccagggcatgaggttcgccctcttgcaggagggagcccatgttcccttacagtttcggagtgtctcagggaactcagctgacttccttctccacactgttggagcagaggactctgggaactatagctgtatctactatgagacaaccatgtcaaacagggggtcatatctcagtatgccccttatgatctgggtgactgacacattccctaagccatggttgtttgctgagcccagttctgtggttcccatggggcagaatgttactctctggtgccgagggccggtccatggagtaggatacattctgcacaaagaaggagaagccacttcaatgcagctctggggatccaccagtaatgacggggcattccccatcaccaatatatctggtactagcatggggcgttacagctgctgctaccaccctgactggaccagttctatcaagatacaacctagcaacaccctggaactcctagtcacaggcttactccccaaacccagcctattagcccagcctggtcccatggtggcccctggcgaaaatatgactcttcagtgtcaaggggaactgccagactcaacatttgtcctgttgaaggagggggctcaggagcctttagagcaacagaggccaagtgggtacagggctgacttctggatgccagcagtgagaggtgaagactctgggatctatagctgtgtttattatttggactctactccctttgcagcttcaaatcacagtgactccctggagatctgggtgactgataagccccctaaaccctctctgtcagcctggcccagcaccatgttcaagttagggaaggacatcacccttcagtgccgaggacccctgccaggtgttgaatttgtcctagaacatgatggagaagaagcacctcagcagttttcagaggatggagactttgtcatcaacaacgtagaaggaaaaggcattggaaactacagctgcagctaccgcctccaggcctaccctgatatctggtcagagcctagtgatcccctggagctggtgggggcagcagggcctgttgctcaggagtgcactgtagggaacattgtccgaagtagcctaatcgtggtggttgttgtagccttgggggtagtgctagccatagagtggaagaagtggcctcgactgcgaaccagaggctcagagacagacggaagagaccagaccattgcccttgaagagtgtaaccaagaaggagaaccaggcacccctgccaattctccttcatcaacctctcagagaatctctgtggaactgcccgttccaatataataatctcctcctttacaagagctttcctctcctctctcttgctctcagagacctataaatccaaccagttaccctgcaagtcagccccatctgctgttccttggtctctaatcacctgagctgggtaaaggggattctgggagttgagagctctgccagggtgagatgtttcctgaagagaggttccccacccctgtaactcctcactgtactgatttactggcgcatgaaattctattaaaaatgcattcttctgaataaaaagagtattcactatttaacttcaaaaa

SEQ ID NO: 142417 - DNA, 11067 bp, Homo sapiens
  Payload ID: 8142
  Gene Symbol: IGSF10
  Gene Name: immunoglobulin superfamily, member 10
  Uniprot ID: Q6WRI0
  ENST ID: ENST00000282466
  CDS Start-End: 1-7872
atgaaggtaaaaggcagaggaatcacctgcttgctggtctcctttgctgtgatctgcctggtcgccacccctgggggcaaggcctgtcctcgccgctgtgcctgttatatgcctacggaggtacactgcacatttcggtacctgacttccatcccagacagcatcccgcccaatgtggaacgcatcaatttaggatacaacagcttggttagattgatggaaacagatttttctggcctgaccaaactggagttactcatgcttcacagcaatggcattcacacaatccctgacaagaccttctcagatttgcaggccttgcaggtcttaaaaatgagctataataaagtccgaaaacttcagaaagatactttttatggcctcaggagcttgacacgattgcacatggaccacaacaatattgagtttataaacccagaggttttttatgggctcaactttctccgcctggtgcacttggaaggaaatcagctcactaagctccacccagatacatttgtctctttgagctacctccagatatttaaaatctctttcattaagttcctatacttgtctgataacttcctgacctccctccctcaagagatggtctcctatatgcctgacctagacagcctttacctgcatggaaacccatggacctgtgattgccatttaaagtggttgtctgactggatacaggagaagccagatgtaataaaatgcaaaaaagatagaagtccctctagtgctcagcagtgtccactttgcatgaaccctaggacttctaaaggcaagccgttagctatggtctcagctgcagctttccagtgtgccaagccaaccattgactcatccctgaaatcaaagagcctgactattctggaagacagtagttctgctttcatctctccccaaggtttcatggcaccctttggctccctcactttgaatatgacagatcagtctggaaatgaagctaacatggtctgcagtattcaaaagccctcaaggacatcacccattgcattcactgaagaaaatgactacatcgtgctaaatacttcattttcaacatttttggtgtgcaacatagattacggtcacattcagccagtgtggcaaattttggctttgtacagtgattctcctctgatactagaaaggagccacttgcttagtgaaacaccgcagctctattacaaatataaacaggtggctcctaagcctgaagacatttttaccaacatagaggcagatctcagagcagatccctcttggttaatgcaagaccaaatttccttgcagctgaacagaactgccaccacattcagtacattacagatccagtactccagtgatgctcaaatcactttaccaagagcagagatgaggccagtgaaacacaaatggactatgatttcaagggataacaatactaagctggaacatactgtcttggtaggtggaaccgttggcctgaactgcccaggccaaggagaccccaccccacacgtggattggcttctagctgatggaagtaaagtgagagccccttatgtcagtgaggatggacggatcctaatagacaaaagtggaaaattggaactccagatggctgatagttttgacacaggcgtatatcactgtataagcagcaattatgatgatgcagatattctcacctataggataactgtggtagaacctttggtcgaagcctatcaggaaaatgggattcatcacacagttttcattggtgaaacacttgatcttccatgccattctactggtatcccagatgcctctattagctgggttattccaggaaacaatgtgctctatcagtcatcaagagacaagaaagttctaaacaatggcacattaagaatattacaggtcaccccgaaagaccaaggttattatcgctgtgtggcagccaacccatcaggggttgattttttgattttccaagtttcagtcaagatgaaaggacaaaggcccttggagcatgatggagaaacagagggatctggacttgatgagtccaatcctattgctcatcttaaggagccaccaggtgcacaactccgtacatctgctctgatggaggctgaggttggaaaacacacctcaagcacaagtaagaggcacaactatcgggaattaacactccagcgacgtggagattcaacacatcgacgttttagggagaataggaggcatttccctccctctgctaggagaattgacccacaacattgggcggcactgttggagaaagctaaaaagaatgctatgccagacaagcgagaaaataccacagtgagcccacccccagtggtcacccaactcccaaacatacctggtgaagaagacgattcctcaggcatgctcgctctacatgaggaatttatggtcccggccactaaagctttgaaccttccagcaaggacagtgactgctgactccagaacaatatctgatagtcctatgacaaacataaattatggcacagaattctctcctgttgtgaattcacaaatactaccacctgaagaacccacagatttcaaactgtctactgctattaaaactacagccatgtcaaagaatataaacccaaccatgtcaagccaaatacaaggcacaaccaatcaacattcatccactgtctttccactgctacttggagcaactgaatttcaggactctgaccagatgggaagaggaagagagcatttccaaagtagacccccaataacagtaaggactatgatcaaagatgtcaatgtcaaaatgcttagtagcaccaccaacaaactattattagagtcagtaaataccacaaatagtcatcagacatctgtaagagaagtgagtgaacccaggcacaatcacttctattctcacactactcaaatacttagcacctccacgttcccttcagatccacacacagctgctcattctcagtttccgatccctagaaatagtacagttaacatcccgctgttcagacgctttgggaggcagaggaaaattggcggaagggggcggattatcagcccatatagaactccagttctgcgacggcatagatacagcattttcaggtcaacaaccagaggttcttctgaaaaaagcactactgcattctcagccacagtgctcaatgtgacatgtctgtcctgtcttcccagggagaggctcaccactgccacagcagcattgtcttttccaagtgctgctcccatcaccttccccaaagctgacattgctagagtcccatcagaagagtctacaactctagtccagaatccactattactacttgagaacaaacccagtgtagagaaaacaacacccacaataaaatatttcaggactgaaatttcccaagtgactccaactggtgcagtcatgacatatgctccaacatccatacccatggaaaaaactcacaaagtaaacgccagttacccacgtgtgtctagcaccaatgaagctaaaagagattcagtgattacatcgtcactttcaggtgctatcaccaagccaccaatgactattatagccattacaaggttttcaagaaggaaaattccctggcaacagaactttgtaaataaccataacccaaaaggcagattaaggaatcaacataaagttagtttacaaaaaagcacagctgtgatgcttcctaaaacatctcctgctttacccagagacaaagtctcccctttccatttcaccacactttcaacaagtgtgatgcaaattccatctaataccttgactaccgctcaccacactacgaccaaaacacacaatcctggaagtcttccaacaaagaaggagcttcccttcccaccccttaaccctatgcttcctagtattataagcaaagactcaagtacaaaaagcatcatatcaacgcaaacagcaataccagcaacaactcctaccttccctgcatctgtcatcacttatgaaacccaaacagagagatctagagcacaaacaatacaaagagaacaggagcctcaaaagaagaacaggactgacccaaacatctctccagaccagagttctggcttcactacacccactgctatgacacctcctgttctaaccacagccgaaacttcagtcaagcccagtgtctctgcattcactcattccccaccagaaaacacaactgggatttcaagcacaatcagttttcattcaagaactcttaatctgacagatgtgattgaagaactagcccaagcaagtactcagactttgaagagcacaattgcttctgaaacaactttgtccagcaaatcacaccagagtaccacaactaggaaagcaatcattagacactcaaccataccaccattcttgagcagcagtgctactctaatgccagttcccatctcccctccctttactcagagagcagttactgacaacgtggcgactcccatttccgggcttatgacaaatacagtggtcaagctgcacgaatcctcaaggcacaatgctaaaccacagcaattagtagcagaggttgcaacatcccccaaggttcacccaaatgccaagttcacaattggaaccactcacttcatctactctaatctgttacattctactcccatgccagcactaacaacagttaaatcacagaattctaaattaactccatctccctgggcagaaaaccaattttggcacaaaccatactcagaaattgctgaaaaaggcaaaaagccagaagtaagcatgttggctactacaggcctgtccgaggccaccactcttgtttcagattgggatggacagaagaacacaaagaagagtgactttgataagaaaccagttcaagaagcaacaacttccaaactccttccctttgactctttgtctaggtatatatttgaaaagcccaggatagttggaggaaaagctgcaagttttactattccagctaactcagatgcctttcttccctgtgaagctgttggaaatcccctgcccaccattcattggaccagagtcccatcaggacttgatttatctaagaggaaacagaatagcagggtccaggttctccccaatggtaccctgtccatccagagggtggaaattcaggaccgcggacagtacttgtgttccgcatccaatctgtttggcacagaccaccttcatgtcaccttgtctgtggtttcctatcctcccaggatcctggagagacgtaccaaagagatcacagttcattccggaagcactgtggaactgaagtgcagagcagaaggtaggccaagccctacagttacctggattcttgcaaaccaaacagttgtctcagaatcatcccagggaagtaggcaggctgtggtgacggttgacggaacattggtcctccacaatctcagtatttatgaccgtggcttttacaaatgtgtggccagcaacccaggtggccaggattcactgctggttaaaatacaagtcattgcagcaccacctgttattctagagcaaaggaggcaagtcattgtaggcacttggggtgaaagtttaaaactgccctgtactgcaaaaggaactcctcagcccagcgtttactgggtcctctctgatggcactgaagtgaaaccattacagtttaccaattccaagttgttcttattttcaaatgggactttgtatataagaaacctagcctcttcagacaggggcacttatgaatgcattgctaccagttccactggttcggagcgaagagtagtaatgcttacaatggaagagcgagtgaccagccccaggatagaagctgcatcccagaaaaggactgaagtgaattttggggacaaattactactgaactgctcagccactggggagcccaaaccccaaataatgtggaggttaccatccaaggctgtggtcgaccagcagcatagagtgggcagctggatccacgtctaccctaatggatccctgtttattggatcagtaacagaaaaagacagtggtgtctacttgtgtgtggcaagaaacaaaatgggggatgatctgatactgatgcatgttagcctaagactgaaacctgccaaaattgaccacaagcagtattttagaaagcaagtgctccatgggaaagatttccaagtagattgcaaagcttccggctccccagtgccagagatatcttggagtttgcctgatggaaccatgatcaacaatgcaatgcaagccgatgacagtggccacaggactaggagatatacccttttcaacaatggaactttatacttcaacaaagttggggtagcggaggaaggagattatacttgctatgcccagaacaccctagggaaagatgaaatgaaggtccacttaacagttataacagctgctccccggataaggcagagtaacaaaaccaacaagagaatcaaagctggagacacagctgtccttgactgtgaggtcactggggatcccaaaccaaaaatattttggttgctgccttccaatgacatgatttccttctccattgataggtacacatttcatgccaatgggtctttgaccatcaacaaagtgaaactgctcgattctggagagtacgtatgtgtagcccgaaatcccagtggggatgacaccaaaatgtacaaactggatgtggtctctaaacctccattaatcaatggtctgtatacaaacagaactgttattaaagccacagctgtgagacattccaaaaaacactttgactgcagagctgaagggacaccatctcctgaagtcatgtggatcatgccagacaatattttcctcacagccccatactatggaagcagaatcacagtccataaaaatggaaccttggaaattaggaatgtgaggctttcagattcagccgactttatctgtgtggcccgaaatgaaggtggagagagcgtgttggtagtacagttagaagtactggaaatgctgagaagaccgacatttagaaatccatttaatgaaaaaatagttgcccagctgggaaagtccacagcattgaattgctctgttgatggtaacccaccacctgaaataatctggattttaccaaatggcacacgattttccaatggaccacaaagttatcagtatctgatagcaagcaatggttcttttatcatttctaaaacaactcgggaggatgcaggaaaatatcgctgtgcagctaggaataaagttggctatattgagaaattagtcatattagaaattggccagaagccagttattcttacctatgcaccagggacagtaaaaggcatcagtggagaatctctatcactgcattgtgtgtctgatggaatccctaagccaaatatcaaatggactatgccaagtggttatgtagtagacaggcctcaaattaatgggaaatacatattgcatgacaatggcaccttagtcattaaagaagcaacagcttatgacagaggaaactatatctgtaaggctcaaaatagtgttggtcatacactgattactgttccagtaatgattgtagcctaccctccccgaattacaaatcgtccacccaggagtattgtcaccaggacaggggcagcctttcagctccactgtgtggccttgggagttcccaagccagaaatcacatgggagatgcctgaccactcccttctctcaacggcaagtaaagagaggacacatggaagtgagcagcttcacttacaaggtaccctagtcattcagaatccccaaacctccgattctgggatatacaaatgcacagcaaagaacccacttggtagtgattatgcagcaacgtatattcaagtaatctgacatgaaataataaagtcaacaacatctgggcagaatttattttttggaagaagtttaatcaaaggcagccataggcatgtaaatgaatttgaatacatttacagtattaaatttacaatgaacatgcaaaataaaaggacttgtaaataaatgcattatgaactgatgatactgatttatttaatggatctcaaaacaaacttttaacttaaggcacttttattttgccaacaaataacaataaacaaacattgaaacggttcactataaaataacaaatggctaatgtacctgaatttttcagtaaaaaaatgaacttctaataccagttgcctagtgtccacctcctatcaatgttacaagcatggcactcagaacagagacaatggaaaatattaaatctgcaatctttatgatgtaaatttaccatcctgatgtataaatattttgtggtttataaatttttttgctaaaacctacagaaaataagcactgaactgtcttatgattcaccatttgttcacactgaaaattttcattgatggggaatacaaaaatgttttaataactgcatttaaaaataaatgcaggctcacttttccacatgtaaaaagcaatgtaatacctgcacatcataaaatgtgaaaagggggttatttttgtccaaatacacccattaaaaaggttttaaaaatacaatgaaacttctttataactttaaaatctagctcaggcacccctggtttggagctgtttataaggaaatttttctgagcaggaatcgttgctctataagcatttcatttcattaattctttatgggatgggaaaatgcttgggagggtctaggtctattatatataatgaagtttcactgtatttaaaatctgatcaatcctacacaaaatgtgtttttgtaattcactgaatttatattacatgcttaattcaacctgaattaatttggggaatattaaatgattgatcttatctaaatctaggggtggggttttccagtgtaatttctccagcatctattcaaacattcacctagtacttacttaagaattataggagctttataaatgggaaaaaaatgccataggtcttagatatctcagtgcacaaaaccgagaattactaataagttagcccctgccaatcatttgagacatgtggaatagcgcccttgggttttcatcacactgactttcagttagccccatctcagcctaaaatgtgacctggttgcaacttatgtctgatgttagtaccctgtggctggaagtggtcaaagctacgcattgatctcctctacttccaggccaagaagggtaaatgcaatgactgacaaatgcaaccctattaagaaaaagcctacagtgtaaacaagagagtctatgggcttcttatatccaagaactgtgattgattgataggtatagctgactccatttgatttcaaggtcttgtctttaaggggagctggggtctcgctccatcttattctaaggtaatttcctctggtaaggtaaagtaccaggttctgccacagggctttaccttgtgaccatcttaatgcaaaagaatgcatttgcaagaaaagaaaaaaaaaaaaaaaaaaaagaaacctctcaagatacagaattaacagggagaaaatctgaagactaaagtaattctagttattttctttataatgcgcaggggtaaaacagcattcctcaactttcaatagaatcgtggaattaattagagtcgtagcataacttcctcacctaaaaaaagaaaaaagatatgccccacagctttcatgtgcaaaatgattaataatttaactcacctctgcaaagtataaagtgcatacaaatgctatgcaattataacactcattcttaaaacagtattactgttgtttgcaatgctgagctacaaaatatatggttcaaactgaactggcaaagaaatttggaaagaaataatgatggaacatgactcactcactaggcacaacattcacatttcggttgatttgccaatgcagtcattatatagatatattactttgaagaaaacaacttcattagcttatctaagtatgtttcttgagaggaaaaaatctgatatacaaaaccagcaaaaatgtgtacagatagatgatacatcttctgaaagcagatagactattaatttagtgaaaagaatagtttttaatgttttggcaaagtcttttccagcccagagtaaacacaaaatgggcaggctggagtgaaatattttcacagtgtacaaagcagttcacatggatgttgccacagcaaagtaagctgacatgtatttgaggtcatttgcatgagtcaaactttgcaatgagtaactcacccaggaagatataaattatttatagataatgatttgcaaaagaaaatgtctactaaagttgtactagctacattttaaaaaaagtagatttacatggtctgctcattatagacaagtctattcacagtatgcttgactatattatatgtaaaatcatatggcaaaagaaaatgaaataacagagaacatgggaaaatatcccccacatatgttttaaaatgccctgcaattttcacattcaaaattttatgcatctaaatctaaaaaaatattatatagaatactcttaagttacacaaactgataatttactggtttcttttttactctaataggagcaaattaccacatacttgaacaaagttaaaatagttactatttctttataataaatttgatgtataatttacttgtgctttttgcaccaatttataaatacagtatatgcaatacacaaccaagactgacactgacagtaataattaaattcaaaagagcaaatacttaccatacaaaataaacagcaaatacaccttttatgaaaaccagagccttctggactttggggccagattctctggaaaccatgtcaagtgtgagcactggaatctcaagccagctactggatttttttttccccttaaggtggcataaggttcaggagaaccaaaactggcaataaatagttggacgattccactgcagttctttcaggcctttaggatttacatgttgtaccttcacaatgactctcatcaatgatcttgcctcaaaacaaatttgagtacagctacttctaacaggtttccgcac

SEQ ID NO: 142418 - DNA, 524 bp, Homo sapiens
  Payload ID: 8142
  Gene Symbol: IGSF10
  Gene Name: immunoglobulin superfamily, member 10
  ENST ID: ENST00000489791
  CDS Start-End: 1-261
acaatggaagagcgagtgaccagccccaggatagaagctgcatcccagaaaaggactgaagtgaattttggggacaaattactactgaactgctcagccactggggagcccaaaccccaaataatgtggaggttaccatccaaggctgtggtcgaccagcagcataggattctggatttttacttctcagaggcagaagccatgccatgctcctgctgtaaccacaagaccgaatacccagcttactactgtcaggtataactaatcaacatggtataaccacttctccaggaaataccattgtttgctgaattaaacacagacacacacacacacacacaaacaaaaacaaaaatgtatttactgtagttcccagctacttggaaggctgaggtggaaagatcacttgagcctaagagtctgagactgcagtgagccatgatcacattgctgcaccccagcctggctgacaagattgagcctctgtctctaaaataaattaaaattaaaattctgataatgta

SEQ ID NO: 142419 - DNA, 3206 bp, Homo sapiens
  Payload ID: 8143
  Gene Symbol: IGSF11
  Gene Name: immunoglobulin superfamily, member 11
  Uniprot ID: Q5DX21
  ENST ID: ENST00000354673
  CDS Start-End: 30-1322
ttctcaccttcctcaggcaagaagaataaatgtctctggtggaacttttgctctggtggaactgcttttctagaactggtgttgcagcatccctggaagtgtcagagagccctgggagtatccaggtggcccggggtcagccagcagtcctgccctgcactttcactaccagcgctgccctcattaacctcaatgtcatttggatggtcactcctctctccaatgccaaccaacctgaacaggtcatcctgtatcagggtggacagatgtttgatggtgccccccggttccacggtagggtaggatttacaggcaccatgccagctaccaatgtctctatcttcattaataacactcagttatcagacactggcacctaccagtgcctggtcaacaaccttccagacatagggggcaggaacattggggtcaccggtctcacagtgttagttcccccttctgccccacactgccaaatccaaggatcccaggatattggcagcgatgtcatcctgctctgtagctcagaggaaggcattcctcgaccaacttacctttgggagaagttagacaataccctcaaactacctccaacagctactcaggaccaggtccagggaacagtcaccatccggaacatcagtgccctgtcttcaggtttgtaccagtgcgtggcttctaatgctattggaaccagcacctgtcttctggatctccaggttatttcaccccagcccaggaacattggactaatagctggagccattggcactggtgcagttattatcattttttgcattgcactaattttaggggcattcttttactggagaagcaaaaataaagaggaggaagaagaagaaattcctaatgaaataagagaggatgatcttccacccaagtgttcttctgccaaagcatttcacactgagatttcctcctcggacaacaacacactaacctcttccaatgcctacaacagtcgatactggagcaacaatccaaaagttcatagaaacacagagtcagtcagccacttcagtgacttgggccaatctttctctttccactcaggcaatgccaacataccatccatttatgctaatgggacccatctggtcccgggtcaacataagactctggtagtgacagccaacagagggtcatcaccacaggtgatgtccaggagcaatggctcagtcagtaggaagcctcggcctccacacactcattcctacaccatcagccacgcaacactggaacgaattggtgcagtacctgtcatggtaccagcccagagtcgggccgggtccttggtataggacatgaggaaatgttgtgttcagaaatgaataaatggaatgccctcatacaagggggagggtggggtggggagtgctgggaaagaaacacttccttataattatattagtaaaatgcacaaagaagaaggcagtgctgttacttggccactaagatgtgtaaaatggactgaaatgctccatcatgaagacttgcttccccaccaaagatgtcctgggattctgctggatctcaaagatgtgccaagccaaggaaaaagatacaagagcagaatagtacttaaaatccaaactgccgcccagatgggcttgttcttcatgcctaacttaataatttttaagagattaaagtgccagatggagtttaaatattgaaattattttaaaaggtaggtgtctttaagaaaataacaagcaaccctgtgatatgttccgtctctcccaattccctcgttatatagagggcttaatggtataaatggttaatattggtcccaacagggctgactcttctatcatataatcaaaactttttacatgagcaaaattcagtaagaaatgggggaagacaaaggaaacgtctttgagaagccccttcatatttatttatttatctcttcctgaaccatgaatttcatatgtggaatattgctatattgacagattcttgcctgtctgtgttattctaggatctgttacaggtccatggcaattactgtttattttttcctggaaaaatatttttttataaaaggcttttttttttttttaaatacatgagaggcattgggctaagaaagaaaagactgttgtataataccttgttcaatggttgtatttagtgagctcatagaggtccatcatatcatgaccgagctaggttgtgtgggcaggaaggtagggctaaggggttgtagccttgctgggcagcctctcagagcaaggttgttcagatctcccttgctattacagtaggttactattaatgagggcagcacctgatgccttttgtactgaggtatgtaactttctccttatttgacaagtagaagttaacttacttgtcagggagggcagacgtttttttgttctgtttcgtttttcaaaataatgctttttgcaaaagaggtaagactgagactaaaggtgttatcttctggtgtgctcctggaagtgtctaccctacatttgtgtcagctcagggttgcagtgttgcccagatgcattttacatcactgtaaagagattacttttgtggttactacctggcttggctggccttgcggttcaccagattaatttacaaactcccccactttattttgtgctatgtagatctggccatacttgcattagtgactgtcttgccttaaccacacttaagcaacccacaaatttcttctcagatttgtttcctagattacttatgatactcatcccatgtctcaataagagtgtcttttctttctggatgtgttctcttactccctcttaccaccatactttttgctctcttctcctgcaagcgtagtcttcacagggagtggcttcctgacatttttttcagttatgtgaatgaatggaaaccaacagctgctgcaaacactgtttttccaagaaggctacactcagaacctaaccattgccaaccatttcagtattgataaaaagctgaatttactttagcattacttatttttttttccatttgatggttcttactttgtaaaaatttaaataaatgaatgtctatactttttataaagaaaagtgaaaataccatgacactgaaaagatgatgctatcagatgctgtttagaaagcatttatcttgcatttctttattctttctaattatctaaaattcaataaaattttattcat

SEQ ID NO: 142420 - DNA, 3495 bp, Homo sapiens
  Payload ID: 8143
  Gene Symbol: IGSF11
  Gene Name: immunoglobulin superfamily, member 11
  Uniprot ID: Q5DX21
  ENST ID: ENST00000393775
  CDS Start-End: 307-1602
agttggggggagtggctccccggactgcgcgaggggtcggctagtcctggggcagggctgggtggcacggctggcgagcccggaacgcctctggtcacagctcagcgtccgcggagccgggcggcgctgcagctgcacttggctcgtctgtgggtctgacagtcccagctctgcgcggggaacagcggcccggcgctgggtgtgggaggaccaggctgccccaagagcgcggagactcacgcccgctcctctcctgttgcgaccgggagccgggtaggaggcaggcgcgctccctgcggccccgggatgacttctcagcgttcccctctggcgcctttgctgctcctctctctgcacggtgttgcagcatccctggaagtgtcagagagccctgggagtatccaggtggcccggggtcagccagcagtcctgccctgcactttcactaccagcgctgccctcattaacctcaatgtcatttggatggtcactcctctctccaatgccaaccaacctgaacaggtcatcctgtatcagggtggacagatgtttgatggtgccccccggttccacggtagggtaggatttacaggcaccatgccagctaccaatgtctctatcttcattaataacactcagttatcagacactggcacctaccagtgcctggtcaacaaccttccagacatagggggcaggaacattggggtcaccggtctcacagtgttagttcccccttctgccccacactgccaaatccaaggatcccaggatattggcagcgatgtcatcctgctctgtagctcagaggaaggcattcctcgaccaacttacctttgggagaagttagacaataccctcaaactacctccaacagctactcaggaccaggtccagggaacagtcaccatccggaacatcagtgccctgtcttcaggtttgtaccagtgcgtggcttctaatgctattggaaccagcacctgtcttctggatctccaggttatttcaccccagcccaggaacattggactaatagctggagccattggcactggtgcagttattatcattttttgcattgcactaattttaggggcattcttttactggagaagcaaaaataaagaggaggaagaagaagaaattcctaatgaaataagagaggatgatcttccacccaagtgttcttctgccaaagcatttcacactgagatttcctcctcggacaacaacacactaacctcttccaatgcctacaacagtcgatactggagcaacaatccaaaagttcatagaaacacagagtcagtcagccacttcagtgacttgggccaatctttctctttccactcaggcaatgccaacataccatccatttatgctaatgggacccatctggtcccgggtcaacataagactctggtagtgacagccaacagagggtcatcaccacaggtgatgtccaggagcaatggctcagtcagtaggaagcctcggcctccacacactcattcctacaccatcagccacgcaacactggaacgaattggtgcagtacctgtcatggtaccagcccagagtcgggccgggtccttggtataggacatgaggaaatgttgtgttcagaaatgaataaatggaatgccctcatacaagggggagggtggggtggggagtgctgggaaagaaacacttccttataattatattagtaaaatgcacaaagaagaaggcagtgctgttacttggccactaagatgtgtaaaatggactgaaatgctccatcatgaagacttgcttccccaccaaagatgtcctgggattctgctggatctcaaagatgtgccaagccaaggaaaaagatacaagagcagaatagtacttaaaatccaaactgccgcccagatgggcttgttcttcatgcctaacttaataatttttaagagattaaagtgccagatggagtttaaatattgaaattattttaaaaggtaggtgtctttaagaaaataacaagcaaccctgtgatatgttccgtctctcccaattccctcgttatatagagggcttaatggtataaatggttaatattggtcccaacagggctgactcttctatcatataatcaaaactttttacatgagcaaaattcagtaagaaatgggggaagacaaaggaaacgtctttgagaagccccttcatatttatttatttatctcttcctgaaccatgaatttcatatgtggaatattgctatattgacagattcttgcctgtctgtgttattctaggatctgttacaggtccatggcaattactgtttattttttcctggaaaaatatttttttataaaaggcttttttttttttttaaatacatgagaggcattgggctaagaaagaaaagactgttgtataataccttgttcaatggttgtatttagtgagctcatagaggtccatcatatcatgaccgagctaggttgtgtgggcaggaaggtagggctaaggggttgtagccttgctgggcagcctctcagagcaaggttgttcagatctcccttgctattacagtaggttactattaatgagggcagcacctgatgccttttgtactgaggtatgtaactttctccttatttgacaagtagaagttaacttacttgtcagggagggcagacgtttttttgttctgtttcgtttttcaaaataatgctttttgcaaaagaggtaagactgagactaaaggtgttatcttctggtgtgctcctggaagtgtctaccctacatttgtgtcagctcagggttgcagtgttgcccagatgcattttacatcactgtaaagagattacttttgtggttactacctggcttggctggccttgcggttcaccagattaatttacaaactcccccactttattttgtgctatgtagatctggccatacttgcattagtgactgtcttgccttaaccacacttaagcaacccacaaatttcttctcagatttgtttcctagattacttatgatactcatcccatgtctcaataagagtgtcttttctttctggatgtgttctcttactccctcttaccaccatactttttgctctcttctcctgcaagcgtagtcttcacagggagtggcttcctgacatttttttcagttatgtgaatgaatggaaaccaacagctgctgcaaacactgtttttccaagaaggctacactcagaacctaaccattgccaaccatttcagtattgataaaaagctgaatttactttagcattacttatttttttttccatttgatggttcttactttgtaaaaatttaaataaatgaatgtctatactttttataaagaaaagtgaaaataccatgacactgaaaagatgatgctatcagatgctgtttagaaagcatttatcttgcatttctttattctttctaattatctaaaattcaataaaattttattcatataaaataa

SEQ ID NO: 142421 - DNA, 1952 bp, Homo sapiens
  Payload ID: 8143
  Gene Symbol: IGSF11
  Gene Name: immunoglobulin superfamily, member 11
  Uniprot ID: Q5DX21
  ENST ID: ENST00000441144
  CDS Start-End: 366-1586
aagtggagggacggcagtcagctgaccctgcagtgtgcaggcgagcgcagggagtacgccatgtcctgagaaggggcgattctcaggctctggcagttacagcttctcctcaccctgccgagcaaccaggccacggggctccgtgcatcgccacctagagtgttaccctcttccttgttcacagaggttctccgcagtgtgtgagaaagaggccctctctcagatgaatggataaagaaaatgcaggacatatggtgggaggagccaagatggccgaataggaacagctccggtctacagctcccagtgtgagcgacacagaagacaggtgatttctgcatttccatctgaggcaagaagaataaatgtctctggtggaacttttgctctggtggaactgcttttctagaactggtgttgcagcatccctggaagtgtcagagagccctgggagtatccaggtggcccggggtcagccagcagtcctgccctgcactttcactaccagcgctgccctcattaacctcaatgtcatttggatggtcactcctctctccaatgccaaccaacctgaacaggtcatcctgtatcagggtggacagatgtttgatggtgccccccggttccacggtagggtaggatttacaggcaccatgccagctaccaatgtctctatcttcattaataacactcagttatcagacactggcacctaccagtgcctggtcaacaaccttccagacatagggggcaggaacattggggtcaccggtctcacagtgttagttcccccttctgccccacactgccaaatccaaggatcccaggatattggcagcgatgtcatcctgctctgtagctcagaggaaggcattcctcgaccaacttacctttgggagaagttagacaataccctcaaactacctccaacagctactcaggaccaggtccagggaacagtcaccatccggaacatcagtgccctgtcttcagcccagcccaggaacattggactaatagctggagccattggcactggtgcagttattatcattttttgcattgcactaattttaggggcattcttttactggagaagcaaaaataaagaggaggaagaagaagaaattcctaatgaaataagagaggatgatcttccacccaagtgttcttctgccaaagcatttcacactgagatttcctcctcggacaacaacacactaacctcttccaatgcctacaacagtcgatactggagcaacaatccaaaagttcatagaaacacagagtcagtcagccacttcagtgacttgggccaatctttctctttccactcaggcaatgccaacataccatccatttatgctaatgggacccatctggtcccgggtcaacataagactctggtagtgacagccaacagagggtcatcaccacaggtgatgtccaggagcaatggctcagtcagtaggaagcctcggcctccacacactcattcctacaccatcagccacgcaacactggaacgaattggtgcagtacctgtcatggtaccagcccagagtcgggccgggtccttggtataggacatgaggaaatgttgtgttcagaaatgaataaatggaatgccctcatacaagggggagggtggggtggggagtgctgggaaagaaacacttccttataattatattagtaaaatgcacaaagaagaaggcagtgctgttacttggccactaagatgtgtaaaatggactgaaatgctccatcatgaagacttgcttccccaccaaagatgtcctgggattctgctggatctcaaagatgtgccaagccaaggaaaaagatacaagagcagaatagtacttaaaatccaaactgccgcccagatgggcttgttcttcatgcctaacttaataatttttaagagattaaagtgccagatggagttt

SEQ ID NO: 142422 - DNA, 3525 bp, Homo sapiens
  Payload ID: 8143
  Gene Symbol: IGSF11
  Gene Name: immunoglobulin superfamily, member 11
  Uniprot ID: Q5DX21
  ENST ID: ENST00000425327
  CDS Start-End: 270-1562
gtgcgtcagggagagtggccgtcccgctgttgtaagtggagggacggcagtcagctgaccctgcagtgtgcaggcgagcgcagggagtacgccatgtcctgagaaggggcgattctcaggctctggcagttacagcttctcctcaccctgccgagcaaccaggccacggggctccgtgcatcgccacctagagtgttaccctcttccttgttcacagaggttctccgcagtgtgtgagaaagaggccctctctcaggcaagaagaataaatgtctctggtggaacttttgctctggtggaactgcttttctagaactggtgttgcagcatccctggaagtgtcagagagccctgggagtatccaggtggcccggggtcagccagcagtcctgccctgcactttcactaccagcgctgccctcattaacctcaatgtcatttggatggtcactcctctctccaatgccaaccaacctgaacaggtcatcctgtatcagggtggacagatgtttgatggtgccccccggttccacggtagggtaggatttacaggcaccatgccagctaccaatgtctctatcttcattaataacactcagttatcagacactggcacctaccagtgcctggtcaacaaccttccagacatagggggcaggaacattggggtcaccggtctcacagtgttagttcccccttctgccccacactgccaaatccaaggatcccaggatattggcagcgatgtcatcctgctctgtagctcagaggaaggcattcctcgaccaacttacctttgggagaagttagacaataccctcaaactacctccaacagctactcaggaccaggtccagggaacagtcaccatccggaacatcagtgccctgtcttcaggtttgtaccagtgcgtggcttctaatgctattggaaccagcacctgtcttctggatctccaggttatttcaccccagcccaggaacattggactaatagctggagccattggcactggtgcagttattatcattttttgcattgcactaattttaggggcattcttttactggagaagcaaaaataaagaggaggaagaagaagaaattcctaatgaaataagagaggatgatcttccacccaagtgttcttctgccaaagcatttcacactgagatttcctcctcggacaacaacacactaacctcttccaatgcctacaacagtcgatactggagcaacaatccaaaagttcatagaaacacagagtcagtcagccacttcagtgacttgggccaatctttctctttccactcaggcaatgccaacataccatccatttatgctaatgggacccatctggtcccgggtcaacataagactctggtagtgacagccaacagagggtcatcaccacaggtgatgtccaggagcaatggctcagtcagtaggaagcctcggcctccacacactcattcctacaccatcagccacgcaacactggaacgaattggtgcagtacctgtcatggtaccagcccagagtcgggccgggtccttggtataggacatgaggaaatgttgtgttcagaaatgaataaatggaatgccctcatacaagggggagggtggggtggggagtgctgggaaagaaacacttccttataattatattagtaaaatgcacaaagaagaaggcagtgctgttacttggccactaagatgtgtaaaatggactgaaatgctccatcatgaagacttgcttccccaccaaagatgtcctgggattctgctggatctcaaagatgtgccaagccaaggaaaaagatacaagagcagaatagtacttaaaatccaaactgccgcccagatgggcttgttcttcatgcctaacttaataatttttaagagattaaagtgccagatggagtttaaatattgaaattattttaaaaggtaggtgtctttaagaaaataacaagcaaccctgtgatatgttccgtctctcccaattccctcgttatatagagggcttaatggtataaatggttaatattggtcccaacagggctgactcttctatcatataatcaaaactttttacatgagcaaaattcagtaagaaatgggggaagacaaaggaaacgtctttgagaagccccttcatatttatttatttatctcttcctgaaccatgaatttcatatgtggaatattgctatattgacagattcttgcctgtctgtgttattctaggatctgttacaggtccatggcaattactgtttattttttcctggaaaaatatttttttataaaaggcttttttttttttttaaatacatgagaggcattgggctaagaaagaaaagactgttgtataataccttgttcaatggttgtatttagtgagctcatagaggtccatcatatcatgaccgagctaggttgtgtgggcaggaaggtagggctaaggggttgtagccttgctgggcagcctctcagagcaaggttgttcagatctcccttgctattacagtaggttactattaatgagggcagcacctgatgccttttgtactgaggtatgtaactttctccttatttgacaagtagaagttaacttacttgtcagggagggcagacgtttttttgttctgtttcgtttttcaaaataatgctttttgcaaaagaggtaagactgagactaaaggtgttatcttctggtgtgctcctggaagtgtctaccctacatttgtgtcagctcagggttgcagtgttgcccagatgcattttacatcactgtaaagagattacttttgtggttactacctggcttggctggccttgcggttcaccagattaatttacaaactcccccactttattttgtgctatgtagatctggccatacttgcattagtgactgtcttgccttaaccacacttaagcaacccacaaatttcttctcagatttgtttcctagattacttatgatactcatcccatgtctcaataagagtgtcttttctttctggatgtgttctcttactccctcttaccaccatactttttgctctcttctcctgcaagcgtagtcttcacagggagtggcttcctgacatttttttcagttatgtgaatgaatggaaaccaacagctgctgcaaacactgtttttccaagaaggctacactcagaacctaaccattgccaaccatttcagtattgataaaaagctgaatttactttagcattacttatttttttttccatttgatggttcttactttgtaaaaatttaaataaatgaatgtctatactttttataaagaaaagtgaaaataccatgacactgaaaagatgatgctatcagatgctgtttagaaagcatttatcttgcatttctttattctttctaattatctaaaattcaataaaattttattcatataaaataagttgtcattaattatcaatactaacgagtatgtcattttaaaacttagtattctctttaatgttacaaga

SEQ ID NO: 142423 - DNA, 1487 bp, Homo sapiens
  Payload ID: 8143
  Gene Symbol: IGSF11
  Gene Name: immunoglobulin superfamily, member 11
  ENST ID: ENST00000491903
  CDS Start-End: 147-1358
agtcccagctctgcgcggggaacagcggcccggcgctgggtgtgggaggaccaggctgccccaagagcgcggagactcacgcccgctcctctcctgttgcgaccgggagccgggtaggaggcaggcgcgctccctgcggccccgggatgacttctcagcgttcccctctggcgcctttgctgctcctctctctgcacggtgttgcagcatccctggaagtgtcagagagccctgggagtatccaggtggcccggggtcagccagcagtcctgccctgcactttcactaccagcgctgccctcattaacctcaatgtcatttggatggtcactcctctctccaatgccaaccaacctgaacaggtcatcctgtatcagggtggacagatgtttgatggtgccccccggttccacggtagggtaggatttacaggcaccatgccagctaccaatgtctctatcttcattaataacactcagttatcagacactggcacctaccagtgcctggtcaacaaccttccagacatagggggcaggaacattggggtcaccggtctcacagtgttagttcccccttctgccccacactgccaaatccaaggatcccaggatattggcagcgatgtcatcctgctctgtagctcagaggaaggcattcctcgaccaacttacctttgggagaagttagacaataccctcaaactacctccaacagctactcaggaccaggtccagggaacagtcaccatccggaacatcagtgccctgtcttcaggtttgtaccagtgcgtggcttctaatgctattggaaccagcacctgtcttctggatctccaggttatttcacgggcattcttttactggagaagcaaaaataaagaggaggaagaagaagaaattcctaatgaaataagagaggatgatcttccacccaagtgttcttctgccaaagcatttcacactgagatttcctcctcggacaacaacacactaacctcttccaatgcctacaacagtcgatactggagcaacaatccaaaagttcatagaaacacagagtcagtcagccacttcagtgacttgggccaatctttctctttccactcaggcaatgccaacataccatccatttatgctaatgggacccatctggtcccgggtcaacataagactctggtagtgacagccaacagagggtcatcaccacaggtgatgtccaggagcaatggctcagtcagtaggaagcctcggcctccacacactcattcctacaccatcagccacgcaacactggaacgaattggtgcagtacctgtcatggtaccagcccagagtcgggccgggtccttggtataggacatgaggaaatgttgtgttcagaaatgaataaatggaatgccctcatacaagggggagggtggggtggggagtgctgggaaagaaacacttccttataattatattagtaaaatgcacaaagaagaa

SEQ ID NO: 142424 - DNA, 738 bp, Homo sapiens
  Payload ID: 8143
  Gene Symbol: IGSF11
  Gene Name: immunoglobulin superfamily, member 11
  ENST ID: ENST00000480431
  CDS Start-End: 641-738
ggagaccaagcggggcgagtgggcggcgcggcgaggagccgagctgcggctggagtagcggggcgtgagttggggggagtggctccccggactgcgcgaggggtcggctagtcctggggcagggctgggtggcacggctggcgagcccggaacgcctctggtcacagctcagcgtccgcggagccgggcggcgctgcagctgcacttggctcgtctgtgggtctgacagtcccagctctgcgcggggaacagcggcccggcgctgggtgtgggaggaccaggctgccccaagagcgcggagactcacgcccgctcctctcctgttgcgaccgggagccgggtaggaggcaggcgcgctccctgcggccccgggatgacttctcagcgttcccctctggcgcctttgctgctcctctctctgcacggtggctaaagcaatcctagtgagacaatggcatgagtaatagtaacagaggagttaagcagttgtgattttctgctccaataatagaatggtgttgcagcatccctggaagtgtcagagagccctgggagtatccaggtggcccggggtcagccagcagtcctgccctgcactttcactaccagcgctgccctcattaacctcaatgtcatttggatggtcactcctctctccaatgccaaccaacctgaacaggtcatcctgtatcagggtggacagatgtttgatggtgccccccggttccacggtagggt

SEQ ID NO: 142425 - DNA, 864 bp, Homo sapiens
  Payload ID: 8143
  Gene Symbol: IGSF11
  Gene Name: immunoglobulin superfamily, member 11
  ENST ID: ENST00000483401
  CDS Start-End: 687-864
aggggcagaagaagtgagcctagaaggatggacttgctgaacttctgtttatcctccaagatgtgattagtcttcatagaactccatagaagttcaggaagcaaggagcaatttgactttagcagcagtgtggaggatggattggaagtggaccggaggagatcagttgaggctgtcgtggttgttaaagatcatctctacacatatttgagggccagtgtccttaactgtgtcttgtatatttgagaagccgtatgccataatgtattctggagcacacttcttagatttgaatctcagctagcccacttacacacttagacccagaaagaagagggcagcacacctcagggccagcaggaggaaggggagtcatccaggacatgtactctcaactggcggttgggaagaagacagaaagagatagacatgtgggtcgaagtctttactggggtccgtcgtgttacccaagtggctaaagcaatcctagtgagacaatggcatgagtaatagtaacagaggagttaagcagttgtgattttctgctccaataatagaatggtgttgcagcatccctggaagtgtcagagagccctgggagtatccaggtggcccggggtcagccagcagtcctgccctgcactttcactaccagcgctgccctcattaacctcaatgtcatttggatggtcactcctctctccaatgccaaccaacctgaacaggtcatcctgtatcagggtggacagatgtttgatggtgccccccggttccacggtagggtaggatttacaggcaccatgccagctaccaatgtctctatcttcattaataacactcagttatcagacactggcacctacc

SEQ ID NO: 142426 - DNA, 3320 bp, Homo sapiens
  Payload ID: 8143
  Gene Symbol: IGSF11
  Gene Name: immunoglobulin superfamily, member 11
  ENST ID: ENST00000489689
  CDS Start-End: 211-1434
acagctcagcgtccgcggagccgggcggcgctgcagctgcacttggctcgtctgtgggtctgacagtcccagctctgcgcggggaacagcggcccggcgctgggtgtgggaggaccaggctgccccaagagcgcggagactcacgcccgctcctctcctgttgcgaccgggagccgggtaggaggcaggcgcgctccctgcggccccgggatgacttctcagcgttcccctctggcgcctttgctgctcctctctctgcacggtgttgcagcatccctggaagtgtcagagagccctgggagtatccaggtggcccggggtcagccagcagtcctgccctgcactttcactaccagcgctgccctcattaacctcaatgtcatttggatggtcactcctctctccaatgccaaccaacctgaacaggtcatcctgtatcagggtggacagatgtttgatggtgccccccggttccacggtagggtaggatttacaggcaccatgccagctaccaatgtctctatcttcattaataacactcagttatcagacactggcacctaccagtgcctggtcaacaaccttccagacatagggggcaggaacattggggtcaccggtctcacagtgttagttcccccttctgccccacactgccaaatccaaggatcccaggatattggcagcgatgtcatcctgctctgtagctcagaggaaggcattcctcgaccaacttacctttgggagaagttagacaataccctcaaactacctccaacagctactcaggaccaggtccagggaacagtcaccatccggaacatcagtgccctgtcttcagcccagcccaggaacattggactaatagctggagccattggcactggtgcagttattatcattttttgcattgcactaattttaggggcattcttttactggagaagcaaaaataaagaggaggaagaagaagaaattcctaatgaaataagagaggatgatcttccacccaagtgttcttctgccaaagcatttcacactgagatttcctcctcggacaacaacacactaacctcttccaatgcctacaacagtcgatactggagcaacaatccaaaagttcatagaaacacagagtcagtcagccacttcagtgacttgggccaatctttctctttccactcaggcaatgccaacataccatccatttatgctaatgggacccatctggtcccgggtcaacataagactctggtagtgacagccaacagagggtcatcaccacaggtgatgtccaggagcaatggctcagtcagtaggaagcctcggcctccacacactcattcctacaccatcagccacgcaacactggaacgaattggtgcagtacctgtcatggtaccagcccagagtcgggccgggtccttggtataggacatgaggaaatgttgtgttcagaaatgaataaatggaatgccctcatacaagggggagggtggggtggggagtgctgggaaagaaacacttccttataattatattagtaaaatgcacaaagaagaaggcagtgctgttacttggccactaagatgtgtaaaatggactgaaatgctccatcatgaagacttgcttccccaccaaagatgtcctgggattctgctggatctcaaagatgtgccaagccaaggaaaaagatacaagagcagaatagtacttaaaatccaaactgccgcccagatgggcttgttcttcatgcctaacttaataatttttaagagattaaagtgccagatggagtttaaatattgaaattattttaaaaggtaggtgtctttaagaaaataacaagcaaccctgtgatatgttccgtctctcccaattccctcgttatatagagggcttaatggtataaatggttaatattggtcccaacagggctgactcttctatcatataatcaaaactttttacatgagcaaaattcagtaagaaatgggggaagacaaaggaaacgtctttgagaagccccttcatatttatttatttatctcttcctgaaccatgaatttcatatgtggaatattgctatattgacagattcttgcctgtctgtgttattctaggatctgttacaggtccatggcaattactgtttattttttcctggaaaaatatttttttataaaaggcttttttttttttttaaatacatgagaggcattgggctaagaaagaaaagactgttgtataataccttgttcaatggttgtatttagtgagctcatagaggtccatcatatcatgaccgagctaggttgtgtgggcaggaaggtagggctaaggggttgtagccttgctgggcagcctctcagagcaaggttgttcagatctcccttgctattacagtaggttactattaatgagggcagcacctgatgccttttgtactgaggtatgtaactttctccttatttgacaagtagaagttaacttacttgtcagggagggcagacgtttttttgttctgtttcgtttttcaaaataatgctttttgcaaaagaggtaagactgagactaaaggtgttatcttctggtgtgctcctggaagtgtctaccctacatttgtgtcagctcagggttgcagtgttgcccagatgcattttacatcactgtaaagagattacttttgtggttactacctggcttggctggccttgcggttcaccagattaatttacaaactcccccactttattttgtgctatgtagatctggccatacttgcattagtgactgtcttgccttaaccacacttaagcaacccacaaatttcttctcagatttgtttcctagattacttatgatactcatcccatgtctcaataagagtgtcttttctttctggatgtgttctcttactccctcttaccaccatactttttgctctcttctcctgcaagcgtagtcttcacagggagtggcttcctgacatttttttcagttatgtgaatgaatggaaaccaacagctgctgcaaacactgtttttccaagaaggctacactcagaacctaaccattgccaaccatttcagtattgataaaaagctgaatttactttagcattacttatttttttttccatttgatggttcttactttgtaaaaatttaaataaatgaatgtctatactttttataaagaaaagtgaaaataccatgacactgaaaagatgatgctatcagatgctgtttagaaagcatttatcttgcatttctttattctttctaattatctaaaattcaataaaattttattcatat

SEQ ID NO: 142427 - DNA, 3935 bp, Homo sapiens
  Payload ID: 8144
  Gene Symbol: IGSF22
  Gene Name: immunoglobulin superfamily, member 22
  Uniprot ID: Q8N9C0
  ENST ID: ENST00000319338
  CDS Start-End: 191-2902
agggggccagacatttaaggaacagatgacactggtagcctcactgttggggcaaaggaagaaggagacgggccaccctacagtccaggcactagctgagcctccaaagccgtggacacagcattcgagtgttgggagggactggtcagtgctgaagtctcacaggtgagtgcccacgcctgctgtcaccatgacaaccattcacagccggcagatgctgcaggagcacgtgtccatggagttctccagctccaccacccacgtgcagaccttctcccagacaaccaagatcgtgggagaggaggtcgtgaggaggaagtcctcgagcatagtggagttcttcagcttagtgacccggagctcaaacatccctgcgggcgacagcgtccctgagttcgtggagaagcctcaaccggtcaccgcgcccgagggggacaaagccgtgttccgagcccgggtgcaggggaacgccaaaccccacatctcctggaagagggagagcggcatccccatcaaggagtccgccaagatattctacgacagcattaacaaggaacacgtgctgaagctggagccactgacttcggatgactctgacaactataagtgcattgcaagcaatgaccatgcagatgccatctataccgtatctctgctggtaacagaaggtcaagagaaaatggacttcaaaaagatgctgaagaagagggcaccccctgctcccaagaagaagcagaagaaggtggcaaatgagaaagagatgctggagattttgtccaaagtgcccaagaaagactttgagaaggtgtgcatggagtatggtttcaccgactttcgggggctgctcaggaagctcaaagagatgaagaagaaagtagaggtggaggccatccggattctgaagcccctggaagacaaagagaccaaggttgacaccacagtggtctttgactgcataatggaactgaaagaccccaatgtcaagatgatatggatcaagggtactgagccactgaggatccagtactccctgggcaagtacgatgtgaagcagatgggcaccaagtacatgctggttattagcaacgtgaacatgaacgatgctggcatctacagcctgtccgtgggcgataagcggatgagtgcagagctcacagtgctggatgagccactgaagttcctgggagagatgaagcctgtgaaggtgacagagcgccagacagctgtgtttgagatccgcctctccaagaaagagcccaactttgtgtggaagttcaatgggaaggagctgaagagggatgacaagtatgaaatcacggtgtccgaagatggtctgacgcacacgcttaagattaaggatgccagactcagtgacagcggcgagttctctgctgaggcggggaacctggtacaaaaggcccagctcactgttgaccgcatccccatcaagtttgtgagcaacctcaaaaatgtacgtgtgaaagagaggagtcgcgcatgcctggagtgtgagctgacatccaaggatgtgacactgcgctggaagaaggatgggcagctgctgatgcatggcactaagtacagcatgaaccatgagggcaagcgagcagagctgatcattgaggatgcacagctcagtgatggtggcgagtacactgtggtggccatgcaggatggagaccctactgaatactacagtactgccatcgtcactgtggaggagcgtctggccacagtgaagagcgggatgtccgacgtgcacgcggccactgggagcccagctgagttgtgtgtagtgctgaatgacgagaaggtggagggtgtgtggctgaaggatggcaaggagatcacggacttgccaggcatgcagattgtgaagcagggtgcagtgcacaagctcatctttcccagtatgggccctgagcacgagggcaagtacacattccgggccaagggcacggaaagtgaagcctctgtattcatcgcagatcctcctaccatcgacccgtcagtactggaggcactggctgcgcacgccatcactgtgaaggtaggccacacggcccacatcaaggtccccttccggggaaaaccactgcccaaagtgacatggtacaaggatggcatggaagtgacggaggaggaacgcgtgtccatggagcgcggggaagaccaggcactgctcaccatctccaactgtgtgcgtgaagacagcggcctcatcctgctcaagctcaagaatgaccacggctcagccacggccactctgcaccttagtgtgctggagcctcctggttttgcctcccagcctcaagtgactgatgtgactaaagaagccgtgaccatcacgtggaatgcccctacccaggatgggggagccccagtgctcggctacattgtagaacgaaggaagaaaggcagcaacctgtgggtgccagtcaacaaggaccccatccagggcaccaagtgcactgtggatggtctcctggaggacacagaatatgaattccgagttatagctgtaaataaggcaggccctggacagcccagtgtgccatccagctcagtagtggccaaggatcctgttaaacccccaggcctggtccaggacctgcatgtatctgattcctccaactccagcatttccctggcctggcgggagcctgcagagggagacccaccctctggctacatccttgagatgagggctgaagacacaaaggagtggtccaagtgcacaaagatccccatctcaggcacctgctacacagtgggaggactcatcgagaggcagaaatacttcttccgaatccgggctgtgaatgaggctggggttggggagcctgtggagctagacaagggggtccgtgccatgccaccaccagggctcaccaccacctgacgtgatctggcagaaagatggcgttcccaccaagggccgagagacaattaccaagagcaaaaaccactcccagttcctcattaatagcaccaagcgctctgactcaggggtgtaccgaatcttgcttcagaatgagtttggagaagcacgctatgacatccatgtgcgcgtggcagatttccctcggccccccacaaacctacggttgtttgaggaagtccccaacacagtgactctgacctggaaccacagcccagatgtgcaggaggacggtgaggctcactacatcatcatgaagcgggatgcaagcacagccacctggtacacggcagccgagcgtgtcttcagcaacaagtacacagtgacggggctgctcccaggcaggaagtactacttcagagtggtggctcggaatgaaatcggtgacagtgagccacttgactccagggacacctggctcatcaataaggaccagatccaggacctgagcgccaagctcaagccctacgagaagaaggactggcgccacgcgccgcgcttcgtgacgcccctcaagccacacacggtgctccgcggccaggactgcaccatgacctgcgccttccttgggaacccgcggcccacagtgaccctctacaagggcgacgtcaacatcacggccaactccaagttctggtacaactccaccagcggcgtgtgcaccctcgtcatccccacctgcacgctcaaggacagcggcgattacagcgtgctggtggagaacgagctgggcaaggaccgcagcagctgcacgctcaccgtctatgacaaagatgataagtcagttgtagcatccatcaccgagagtctgcagaagaaatcaaagcacctcatgtgagctccagccaagcccaggcatcaggaggctgttatgatgtggagtttcttggcctgtcctctgcatggcccagtgtaggaagcccagtttgctctctggtgtttgttaatgtaaacattcagtgaagggatggggcaataaacgtaactcatcctt

SEQ ID NO: 142428 - DNA, 4284 bp, Homo sapiens
  Payload ID: 8144
  Gene Symbol: IGSF22
  Gene Name: immunoglobulin superfamily, member 22
  Uniprot ID: Q8N9C0
  ENST ID: ENST00000513874
  CDS Start-End: 141-4121
ggcaaaggaagaaggagacgggccaccctacagtccaggcactagctgagcctccaaagccgtggacacagcattcgagtgttgggagggactggtcagtgctgaagtctcacaggtgagtgcccacgcctgctgtcaccatgacaaccattcacagccggcagatgctgcaggagcacgtgtccatggagttctccagctccaccacccacgtgcagaccttctcccagacaaccaagatcgtgggagaggaggtcgtgaggaggaagtcctcgagcatagtggagttcttcagcttagtgacccggagctcaaacatccctgcgggcgacagcgtccctgagttcgtggagaagcctcaaccggtcaccgcgcccgagggggacaaagccgtgttccgagcccgggtgcaggggaacgccaaaccccacatctcctggaagagggagagcggcatccccatcaaggagtccgccaagatattctacgacagcattaacaaggaacacgtgctgaagctggagccactgacttcggatgactctgacaactataagtgcattgcaagcaatgaccatgcagatgccatctataccgtatctctgctggtaacagaaggtcaagagaaaatggacttcaaaaagatgctgaagaagagggcaccccctgctcccaagaagaagcagaagaaggtggcaaatgagaaagagatgctggagattttgtccaaagtgcccaagaaagactttgagaaggtgtgcatggagtatggtttcaccgactttcgggggctgctcaggaagctcaaagagatgaagaagaaagtagaggtggaggccatccggattctgaagcccctggaagacaaagagaccaaggttgacaccacagtggtctttgactgcataatggaactgaaagaccccaatgtcaagatgatatggatcaagggtactgagccactgaggatccagtactccctgggcaagtacgatgtgaagcagatgggcaccaagtacatgctggttattagcaacgtgaacatgaacgatgctggcatctacagcctgtccgtgggcgataagcggatgagtgcagagctcacagtgctggatgagccactgaagttcctgggagagatgaagcctgtgaaggtgacagagcgccagacagctgtgtttgagatccgcctctccaagaaagagcccaactttgtgtggaagttcaatgggaaggagctgaagagggatgacaagtatgaaatcacggtgtccgaagatggtctgacgcacacgcttaagattaaggatgccagactcagtgacagcggcgagttctctgctgaggcggggaacctggtacaaaaggcccagctcactgttgaccgcatccccatcaagtttgtgagcaacctcaaaaatgtacgtgtgaaagagaggagtcgcgcatgcctggagtgtgagctgacatccaaggatgtgacactgcgctggaagaaggatgggcagctgctgatgcatggcactaagtacagcatgaaccatgagggcaagcgagcagagctgatcattgaggatgcacagctcagtgatggtggcgagtacactgtggtggccatgcaggatggagaccctactgaatactacagtactgccatcgtcactgtggaggagcgtctggccacagtgaagagcgggatgtccgacgtgcacgcggccactgggagcccagctgagttgtgtgtagtgctgaatgacgagaaggtggagggtgtgtggctgaaggatggcaaggagatcacggacttgccaggcatgcagattgtgaagcagggtgcagtgcacaagctcatctttcccagtatgggccctgagcacgagggcaagtacacattccgggccaagggcacggaaagtgaagcctctgtattcatcgcagatcctcctaccatcgacccgtcagtactggaggcactggctgcgcacgccatcactgtgaaggtaggccacacggcccacatcaaggtccccttccggggaaaaccactgcccaaagtgacatggtacaaggatggcatggaagtgacggaggaggaacgcgtgtccatggagcgcggggaagaccaggcactgctcaccatctccaactgtgtgcgtgaagacagcggcctcatcctgctcaagctcaagaatgaccacggctcagccacggccactctgcaccttagtgtgctggaccgtccaaagcctccacagggccgggtggagttcctggagctctcaggtagttgtgtgcacatgaagtggaaggccccaaaggacaatggtggacgacctgtgacacagttcatagtggaacggagggcagttggcaagaagtcctggattaagataggcgaggtggacggcaaagtcaccaacttctccaccaacaaggtggaagagggaaaagcctaccagttccgtatcctggcagtcaattcagaaggtgtgagtgacccactggagacagaagaagtgtttgcaggaaatcccatagagcctcctggttttgcctcccagcctcaagtgactgatgtgactaaagaagccgtgaccatcacgtggaatgcccctacccaggatgggggagccccagtgctcggctacattgtagaacgaaggaagaaaggcagcaacctgtgggtgccagtcaacaaggaccccatccagggcaccaagtgcactgtggatggtctcctggaggacacagaatatgaattccgagttatagctgtaaataaggcaggccctggacagcccagtgtgccatccagctcagtagtggccaaggatcctgttaaacccccaggcctggtccaggacctgcatgtatctgattcctccaactccagcatttccctggcctggcgggagcctgcagagggagacccaccctctggctacatccttgagatgagggctgaagacacaaaggagtggtccaagtgcacaaagatccccatctcaggcacctgctacacagtgggaggactcatcgagaggcagaaatacttcttccgaatccgggctgtgaatgaggctggggttggggagcctgtggagctagacaagggggtccgtgccatgccaccaccagctgcacccaagtttgacctcagtgcccggctgaagagtcacatggtggttcgcgctgggacagccctctgcatccatgcagccttctctggctcaccaccacctgacgtgatctggcagaaagatggcgttcccaccaagggccgagagacaattaccaagagcaaaaaccactcccagttcctcattaatagcaccaagcgctctgactcaggggtgtaccgaatcttgcttcagaatgagtttggagaagcacgctatgacatccatgtgcgcgtggcagatttccctcggccccccacaaacctacggttgtttgaggaagtccccaacacagtgactctgacctggaaccacagcccagatgtgcaggaggacggtgaggctcactacatcatcatgaagcgggatgcaagcacagccacctggtacacggcagccgagcgtgtcttcagcaacaagtacacagtgacggggctgctcccaggcaggaagtactacttcagagtggtggctcggaatgaaatcggtgacagtgagccacttgactccagggacacctggctcatcaataaggaccagatccaggacctgagcgccaagctcaagccctacgagaagaaggactggcgccacgcgccgcgcttcgtgacgcccctcaagccacacacggtgctccgcggccaggactgcaccatgacctgcgccttccttgggaacccgcggcccacagtgaccctctacaagggcgacgtcaacatcacggccaactccaagttctggtacaactccaccagcggcgtgtgcaccctcgtcatccccacctgcacgctcaaggacagcggcgattacagcgtgctggtggagaacgagctgggcaaggaccgcagcagctgcacgctcaccgtctatgacaaagatgataagtcagttgtagcatccatcaccgagagtctgcagaagaaatcaaagcacctcatgtgagctccagccaagcccaggcatcaggaggctgttatgatgtggagtttcttggcctgtcctctgcatggcccagtgtaggaagcccagtttgctctctggtgtttgttaatgtaaacattcagtgaagggatggggcaataaacgtaactcatcctttcccgtt

SEQ ID NO: 142429 - DNA, 989 bp, Homo sapiens
  Payload ID: 8145
  Gene Symbol: IGSF23
  Gene Name: immunoglobulin superfamily, member 23
  Uniprot ID: A1L1A6
  ENST ID: ENST00000402988
  CDS Start-End: 17-595
attgtacggtgagagaatgagagcaaaacctcagagcccccttcccaggaaccctgtcccagcctggtccccacccaccaccaccactgacccgatgctagagaaggatgcggctggaggtgacttcccagccaacttggtcctccaactaatgccactgaagacattcccagctgctatccggggagtcatccagagtgagctcaactattctgtgatcctgcagtgggtggtgacaatggaccctgagcctgtgctgagctggaccttcagtggggtgccctgtgggatgggagagaagctgttcatccgacggttgtcctgtgagcagctgggcacctacatgtgcatagccacaaacagcaagaaacagctggtctctgagcctgtaaccatctcgctgccaaaacccatcatgcagcccacagaagcagagcccatggagccagaccccactctgtccctgtcaggaggctctgccatcgggctccttgcggctgggatcctgggagccggggcactgattgcaggcatgtgtttcatcatcatccagagcctaaggactgacaggcagagaataggaatatgcagctgaaatgtgggcaactctcctgtcagctgaagagatgggtgctttgtacctctctatccacgtggaaaaaaaaacccatcccatagcttccaagtctacaacatctctgttcaagggaacaacccaacgtaaccagactccctttgccctgtttctgaaacacctgaagaaaacatctgatgggttgactcggtgccatccttggtcccatcgccgtgacacgttgtgcaagcaaagcatcagaggctcatccctgtctgtgggagctcagtgctcagaaaacaggggggaggttttaccttggaaattggccagaccccaaaatatgtcttttacacatgctgctttttttttctctttttcaaaaagaaccaaaaaataaattaaaacaccacca

SEQ ID NO: 142430 - DNA, 473 bp, Homo sapiens
  Payload ID: 8145
  Gene Symbol: IGSF23
  Gene Name: immunoglobulin superfamily, member 23
  ENST ID: ENST00000441389
  CDS Start-End: 1-415
ccggggagtcatccagagtgagctcaactattctgtgatcctgcagtgggtggtgacaatggaccctgagcctgtgctgagctggaccttcagtggggtgccctgtgggatgggagagaagctgttcatccgacggttgtcctgtgagcagctgggcacctacatgtgcatagccacaaacagcaagaaacagctggtctctgagcctgtaaccatctcgctgccaaaacccatcatgcagcccacagaagcagagcccatggagccagaccccactctgtccctgtcaggaggctctgccatcgggctccttgcggctgggatcctgggagccggggcactgattgcaggcatgtgtttcatcatcatccagagcctaaggactgacaggcagagaataggaatatgcagctgaaatgtgggcaactctcctgtcagctgaagaggtaataccaggaagggtgtgaaggaaa

SEQ ID NO: 142431 - DNA, 704 bp, Homo sapiens
  Payload ID: 8145
  Gene Symbol: IGSF23
  Gene Name: immunoglobulin superfamily, member 23
  ENST ID: ENST00000428245
  CDS Start-End: 1-637
gaggggtcctctggacgtcagctccagccacacccctacctggaggaagctgcttttaacaggcgccctgctcacatcctgcacctgctctgccttctcagagctgcccttctcggcacagctgaacaccttgaccgaaggagccagtgtccatcttcctgtccccggaaggcttgaagacagcctccaactaatgccactgaagacattcccagctgctatccggggagtcatccagagtgagctcaactattctgtgatcctgcagtgggtggtgacaatggaccctgagcctgtgctgagctggaccttcagtggggtgccctgtgggatgggagagaagctgttcatccgacggttgtcctgtgagcagctgggcacctacatgtgcatagccacaaacagcaagaaacagctggtctctgagcctgtaaccatctcgctgccaaaacccatcatgcagcccacagaagcagagcccatggagccagaccccactctgtccctgtcaggaggctctgccatcgggctccttgcggctgggatcctgggagccggggcactgattgcaggcatgtgtttcatcatcatccagagcctaaggactgacaggcagagaataggaatatgcagctgaaatgtgggcaactctcctgtcagctgaagagatgggtgctttgtacctctctatccacgtggaaaaa

SEQ ID NO: 142432 - DNA, 285 bp, Homo sapiens
  Payload ID: 8145
  Gene Symbol: IGSF23
  Gene Name: immunoglobulin superfamily, member 23
  ENST ID: ENST00000592507
  CDS Start-End: 87-285
ggggaagtggccagggtagggcatggtcatcgtgagcagggtcctgcagggtgaggccggggctgcagacgcgactgtacaggtctatgaagaccccatgtgtgatgaggagaccttctctgcacagtccctggacagaacacgagatgaggggtcctctggacgtcagctccagccacacccctacctggaggaagctgcttttaacagacagcctccaactaatgccactgaagacattcccagctgctatccggggagtcatccagagtgagctcaactatt

SEQ ID NO: 142433 - DNA, 3842 bp, Homo sapiens
  Payload ID: 8146
  Gene Symbol: IGSF3
  Gene Name: immunoglobulin superfamily, member 3
  Uniprot ID: O75054
  ENST ID: ENST00000318837
  CDS Start-End: 106-3750
ttccaaaactgttctctggagctataagtggattgccagaaatgagagattaggagctgggagaagaggaagcgccttgtgttgtgtctcctggaggctgccgacatgaagtgctttttcccggtgctgagctgtctggctgtgctgggtgtggtgtcagcacagcggcaggtcaccgttcaggaaggacccttgtaccgcacggagggctcccacatcactatctggtgcaatgtgagtggctaccagggaccttctgagcagaatttccagtggtccatttacctgccttcgtcgccagagcgagaggtgcagatcgtcagcaccatggactcttccttcccctatgccatctacacccagcgcgtccgcggagggaagatcttcatagaaagagtccaggggaactcaaccctattgcacatcacagatcttcaggcccgggatgccggggagtatgaatgccacacacccagcactgataagcaatactttgggagttacagtgcaaagatgaacctagtggtgatcccagactccctgcagaccactgccatgccccagactctgcacagagtggagcaggacccgctggagctcacttgtgaggtggcctcagagaccattcagcacagccacctgtctgtggcctggctccggcagaaagttggcgagaagcccgtggaggtcatctccctgagccgagatttcatgcttcactccagcagcgaatatgcccagaggcagagcctgggggaggtgcggctggacaagctggggaggaccaccttccgcctcaccatcttccacctgcagccttctgaccagggcgaattctactgcgaggccgccgagtggatccaggatccggatgggtcgtggtatgctatgacccgaaagcgttccgagggagccgtggtcaacgtccagccaactgacaaagaattcactgttcggctggagacagagaagcggctgcacacggtgggcgagccggtggagttcagatgcatcctggaggctcagaatgttcccgaccgttactttgctgtctcctgggccttcaacagctcgctcatcgccaccatgggtcctaacgctgtgcctgtcctcaacagcgaatttgctcaccgggaagccaggggacagcttaaggtggccaaagagagcgacagtgtctttgtgctgaagatctaccacctccgccaggaagatagcgggaaatacaactgccgggtgactgagcgagagaaaaccgtgaccggggaattcattgataaggagagcaagcgtcccaagaacatccccatcatagtcctccccctcacagataactgggtagttaaagtcccccagcaccaccagctcctgtcccaaggccacttggagagcagcatctccgtggaggtggccagcaatgccagcgtcatccttgagggcgaggacctgcgcttctcctgcagtgtccgcacggcaggcaggccgcagggtcgcttctctgtcatctggcagcttgtggacaggcagaaccgccgcagcaatatcatgtggctagaccgggatggcaccgtgcagccaggctcgtcctactgggagcgcagcagctttgggggcgtccagatggagcaggtgcagcccaactcgttcagcctgggcatcttcaacagcaggaaggaggacgagggccagtatgaatgccatgtgactgaatgggtgcgggcagtggatggcgagtggcagattgttggggagcgccgggccagcactcccatctccatcacagctcttgaaatgggcttcgcagtcacagccatctcccggacaccgggggtgacctacagcgactcctttgacttgcagtgtatcatcaaaccccactaccctgcctgggtccccgtgtcggtgacatggcggttccagccggtgggcacggtggagttccatgacttggtgaccttcacccgggacggaggggtccagtggggggacaggtcctccagcttccgaacccgaactgccatcgagaaggctgagtccagcaacaacgtccgcctaagcatcagccgagccagtgacacggaagcaggcaagtaccagtgtgtggcagagctgtggcggaagaactacaacaacacctggacgcgactggcggagaggacctccaacctgctggagatcagggtgctgcagccagtgacaaagctgcaggtgagcaaatcgaagaggaccctcaccctggtggaaaacaagcccattcagttgaactgctcagtcaagtctcagactagccagaactcccactttgcggtgctctggtatgtccacaagccctcggatgccgatggcaagcttatcctgaagaccacccacaactccgcctttgaatacggtacttacgccgaggaggagggcctgagagccaggctccagtttgagaggcatgtgtcggggggcctgttcagcctcaccgtccagagagccgaggtcagcgacagcggcagctactactgccacgtggaggagtggctgctgagccccaactacgcctggtacaagctggcagaggaggtttctgggcgcacagaagtcactgtgaaacagccagacagccgcctgaggctcagccaagcccaggggaacctgtcggttctggagacccggcaggtacagctggagtgtgtggttctcaaccgcaccagcataacctcccagctcatggtggaatggtttgtatggaagcccaaccaccctgagcgggagactgtggcccgcttgagccgtgacgccaccttccactatggagagcaggcagccaagaacaatctgaaggggcggctgcatttggagagtccttcccccggcgtgtaccgtctcttcatccagaacgtggctgtgcaggacagcgggacctacagctgccatgtggaggagtggctgcccagccccagtggcatgtggtataagcgggcagaggacaccgctgggcagacagctctgacagtcatgcgaccagatgcttccctgcaggtggacacagtggtccccaatgccacggtctctgagaaggcagctttccagctggactgtagcatcgtgtcccgctccagccaggactcccgcttcgctgtggcctggtattccctgaggactaaagctggggggaaaaggagcagccctggcctggaagaacaggaagaggaaagggaggaggaggaggaggaggacgacgacgacgacgacgacccaacagagcggacggccctgctgagcgtgggcccagatgctgtctttggcccagagggcagtccttgggagggcaggcttcgcttccagaggctctccccggtgctctaccggctcacagtgctgcaggcaagcccccaagatacaggcaattactcctgccatgtggaggagtggctgcccagccctcagaaggaatggtaccggctgacggaggaggagtcagcccccatcggcatccgtgttctagatacaagtcccaccctccagtccatcatctgctccaacgacgcactcttctacttcgtcttcttctaccctttccccatctttggcattcttatcatcaccatccttctggtgcgtttcaagagccggaactccagcaagaactctgatgggaagaatggggtgcctctgctgtggatcaaagagccacacctcaactactcccctacttgcctggagccccctgttctcagtatccatccaggggccatagactaagcgggtgatgccccagcggatgttggccacggaggagctgaggctctccctttctctgtgattggacagttgacagcacccaaactctgggg

SEQ ID NO: 142434 - DNA, 7326 bp, Homo sapiens
  Payload ID: 8146
  Gene Symbol: IGSF3
  Gene Name: immunoglobulin superfamily, member 3
  Uniprot ID: O75054
  ENST ID: ENST00000369483
  CDS Start-End: 769-4413
gcggggactcgggaggggccgcagcgcggctgctggtgccgttgcgggagaagaggaagcggcgcgtcccctgaggcgtgcgcctggatggactgaaggacggtccgacgcgcgcggagggagagggccaggggcgagaaatctgctcgcgctggggtaccgcttcagggctgccgaacgccaacttgcttcgtgtgccctaggcaggcgtggggcaggtggcgcctccgtgacctaccaccatggatggaaacggactttttggtgaagaaacccaaacggttgatgccaggcagggtgatttggccgtcaaaggttttgacgaaacctgccctgttctctctggggaatccgaatgagggagatcacagacaccttcactgagaagccaaggacatttctgtataatcagtggatgaaaggattttctcagacccttttttccgtgcttctggaggattaatccactacagtctgcaatttcagtggaaactgcaaggcacacgatgtggcaggagccgggagcgacttccgaattgttgtggacccttcctgtagcataggggagttttcacacttgcctccactcctccccttccccccaactccctccttctgatctcttctttttaatctgttcccattttccgagttaagttctatttccaaaactgttctctggagctataagtggattgccagaaatgagagattaggagctgggagaagaggaagcgccttgtgttgtgtctcctggaggctgccgacatgaagtgctttttcccggtgctgagctgtctggctgtgctgggtgtggtgtcagcacagcggcaggtcaccgttcaggaaggacccttgtaccgcacggagggctcccacatcactatctggtgcaatgtgagtggctaccagggaccttctgagcagaatttccagtggtccatttacctgccttcgtcgccagagcgagaggtgcagatcgtcagcaccatggactcttccttcccctatgccatctacacccagcgcgtccgcggagggaagatcttcatagaaagagtccaggggaactcaaccctattgcacatcacagatcttcaggcccgggatgccggggagtatgaatgccacacacccagcactgataagcaatactttgggagttacagtgcaaagatgaacctagtggtgatcccagactccctgcagaccactgccatgccccagactctgcacagagtggagcaggacccgctggagctcacttgtgaggtggcctcagagaccattcagcacagccacctgtctgtggcctggctccggcagaaagttggcgagaagcccgtggaggtcatctccctgagccgagatttcatgcttcactccagcagcgaatatgcccagaggcagagcctgggggaggtgcggctggacaagctggggaggaccaccttccgcctcaccatcttccacctgcagccttctgaccagggcgaattctactgcgaggccgccgagtggatccaggatccggatgggtcgtggtatgctatgacccgaaagcgttccgagggagccgtggtcaacgtccagccaactgacaaagaattcactgttcggctggagacagagaagcggctgcacacggtgggcgagccggtggagttcagatgcatcctggaggctcagaatgttcccgaccgttactttgctgtctcctgggccttcaacagctcgctcatcgccaccatgggtcctaacgctgtgcctgtcctcaacagcgaatttgctcaccgggaagccaggggacagcttaaggtggccaaagagagcgacagtgtctttgtgctgaagatctaccacctccgccaggaagatagcgggaaatacaactgccgggtgactgagcgagagaaaaccgtgaccggggaattcattgataaggagagcaagcgtcccaagaacatccccatcatagtcctccccctcacagataactgggtagttaaagtcccccagcaccaccagctcctgtcccaaggccacttggagagcagcatctccgtggaggtggccagcaatgccagcgtcatccttgagggcgaggacctgcgcttctcctgcagtgtccgcacggcaggcaggccgcagggtcgcttctctgtcatctggcagcttgtggacaggcagaaccgccgcagcaatatcatgtggctagaccgggatggcaccgtgcagccaggctcgtcctactgggagcgcagcagctttgggggcgtccagatggagcaggtgcagcccaactcgttcagcctgggcatcttcaacagcaggaaggaggacgagggccagtatgaatgccatgtgactgaatgggtgcgggcagtggatggcgagtggcagattgttggggagcgccgggccagcactcccatctccatcacagctcttgaaatgggcttcgcagtcacagccatctcccggacaccgggggtgacctacagcgactcctttgacttgcagtgtatcatcaaaccccactaccctgcctgggtccccgtgtcggtgacatggcggttccagccggtgggcacggtggagttccatgacttggtgaccttcacccgggacggaggggtccagtggggggacaggtcctccagcttccgaacccgaactgccatcgagaaggctgagtccagcaacaacgtccgcctaagcatcagccgagccagtgacacggaagcaggcaagtaccagtgtgtggcagagctgtggcggaagaactacaacaacacctggacgcgactggcggagaggacctccaacctgctggagatcagggtgctgcagccagtgacaaagctgcaggtgagcaaatcgaagaggaccctcaccctggtggaaaacaagcccattcagttgaactgctcagtcaagtctcagactagccagaactcccactttgcggtgctctggtatgtccacaagccctcggatgccgatggcaagcttatcctgaagaccacccacaactccgcctttgaatacggtacttacgccgaggaggagggcctgagagccaggctccagtttgagaggcatgtgtcggggggcctgttcagcctcaccgtccagagagccgaggtcagcgacagcggcagctactactgccacgtggaggagtggctgctgagccccaactacgcctggtacaagctggcagaggaggtttctgggcgcacagaagtcactgtgaaacagccagacagccgcctgaggctcagccaagcccaggggaacctgtcggttctggagacccggcaggtacagctggagtgtgtggttctcaaccgcaccagcataacctcccagctcatggtggaatggtttgtatggaagcccaaccaccctgagcgggagactgtggcccgcttgagccgtgacgccaccttccactatggagagcaggcagccaagaacaatctgaaggggcggctgcatttggagagtccttcccccggcgtgtaccgtctcttcatccagaacgtggctgtgcaggacagcgggacctacagctgccatgtggaggagtggctgcccagccccagtggcatgtggtataagcgggcagaggacaccgctgggcagacagctctgacagtcatgcgaccagatgcttccctgcaggtggacacagtggtccccaatgccacggtctctgagaaggcagctttccagctggactgtagcatcgtgtcccgctccagccaggactcccgcttcgctgtggcctggtattccctgaggactaaagctggggggaaaaggagcagccctggcctggaagaacaggaagaggaaagggaggaggaggaggaggaggacgacgacgacgacgacgacccaacagagcggacggccctgctgagcgtgggcccagatgctgtctttggcccagagggcagtccttgggagggcaggcttcgcttccagaggctctccccggtgctctaccggctcacagtgctgcaggcaagcccccaagatacaggcaattactcctgccatgtggaggagtggctgcccagccctcagaaggaatggtaccggctgacggaggaggagtcagcccccatcggcatccgtgttctagatacaagtcccaccctccagtccatcatctgctccaacgacgcactcttctacttcgtcttcttctaccctttccccatctttggcattcttatcatcaccatccttctggtgcgtttcaagagccggaactccagcaagaactctgatgggaagaatggggtgcctctgctgtggatcaaagagccacacctcaactactcccctacttgcctggagccccctgttctcagtatccatccaggggccatagactaagcgggtgatgccccagcggatgttggccacggaggagctgaggctctccctttctctgtgattggacagttgacagcacccaaactctggggtgcatgtgtgtggaaagttgtcagacttgaaaagtgttccaagttcccagtcagtcacagagacagactgcctctcggtggcagtcttggttggttagctatttgcgcgcaaatgttgtgatcctgccattatagatttcttgtttctgtttttagtaatgtagtgagtagctccaggtgccacatctactcacagatttatctagtattctcagatagatgttacagggcttcttattctttgtaatgtactctttttaaatccctttagtttaccctttttggattccttaatgtggacgaatttctcttacgtacaactgacagcaaaaggaagggcgaactttctagtgacaaggaatctcttccaagactttgtttttgcacatttgaaaatgccacccatggatcaaaatatacccaaacgttttttactttcttaacaagacttaagaattgtgtgtagtgtgggcaaaatttgtatgttgtcttttccctcagctggagttattggaaccactttgtagtcaagacgaaagcactgaattttgcttcaaagaactgtgtatgtacaagagaaatcctgcataaccccattaggagtagatggtgcccggcctatctgtcagggaggcaaaaaaggcttcatcccatccttgccaaaaaataagaaaactgtcttggagaatgggtcagaagccccaaacggcacacactttccaaattaaagtgggcaggggctgcttttagcagctgctgacctgcagatttgtcaaagccagtgactagagaaggaagggagaaaggctggctgttggcttgctctgagctgcaaggatggtctctaactgattaactgtgagcaggtgggcctgtgtcttcaggtgctttgccaaactcttaaaagaaagtgtccagtgaacttggaagtgggcccctgagctgagcacagggccaaagcagccatggcagacacctgacggagggcacggggctggctgacactaagtttggtgggacagtgaggggtgggaggggggtttccagggcctggtgttggagagtgcagagaaatatctacctccctggaggtgtgaagactaggtttttcttcttccttccaattagattttccttaattatagtgatgtcttccttattcatttttctctccctgcctctcactgccataagaatatcagcctgggggcagtccagacgcagccctttgtcatcctttctgtttgcctagtctcagcagactgtgatcacaaggcattgtctgtgggatttttcctttccctttcttgatctctcttgtggttctaggttgtttggttgttcattgttatggtggctttttattttaacgccccttgagccccatgatggctggtgtcaccctgttcttttacactgttgggccaggtgctgcttgtccttcttagggcatcatcaattgcaaatatttccttttgctccctttatgaagatgttcttatacccttgctttcccatatttttctggccaagcatgccatctcctttactctgggaacttacatcctgaatcccaagagggggtcacagtttggaaaaagtcatcagggattctggaactaagtctgataaaagattccagtgaagccctgttctgagaacgagcagactgcaggggaggccatgggattccccaggccagtgtctgtgctgatccttcaagggtctgcaggtatgcaggtggcctgggctgctcggcagatactttgctgattcccagctgaggggagcatggtggcgattgctcagccattttctgacagacacacagacctgccttttctcccccaagtataccgtaccctcctgtgagacagtgtgtgcaggcaccaccaccttaatcctgctgttgcctgacatgctgattctcatttattatgctgcatcaacacattagaggtacaggagcggctcagtcatgaaaaaagaaggtcttttgccccatttctttatttcagagatgtgggctttcagtgggaatttgctgactcctactttataggctgagtcaatgagggaagatgactggcgtttcctctgtctaaatgggaggttgccagagcgctggctgggactaggatgtgtaactaagatttcagtttgaaatcttagatttcagttcacggcgataaagaagtaggtgctgcacacaaatatgtaaagcaattgtaggaaatttgaaaggaaaaaaagaaaccgaagccagtattttaataattgctttttctgtgtattttgtattgggctgggggatagcatcaaaggttgaactttttgagctttctatgaaaaaccccaggaccttctttctttggccatttctatggaaatgcgatgtcagatggatggtaatggtgccctccagtggctgtgagacctcattgcgcattgtctactggagctttagtcttctgagacggaggaaaactgctgaatactctggattcatctatgtctacaatgttgcatttatgaaaaactacactgtgctaggcgcattctaggacatgaatatgaccacaccctctttcaccgggtgtttctgtagcaagttttcatattcttttcaaacaatggtttctctgcgttaattattgaggaaaaaaaaagatggggtaagaaaactacccatgcatgatgtagagagctgttgatttgtttctgtttttttaaaggaaaactatttgtaagatgttgcactaaaacattttatatacacttcagagacctgtagtaaattatgttgaaaatacggctgttt

SEQ ID NO: 142435 - DNA, 7254 bp, Homo sapiens
  Payload ID: 8146
  Gene Symbol: IGSF3
  Gene Name: immunoglobulin superfamily, member 3
  Uniprot ID: O75054
  ENST ID: ENST00000369486
  CDS Start-End: 767-4351
ggggactcgggaggggccgcagcgcggctgctggtgccgttgcgggagaagaggaagcggcgcgtcccctgaggcgtgcgcctggatggactgaaggacggtccgacgcgcgcggagggagagggccaggggcgagaaatctgctcgcgctggggtaccgcttcagggctgccgaacgccaacttgcttcgtgtgccctaggcaggcgtggggcaggtggcgcctccgtgacctaccaccatggatggaaacggactttttggtgaagaaacccaaacggttgatgccaggcagggtgatttggccgtcaaaggttttgacgaaacctgccctgttctctctggggaatccgaatgagggagatcacagacaccttcactgagaagccaaggacatttctgtataatcagtggatgaaaggattttctcagacccttttttccgtgcttctggaggattaatccactacagtctgcaatttcagtggaaactgcaaggcacacgatgtggcaggagccgggagcgacttccgaattgttgtggacccttcctgtagcataggggagttttcacacttgcctccactcctccccttccccccaactccctccttctgatctcttctttttaatctgttcccattttccgagttaagttctatttccaaaactgttctctggagctataagtggattgccagaaatgagagattaggagctgggagaagaggaagcgccttgtgttgtgtctcctggaggctgccgacatgaagtgctttttcccggtgctgagctgtctggctgtgctgggtgtggtgtcagcacagcggcaggtcaccgttcaggaaggacccttgtaccgcacggagggctcccacatcactatctggtgcaatgtgagtggctaccagggaccttctgagcagaatttccagtggtccatttacctgccttcgtcgccagagcgagaggtgcagatcgtcagcaccatggactcttccttcccctatgccatctacacccagcgcgtccgcggagggaagatcttcatagaaagagtccaggggaactcaaccctattgcacatcacagatcttcaggcccgggatgccggggagtatgaatgccacacacccagcactgataagcaatactttgggagttacagtgcaaagatgaacctagtggtgatcccagactccctgcagaccactgccatgccccagactctgcacagagtggagcaggacccgctggagctcacttgtgaggtggcctcagagaccattcagcacagccacctgtctgtggcctggctccggcagaaagttggcgagaagcccgtggaggtcatctccctgagccgagatttcatgcttcactccagcagcgaatatgcccagaggcagagcctgggggaggtgcggctggacaagctggggaggaccaccttccgcctcaccatcttccacctgcagccttctgaccagggcgaattctactgcgaggccgccgagtggatccaggatccggatgggtcgtggtatgctatgacccgaaagcgttccgagggagccgtggtcaacgtccagccaactgacaaagaattcactgttcggctggagacagagaagcggctgcacacggtgggcgagccggtggagttcagatgcatcctggaggctcagaatgttcccgaccgttactttgctgtctcctgggccttcaacagctcgctcatcgccaccatgggtcctaacgctgtgcctgtcctcaacagcgaatttgctcaccgggaagccaggggacagcttaaggtggccaaagagagcgacagtgtctttgtgctgaagatctaccacctccgccaggaagatagcgggaaatacaactgccgggtgactgagcgagagaaaaccgtgaccggggaattcattgataaggagagcaagcgtcccaagaacatccccatcatagtcctccccctcaagagcagcatctccgtggaggtggccagcaatgccagcgtcatccttgagggcgaggacctgcgcttctcctgcagtgtccgcacggcaggcaggccgcagggtcgcttctctgtcatctggcagcttgtggacaggcagaaccgccgcagcaatatcatgtggctagaccgggatggcaccgtgcagccaggctcgtcctactgggagcgcagcagctttgggggcgtccagatggagcaggtgcagcccaactcgttcagcctgggcatcttcaacagcaggaaggaggacgagggccagtatgaatgccatgtgactgaatgggtgcgggcagtggatggcgagtggcagattgttggggagcgccgggccagcactcccatctccatcacagctcttgaaatgggcttcgcagtcacagccatctcccggacaccgggggtgacctacagcgactcctttgacttgcagtgtatcatcaaaccccactaccctgcctgggtccccgtgtcggtgacatggcggttccagccggtgggcacggtggagttccatgacttggtgaccttcacccgggacggaggggtccagtggggggacaggtcctccagcttccgaacccgaactgccatcgagaaggctgagtccagcaacaacgtccgcctaagcatcagccgagccagtgacacggaagcaggcaagtaccagtgtgtggcagagctgtggcggaagaactacaacaacacctggacgcgactggcggagaggacctccaacctgctggagatcagggtgctgcagccagtgacaaagctgcaggtgagcaaatcgaagaggaccctcaccctggtggaaaacaagcccattcagttgaactgctcagtcaagtctcagactagccagaactcccactttgcggtgctctggtatgtccacaagccctcggatgccgatggcaagcttatcctgaagaccacccacaactccgcctttgaatacggtacttacgccgaggaggagggcctgagagccaggctccagtttgagaggcatgtgtcggggggcctgttcagcctcaccgtccagagagccgaggtcagcgacagcggcagctactactgccacgtggaggagtggctgctgagccccaactacgcctggtacaagctggcagaggaggtttctgggcgcacagaagtcactgtgaaacagccagacagccgcctgaggctcagccaagcccaggggaacctgtcggttctggagacccggcaggtacagctggagtgtgtggttctcaaccgcaccagcataacctcccagctcatggtggaatggtttgtatggaagcccaaccaccctgagcgggagactgtggcccgcttgagccgtgacgccaccttccactatggagagcaggcagccaagaacaatctgaaggggcggctgcatttggagagtccttcccccggcgtgtaccgtctcttcatccagaacgtggctgtgcaggacagcgggacctacagctgccatgtggaggagtggctgcccagccccagtggcatgtggtataagcgggcagaggacaccgctgggcagacagctctgacagtcatgcgaccagatgcttccctgcaggtggacacagtggtccccaatgccacggtctctgagaaggcagctttccagctggactgtagcatcgtgtcccgctccagccaggactcccgcttcgctgtggcctggtattccctgaggactaaagctggggggaaaaggagcagccctggcctggaagaacaggaagaggaaagggaggaggaggaggaggaggacgacgacgacgacgacgacccaacagagcggacggccctgctgagcgtgggcccagatgctgtctttggcccagagggcagtccttgggagggcaggcttcgcttccagaggctctccccggtgctctaccggctcacagtgctgcaggcaagcccccaagatacaggcaattactcctgccatgtggaggagtggctgcccagccctcagaaggaatggtaccggctgacggaggaggagtcagcccccatcggcatccgtgttctagatacaagtcccaccctccagtccatcatctgctccaacgacgcactcttctacttcgtcttcttctaccctttccccatctttggcattcttatcatcaccatccttctggtgcgtttcaagagccggaactccagcaagaactctgatgggaagaatggggtgcctctgctgtggatcaaagagccacacctcaactactcccctacttgcctggagccccctgttctcagtatccatccaggggccatagactaagcgggtgatgccccagcggatgttggccacggaggagctgaggctctccctttctctgtgattggacagttgacagcacccaaactctggggtgcatgtgtgtggaaagttgtcagacttgaaaagtgttccaagttcccagtcagtcacagagacagactgcctctcggtggcagtcttggttggttagctatttgcgcgcaaatgttgtgatcctgccattatagatttcttgtttctgtttttagtaatgtagtgagtagctccaggtgccacatctactcacagatttatctagtattctcagatagatgttacagggcttcttattctttgtaatgtactctttttaaatccctttagtttaccctttttggattccttaatgtggacgaatttctcttacgtacaactgacagcaaaaggaagggcgaactttctagtgacaaggaatctcttccaagactttgtttttgcacatttgaaaatgccacccatggatcaaaatatacccaaacgttttttactttcttaacaagacttaagaattgtgtgtagtgtgggcaaaatttgtatgttgtcttttccctcagctggagttattggaaccactttgtagtcaagacgaaagcactgaattttgcttcaaagaactgtgtatgtacaagagaaatcctgcataaccccattaggagtagatggtgcccggcctatctgtcagggaggcaaaaaaggcttcatcccatccttgccaaaaaataagaaaactgtcttggagaatgggtcagaagccccaaacggcacacactttccaaattaaagtgggcaggggctgcttttagcagctgctgacctgcagatttgtcaaagccagtgactagagaaggaagggagaaaggctggctgttggcttgctctgagctgcaaggatggtctctaactgattaactgtgagcaggtgggcctgtgtcttcaggtgctttgccaaactcttaaaagaaagtgtccagtgaacttggaagtgggcccctgagctgagcacagggccaaagcagccatggcagacacctgacggagggcacggggctggctgacactaagtttggtgggacagtgaggggtgggaggggggtttccagggcctggtgttggagagtgcagagaaatatctacctccctggaggtgtgaagactaggtttttcttcttccttccaattagattttccttaattatagtgatgtcttccttattcatttttctctccctgcctctcactgccataagaatatcagcctgggggcagtccagacgcagccctttgtcatcctttctgtttgcctagtctcagcagactgtgatcacaaggcattgtctgtgggatttttcctttccctttcttgatctctcttgtggttctaggttgtttggttgttcattgttatggtggctttttattttaacgccccttgagccccatgatggctggtgtcaccctgttcttttacactgttgggccaggtgctgcttgtccttcttagggcatcatcaattgcaaatatttccttttgctccctttatgaagatgttcttatacccttgctttcccatatttttctggccaagcatgccatctcctttactctgggaacttacatcctgaatcccaagagggggtcacagtttggaaaaagtcatcagggattctggaactaagtctgataaaagattccagtgaagccctgttctgagaacgagcagactgcaggggaggccatgggattccccaggccagtgtctgtgctgatccttcaagggtctgcaggtatgcaggtggcctgggctgctcggcagatactttgctgattcccagctgaggggagcatggtggcgattgctcagccattttctgacagacacacagacctgccttttctcccccaagtataccgtaccctcctgtgagacagtgtgtgcaggcaccaccaccttaatcctgctgttgcctgacatgctgattctcatttattatgctgcatcaacacattagaggtacaggagcggctcagtcatgaaaaaagaaggtcttttgccccatttctttatttcagagatgtgggctttcagtgggaatttgctgactcctactttataggctgagtcaatgagggaagatgactggcgtttcctctgtctaaatgggaggttgccagagcgctggctgggactaggatgtgtaactaagatttcagtttgaaatcttagatttcagttcacggcgataaagaagtaggtgctgcacacaaatatgtaaagcaattgtaggaaatttgaaaggaaaaaaagaaaccgaagccagtattttaataattgctttttctgtgtattttgtattgggctgggggatagcatcaaaggttgaactttttgagctttctatgaaaaaccccaggaccttctttctttggccatttctatggaaatgcgatgtcagatggatggtaatggtgccctccagtggctgtgagacctcattgcgcattgtctactggagctttagtcttctgagacggaggaaaactgctgaatactctggattcatctatgtctacaatgttgcatttatgaaaaactacactgtgctaggcgcattctaggacatgaatatgaccacaccctctttcaccgggtgtttctgtagcaagttttcatattcttttcaaacaatggtttctctgcgttaattattgaggaaaaaaaaagatggggtaagaaaactacccatgcatgatgtagagagctgttgatttgtttctgtttttttaaaggaaaactatttgtaagatgttgcactaaaacattttatatacacttcagagacctgtagtaaattatgttgaaaat

SEQ ID NO: 142436 - DNA, 268 bp, Homo sapiens
  Payload ID: 8146
  Gene Symbol: IGSF3
  Gene Name: immunoglobulin superfamily, member 3
  ENST ID: ENST00000481589
  CDS Start-End: 254-268
gagagaagaacctgcattagccgtttaagtgtgcggtgctggcagagtacctccctgaaggtgtcctggggaaagtgtggtgtcagcacagcggcaggtcaccgttcaggaaggacccttgtaccgcacggagggctcccacatcactatctggtgcaatgtgagtggctaccagggaccttctgagcagaatttccagtggtccatttacctgccttcgtcgccagagcgagaggtgcagatcgtcagcaccatggactcttccttc

SEQ ID NO: 142437 - DNA, 2066 bp, Homo sapiens
  Payload ID: 8147
  Gene Symbol: IGSF5
  Gene Name: immunoglobulin superfamily, member 5
  Uniprot ID: Q9NSI5
  ENST ID: ENST00000380588
  CDS Start-End: 104-1327
accattagtacctaggaggcagggatcagaggaagtagattcagaggtaaggagaattttggggctatactttcaagaaagtcgtgttcgggacccaggaggtatgggtcagaaggaaaggagcacagcagatactctgccggatctggaggaatggaagtcagcggcgggtctgcgatggtggcaaacagcagtggtggacggttctgggtctggtaatgaagtcatagaaggcccccaaaatgcaagagtcctgaagggctcccaggctcgcttcaactgcaccgtctcccagggctggaagctcatcatgtgggctctcagtgacatggtggtgctaagcgtcaggcccatggagcccatcatcaccaatgaccgcttcacctctcagaggtacgaccagggcgggaacttcacctcggagatgatcatccacaatgtggagcccagtgattcggggaacatcagatgcagcctccagaacagtcgcctgcatggatctgcttaccttaccgtccaagttatgggagagctgttcattcccagtgttaatcttgtagtcgctgagaatgaaccttgtgaagttacttgtctaccctcacactggacccggctcccggatatttcctgggagctcggtctcctggtcagccattcaagctattattttgttccggagcccagcgaccttcaaagtgcagtgagcatcctggctctgaccccacagagcaatgggactttgacttgcgtggctacctggaagagcctgaaggcccgcaagtctgcaactgtaaatctcactgtgattcggtgtccccaagacactggaggtggtattaatattccaggtgtattatcaagtttaccgagtttaggtttttcattgcctacttggggcaaagttggacttggactagcaggcaccatgcttctgacgccgacgtgtactcttacaatacgctgctgctgctgccgccgtcgttgttgtggctgcaactgctgctgccgttgttgtttctgctgtagaagaaaaagaggatttcgtattcaatttcaaaagaaatctgaaaaagagaagacaaacaaagaaactgagacagaaagtggaaatgaaaactccggctacaattcagatgaacaaaagaccacagacaccgcttctctccctcccaaatcctgtgaatccagtgatcctgaacaaagaaacagtagctgtggccctcctcaccagcgggctgatcaacgtccacccaggccagcaagtcatccacaggcttcttttaatctggccagtcctgagaaggtcagtaatacaactgtagtatagcaaagccttccccaagctccactgagcacttggctgacaattcaaaacacggcgatggcatccttcctttccatcctaagactggcctgcagctttgccaacattacctgaagaggagatgtcggagtcatcagaactgatacttgacagtgagagaaggaatcgattttcccagagttcaaagtagaatgtgacttttaagaggtttcatggtttttgtgaattccatgaagttactaagtaaaagctgcaaattcatcataatttttctcaacattcaacactcctacttgttaatccaacaaatggtagataaaagtctgtattctaccatgcctttcaaaagtttttattatctgaaagcatatgaagatgatatttatgtatatttaatatgtaggggtattattacatattatcagtgaaatacgagtataaaaattagggtcaaccagaaatctgcaattgactgtcaaaactgagctcagttaaagtaagattcaattctaacatggatgtgcacgttcctaaatatcttatgattgaatatttacatgaaggcattcatttttatctgcccctttatcagacctatttgcatctcctcaaatgaattagatgtggcctatgctttgcagaggatggacctcacctactccgcacaccgtgaaaaaactggaaatgggcattgtagtctttaattaataaaaacaccaaaaatgtgtattgcctttcttaa

SEQ ID NO: 142438 - DNA, 2785 bp, Homo sapiens
  Payload ID: 8148
  Gene Symbol: IGSF6
  Gene Name: immunoglobulin superfamily, member 6
  Uniprot ID: O95976
  ENST ID: ENST00000268389
  CDS Start-End: 63-788
gaaaaaagaaagccaactttcctttcaaatacacaccccaacccgccccggcatacacagaaatggggactgcgagcagaagcaacatcgctcgccatctgcaaaccaatctcattctattttgtgtcggtgctgtgggcgcctgtactctctctgtcacacaaccgtggtacctagaagtggactacactcatgaggccgtcaccataaagtgtaccttctccgcaaccggatgcccttctgagcaaccaacatgcctgtggtttcgctacggtgctcaccagcctgagaacctgtgcttggacgggtgcaaaagtgaggcagacaagttcacagtgagggaggccctcaaagaaaaccaagtttccctcactgtaaacagagtgacttcaaatgacagtgcaatttacatctgtggaatagcattccccagtgtgccggaagcgagagctaaacagacaggaggagggaccacactggtggtaagagaaattaagctgctcagcaaggaactgcggagcttcctgacagctcttgtatcactgctctctgtctatgtgaccggtgtgtgcgtggccttcatactcctctccaaatcaaaatccaaccctctaagaaacaaagaaataaaagaagactcacaaaagaagaagagtgctcggcgtatttttcaggaaattgctcaagaactataccataagagacatgtggaaacaaatcagcaatctgagaaagataacaacacttatgaaaacagaagagtactttccaactatgaaaggccatagaaacgttttaattttcaatgaagtcactgaaaatccaactccaggagctatggcagtgttaatgaacatatatcatcaggtcttaaaaaaaaataaaggtaaactgaaaagacaactggctacaaagaaggatgtcagaatgtaaggaaactataactaatagtcattaccaaaatactaaaacccaacaaaatgcaactgaaaaataccttccaaatttgccaagaaaaaaaattctattttaaacttgtatcctgagtctgtttcattcaacatgagatgtgtgatgactgccatcctgaagatctgaagccaaaccatgtgcctcagtcttgagtggaagaatcacctttatggtttgtggaaatcatggcacaattaaaataagttgggagggacaacgtgacaaaatttgagttagagacattcattttgaaaagcaccttagtaaagttatttcctctgatgttgtaatggggcagtggggtaacgcacatttgcctgccagggtatgcaaagtaacttacatcatgctatcagcaaaatgagaataatatagtggctagagtaagaccataaaagccaaaatacagaaaatccaaagctgaaggttaaacagaggtaacttcagaacaaataagccacaacggactctagatgtcagtgttgtgccaaataacagcaccagggaagatgtgggcaacacatctactttacaagcacgtttgtaatactgattttttttcttttcttttttttttttttttgagacagagtctcgttctgttgcccagggtggagtgcagtggtgcaatctcggctcactacaacctccacctcccgggttcatgccattcttctgcctcagtttcccaagtagctgggattacaggtacgcaccaccacgcccggctaatttttttttttttttttttttgtatttttagtagagacggggtttcaccatgttggccaggctggtctcaaactcaagacctcagatgatctgcctgaaatggcctcccaaagtgctgggattacaggcgtgagccaccgcgcacagtctataatactgatttttaaccaatttaggagggaaatgtcagataggaggcatggtacaaggatatttatggaattcattaccacttcactaagaaaacatgatataaattgtcctttgaaagctactttggtataaaaaaatctaaagtgcccataagtatgcattcattattagacacaaattacaaccttacaacctactatgtttatttcattaaagtgtctcttttaggccgggtgtggtggctcacgcctgtaatcccaacactttgggaggctgaggcaggtgaatcatgagatcaggagttcgagaccagcctgaacaacatgatgaaacccgtctctactaaaaatacaaaaaaatttagcggggtttggtggcacacacctgtaatcccagctatttgggaggctgaggcaggagatcacttgaacccaggatgcggaggttgcagtgagctgagatcacgccactgcaccccagcctaggtgacagagcaagactgtctcaaaaataaataaataaataaataaataaataaaataaagtgtttcttttaaactggtattgcctaaggtgtattctttataaaacttagaattgttaaatattttaagattcctttgaaagtgtttttgcattgatggtttaaatcagtgatatcaaactttcctgatcctatgtgcccagaaaaatgggcaggggaaaggaggcagcatggaacctcatttttttgtgtgtatctgtgtgtacacgtgagtgcacatgtgtatatgtgtggggccacatgtgttttgtatacggtatatgcatgaaaatgtacctttgtaccttatacacaaaaacaaattaaacaatggcataagcagcaatataaataaaaaatgctaatactttcctgccatattccaaaataaactgtcttgtgtac

SEQ ID NO: 142439 - DNA, 368 bp, Homo sapiens
  Payload ID: 8148
  Gene Symbol: IGSF6
  Gene Name: immunoglobulin superfamily, member 6
  ENST ID: ENST00000569602
  CDS Start-End: 9-368
acacagaaatggggactgcgagcagaagcaacatcgctcgccatctgcaaaccaatctcattctattttgtgtcggtgctgtgggcgcctgtactctctctgtcacacaaccgtggtacctagaagtggactacactcatgaggccgtcaccataaagtgtaccttctccgcaaccggatgcccttctgagcaaccaacatgcctgtggtttcgctacggtgctcaccagcctgagaacctgtgcttggacgggtgcaaaaaaattaagctgctcagcaaggaactgcggagcttcctgacagctcttgtatcactgctctctgtctatgtgaccggtgtgtgcgtggccttcatactcctctccaaa

SEQ ID NO: 142440 - DNA, 2343 bp, Homo sapiens
  Payload ID: 8149
  Gene Symbol: IGSF8
  Gene Name: immunoglobulin superfamily, member 8
  Uniprot ID: Q969P0
  ENST ID: ENST00000314485
  CDS Start-End: 218-2059
gccggggcgagaatggtttcagaactgccgagggctggagggaaagcagcgggaggggcggagggaggggattcggcagctccagttcagctcgctcggcgcacccacgcctcgctgccccgcttcctgccctcaacctgggcatgcgccccccacccttccggccccccagaacccgcgccatcccccggagcctccccagagctggccgcgcaggatgggcgccctcaggcccacgctgctgccgccttcgctgccgctgctgctgctgctaatgctaggaatgggatgctgggcccgggaggtgctggtccccgaggggcccttgtaccgcgtggctggcacagctgtctccatctcctgcaatgtgaccggctatgagggccctgcccagcagaacttcgagtggttcctgtataggcccgaggccccagatactgcactgggcattgtcagtaccaaggatacccagttctcctatgctgtcttcaagtcccgagtggtggcgggtgaggtgcaggtgcagcgcctacaaggtgatgccgtggtgctcaagattgcccgcctgcaggcccaggatgccggcatttatgagtgccacaccccctccactgatacccgctacctgggcagctacagcggcaaggtggagctgagagttcttccagatgtcctccaggtgtctgctgcccccccagggccccgaggccgccaggccccaacctcacccccacgcatgacggtgcatgaggggcaggagctggcactgggctgcctggcgaggacaagcacacagaagcacacacacctggcagtgtcctttgggcgatctgtgcccgaggcaccagttgggcggtcaactctgcaggaagtggtgggaatccggtcagacttggccgtggaggctggagctccctatgctgagcgattggctgcaggggagcttcgtctgggcaaggaagggaccgatcggtaccgcatggtagtagggggtgcccaggcaggggacgcaggcacctaccactgcactgccgctgagtggattcaggatcctgatggcagctgggcccagattgcagagaaaagggccgtcctggcccacgtggatgtgcagacgctgtccagccagctggcagtgacagtggggcctggtgaacgtcggatcggcccaggggagcccttggaactgctgtgcaatgtgtcaggggcacttcccccagcaggccgtcatgctgcatactctgtaggttgggagatggcacctgcgggggcacctgggcccggccgcctggtagcccagctggacacagagggtgtgggcagcctgggccctggctatgagggccgacacattgccatggagaaggtggcatccagaacataccggctacggctagaggctgccaggcctggtgatgcgggcacctaccgctgcctcgccaaagcctatgttcgagggtctgggacccggcttcgtgaagcagccagtgcccgttcccggcctctccctgtacatgtgcgggaggaaggtgtggtgctggaggctgtggcatggctagcaggaggcacagtgtaccgcggggagactgcctccctgctgtgcaacatctctgtgcggggtggccccccaggactgcggctggccgccagctggtgggtggagcgaccagaggacggagagctcagctctgtccctgcccagctggtgggtggcgtaggccaggatggtgtggcagagctgggagtccggcctggaggaggccctgtcagcgtagagctggtggggccccgaagccatcggctgagactacacagcttggggcccgaggatgaaggcgtgtaccactgtgcccccagcgcctgggtgcagcatgccgactacagctggtaccaggcgggcagtgcccgctcagggcctgttacagtctacccctacatgcatgccctggacaccctatttgtgcctctgctggtgggtacaggggtggccctagtcactggtgccactgtccttggtaccatcacttgctgcttcatgaagaggcttcgaaaacggtgatcccttactccccaggtcttgcaggtgtcgactgtcttccggcccagctccaagccctcctctggttgcctggacaccctctccctctgtccactcttcctttaatttatttgacctcccactacccagaatgggagacgtgcctccccttccccactccttccctcccaagcccctccctctggccttctgttcttgatctcttagggatcctatagggaggccatttcctgtcctggaattagtttttctaaaatgtgaataaacttgttttataaaaagca

SEQ ID NO: 142441 - DNA, 2366 bp, Homo sapiens
  Payload ID: 8149
  Gene Symbol: IGSF8
  Gene Name: immunoglobulin superfamily, member 8
  Uniprot ID: Q969P0
  ENST ID: ENST00000368086
  CDS Start-End: 218-2059
gccggggcgagaatggtttcagaactgccgagggctggagggaaagcagcgggaggggcggagggaggggattcggcagctccagttcagctcgctcggcgcacccacgcctcgctgccccgcttcctgccctcaacctgggcatgcgccccccacccttccggccccccagaacccgcgccatcccccggagcctccccagagctggccgcgcaggatgggcgccctcaggcccacgctgctgccgccttcgctgccgctgctgctgctgctaatgctaggaatgggatgctgggcccgggaggtgctggtccccgaggggcccttgtaccgcgtggctggcacagctgtctccatctcctgcaatgtgaccggctatgagggccctgcccagcagaacttcgagtggttcctgtataggcccgaggccccagatactgcactgggcattgtcagtaccaaggatacccagttctcctatgctgtcttcaagtcccgagtggtggcgggtgaggtgcaggtgcagcgcctacaaggtgatgccgtggtgctcaagattgcccgcctgcaggcccaggatgccggcatttatgagtgccacaccccctccactgatacccgctacctgggcagctacagcggcaaggtggagctgagagttcttccagatgtcctccaggtgtctgctgcccccccagggccccgaggccgccaggccccaacctcacccccacgcatgacggtgcatgaggggcaggagctggcactgggctgcctggcgaggacaagcacacagaagcacacacacctggcagtgtcctttgggcgatctgtgcccgaggcaccagttgggcggtcaactctgcaggaagtggtgggaatccggtcagacttggccgtggaggctggagctccctatgctgagcgattggctgcaggggagcttcgtctgggcaaggaagggaccgatcggtaccgcatggtagtagggggtgcccaggcaggggacgcaggcacctaccactgcactgccgctgagtggattcaggatcctgatggcagctgggcccagattgcagagaaaagggccgtcctggcccacgtggatgtgcagacgctgtccagccagctggcagtgacagtggggcctggtgaacgtcggatcggcccaggggagcccttggaactgctgtgcaatgtgtcaggggcacttcccccagcaggccgtcatgctgcatactctgtaggttgggagatggcacctgcgggggcacctgggcccggccgcctggtagcccagctggacacagagggtgtgggcagcctgggccctggctatgagggccgacacattgccatggagaaggtggcatccagaacataccggctacggctagaggctgccaggcctggtgatgcgggcacctaccgctgcctcgccaaagcctatgttcgagggtctgggacccggcttcgtgaagcagccagtgcccgttcccggcctctccctgtacatgtgcgggaggaaggtgtggtgctggaggctgtggcatggctagcaggaggcacagtgtaccgcggggagactgcctccctgctgtgcaacatctctgtgcggggtggccccccaggactgcggctggccgccagctggtgggtggagcgaccagaggacggagagctcagctctgtccctgcccagctggtgggtggcgtaggccaggatggtgtggcagagctgggagtccggcctggaggaggccctgtcagcgtagagctggtggggccccgaagccatcggctgagactacacagcttggggcccgaggatgaaggcgtgtaccactgtgcccccagcgcctgggtgcagcatgccgactacagctggtaccaggcgggcagtgcccgctcagggcctgttacagtctacccctacatgcatgccctggacaccctatttgtgcctctgctggtgggtacaggggtggccctagtcactggtgccactgtccttggtaccatcacttgctgcttcatgaagaggcttcgaaaacggtgatcccttactccccagcccacaccgggcacccttttcaggtcttgcaggtgtcgactgtcttccggcccagctccaagccctcctctggttgcctggacaccctctccctctgtccactcttcctttaatttatttgacctcccactacccagaatgggagacgtgcctccccttccccactccttccctcccaagcccctccctctggccttctgttcttgatctcttagggatcctatagggaggccatttcctgtcctggaattagtttttctaaaatgtgaataaacttgttttataaaaagca

SEQ ID NO: 142442 - DNA, 1059 bp, Homo sapiens
  Payload ID: 8149
  Gene Symbol: IGSF8
  Gene Name: immunoglobulin superfamily, member 8
  ENST ID: ENST00000448417
  CDS Start-End: 156-1059
ggaactggggctgggccgaggcccggggcggatccagggctggagtcttggcggggcggggcggggaggggcggggccggggcggggctgggactcgatgcgactcaaagaacccgcgccatcccccggagcctccccagagctggccgcgcaggatgggcgccctcaggcccacgctgctgccgccttcgctgccgctgctgctgctgctaatgctaggaatgggatgctgggcccgggaggtgctggtccccgaggggcccttgtaccgcgtggctggcacagctgtctccatctcctgcaatgtgaccggctatgagggccctgcccagcagaacttcgagtggttcctgtataggcccgaggccccagatactgcactgggcattgtcagtaccaaggatacccagttctcctatgctgtcttcaagtcccgagtggtggcgggtgaggtgcaggtgcagcgcctacaaggtgatgccgtggtgctcaagattgcccgcctgcaggcccaggatgccggcatttatgagtgccacaccccctccactgatacccgctacctgggcagctacagcggcaaggtggagctgagagttcttccagatgtcctccaggtgtctgctgcccccccagggccccgaggccgccaggccccaacctcacccccacgcatgacggtgcatgaggggcaggagctggcactgggctgcctggcgaggacaagcacacagaagcacacacacctggcagtgtcctttgggcgatctgtgcccgaggcaccagttgggcggtcaactctgcaggaagtggtgggaatccggtcagacttggccgtggaggctggagctccctatgctgagcgattggctgcaggggagcttcgtctgggcaaggaagggaccgatcggtaccgcatggtagtagggggtgcccaggcaggggacgcaggcacctaccactgcactgccgctgagtggattcaggatcctgatggcagctgggcccagattgcagagaaaagggccgtcctggcccacgtggatgtgcagacgctgt

SEQ ID NO: 142443 - DNA, 2191 bp, Homo sapiens
  Payload ID: 8149
  Gene Symbol: IGSF8
  Gene Name: immunoglobulin superfamily, member 8
  Uniprot ID: Q969P0
  ENST ID: ENST00000614243
  CDS Start-End: 76-1917
tttcgaggggcggggcggggccggggccagaacccgcgccatcccccggagcctccccagagctggccgcgcaggatgggcgccctcaggcccacgctgctgccgccttcgctgccgctgctgctgctgctaatgctaggaatgggatgctgggcccgggaggtgctggtccccgaggggcccttgtaccgcgtggctggcacagctgtctccatctcctgcaatgtgaccggctatgagggccctgcccagcagaacttcgagtggttcctgtataggcccgaggccccagatactgcactgggcattgtcagtaccaaggatacccagttctcctatgctgtcttcaagtcccgagtggtggcgggtgaggtgcaggtgcagcgcctacaaggtgatgccgtggtgctcaagattgcccgcctgcaggcccaggatgccggcatttatgagtgccacaccccctccactgatacccgctacctgggcagctacagcggcaaggtggagctgagagttcttccagatgtcctccaggtgtctgctgcccccccagggccccgaggccgccaggccccaacctcacccccacgcatgacggtgcatgaggggcaggagctggcactgggctgcctggcgaggacaagcacacagaagcacacacacctggcagtgtcctttgggcgatctgtgcccgaggcaccagttgggcggtcaactctgcaggaagtggtgggaatccggtcagacttggccgtggaggctggagctccctatgctgagcgattggctgcaggggagcttcgtctgggcaaggaagggaccgatcggtaccgcatggtagtagggggtgcccaggcaggggacgcaggcacctaccactgcactgccgctgagtggattcaggatcctgatggcagctgggcccagattgcagagaaaagggccgtcctggcccacgtggatgtgcagacgctgtccagccagctggcagtgacagtggggcctggtgaacgtcggatcggcccaggggagcccttggaactgctgtgcaatgtgtcaggggcacttcccccagcaggccgtcatgctgcatactctgtaggttgggagatggcacctgcgggggcacctgggcccggccgcctggtagcccagctggacacagagggtgtgggcagcctgggccctggctatgagggccgacacattgccatggagaaggtggcatccagaacataccggctacggctagaggctgccaggcctggtgatgcgggcacctaccgctgcctcgccaaagcctatgttcgagggtctgggacccggcttcgtgaagcagccagtgcccgttcccggcctctccctgtacatgtgcgggaggaaggtgtggtgctggaggctgtggcatggctagcaggaggcacagtgtaccgcggggagactgcctccctgctgtgcaacatctctgtgcggggtggccccccaggactgcggctggccgccagctggtgggtggagcgaccagaggacggagagctcagctctgtccctgcccagctggtgggtggcgtaggccaggatggtgtggcagagctgggagtccggcctggaggaggccctgtcagcgtagagctggtggggccccgaagccatcggctgagactacacagcttggggcccgaggatgaaggcgtgtaccactgtgcccccagcgcctgggtgcagcatgccgactacagctggtaccaggcgggcagtgcccgctcagggcctgttacagtctacccctacatgcatgccctggacaccctatttgtgcctctgctggtgggtacaggggtggccctagtcactggtgccactgtccttggtaccatcacttgctgcttcatgaagaggcttcgaaaacggtgatcccttactccccaggtcttgcaggtgtcgactgtcttccggcccagctccaagccctcctctggttgcctggacaccctctccctctgtccactcttcctttaatttatttgacctcccactacccagaatgggagacgtgcctccccttccccactccttccctcccaagcccctccctctggccttctgttcttgatctcttagggatcctatagggaggccatttcctgtcctggaattagtttttctaaaatgtgaataaacttgtttt

SEQ ID NO: 142444 - DNA, 3996 bp, Homo sapiens
  Payload ID: 8150
  Gene Symbol: IGSF9
  Gene Name: immunoglobulin superfamily, member 9
  Uniprot ID: Q9P2J2
  ENST ID: ENST00000361509
  CDS Start-End: 199-3690
gtggagccgagcggtgcggagcagatctggtggttctccggagagcagcttcctcgggtgttacatgagccaagccctcactgtacagaagagtgagagctgaaacctgttccctgagctgatcagaaggacatcccttggcccctccatctgggctcctgtggataggaggggctgggtgagcaggccagctgggctatggtgtggtgcctcggcctggccgtcctcagcctggtcatcagccagggggctgacggtcgagggaagcctgaggtggtatcggtggtgggccgggctggggagagtgtggtgctgggctgtgacctgctgcccccggccggccggccccccctgcatgtcatcgagtggctgcgctttggattcctgcttcccatcttcatccagttcggcctctactctccccgaattgaccctgattacgtgggacgagtccggctgcagaagggggcctctctccagattgagggtctccgggtggaagaccagggctggtacgagtgccgcgtgttcttcctggaccagcacatccctgaagacgattttgctaacggctcctgggtgcatctgacagtcaattcaccccctcaattccaggagacacctcctgctgtgttggaagtgcaggaactggagcctgtgaccctgcgttgtgtggcccgtggcagccccctgcctcatgtgacgtggaagctccgaggaaaggaccttggccagggccagggccaggtgcaagtgcagaacgggacgctgcggatccgccgggtagagcgaggcagctctggggtctacacctgccaagcctccagcactgagggcagcgccacccacgccacccagctgctagtgctaggacccccagtcatcgtggtgccccccaagaacagcacagtcaatgcctcccaggatgtttcattggcctgccatgctgaggcataccctgctaacctcacctacagctggttccaggacaacatcaatgtcttccacattagccgcctgcagccccgggtgcggatcctggtggacgggagcctgcggctgctggccacccagcctgatgatgccggctgctacacctgtgtgcccagcaatggcctcctgcatccaccctcagcctctgcctacctcactgtgctctgcatgccgggggtgatccgctgcccggttcgtgccaaccccccactgctctttgtcagctggaccaaggatggaaaggccctgcagctggacaagttccctggctggtcccagggcacagaaggctcactgatcatcgccctggggaacgaggatgccctgggagaatactcctgcaccccctacaacagtcttggtaccgccgggccctctcctgtgacccgcgtgctgctcaaggctcccccagcttttatagagcggcccaaggaagaatatttccaagaagtagggcgggagctgctcatcccctgctccgcccaaggggaccctcctcctgttgtctcttggaccaaggtgggccgggggctgcaaggccaggcccaggtggacagcaacagcagcctcatcctgcgaccattgaccaaggaggcccacgggcactgggaatgcagtgccagcaatgctgtggcccgagtggccacctccacgaacgtctacgtgctgggcactagccctcatgttgtcaccaatgtgtccgtggtggctttgcccaagggtgccaatgtctcctgggagcctggctttgatggtggttatctgcagagattcagtgtctggtacaccccactggccaagcgtcctgaccgaatgcaccatgactgggtgtccttggcagtgcctgtgggggctgctcacctcctagtgccagggctgcagccccacacccagtaccagttcagcgtgctagctcagaacaagctggggagtggtcccttcagcgaaatcgtcttgtctgctccggaagggcttcctaccacgccagctgcacccgggcttcccccaacagagataccgcctcccctgtcccctccgcggggtctggtggcagtgaggacaccccggggggtactcctgcattgggatcccccagagctggtccctaagagactggatggctacgtcttggaaggccggcaaggctcccagggctgggaggtgctggacccggctgtggcaggcacagaaacagagctgctggtgccaggcctcatcaaggatgttctctacgagttccgcctcgtggccttcgcgggcagcttcgtcagcgaccccagcaacacggccaacgtctccacttccggtctggaggtctacccttcgcgcacgcagctgccgggcctcctgcctcagcccgtgctggccggcgtggtgggcggagtctgctttctgggagtggccgtccttgtgagcatcctggccggctgcctcctgaaccggcgcagggctgcccgccgccgccgcaagcgcctccgccaagatccacctcttatcttctctccgaccgggaagtcagctgcaccctctgctctgggctcaggcagtcctgacagcgtggcgaagctgaagctccagggatccccagtccccagcctgcgccagagtctgctctggggggatcctgccggaactcccagcccccacccggatcctccatctagccggggacccttacctctggagcccatttgccggggcccagacgggcgctttgtgatggggcccactgtggcggccccccaggaaaggtcaggccgggagcaggcagaacctcggactccagcccagcgtctggcccggtcctttgactgtagcagcagcagccccagtggggcaccccagcccctctgcattgaagacatcagccctgtggcaccccctccagcagccccacccagtcccttgccaggtcctggacccctgctccagtacctgagcctgcccttcttccgagagatgaatgtggatggggactggcccccgcttgaggagcccagccctgctgcacccccagattacatggatacccggcgctgtcccacctcatctttccttcgttctccagaaacccctcctgtatcccccagggaatcacttcctggggctgtggtaggggctggggccactgcagagcccccttacacagccctggctgactggacactgagggagcggctgctgccaggccttctccctgctgcccctcgaggcagcctcaccagccagagcagtgggcgaggcagcgcttcgttcctgcggcccccctccacagccccctctgcaggaggcagctacctcagccctgctccaggagacaccagcagctgggccagtggccctgagagatggccccgaagggagcatgtggtgacagtcagcaagaggaggaacacatctgtggacgagaactatgagtgggactcagaattccctggggacatggaattgctggagactttgcacctgggcttggccagctcccggctcagacctgaagctgagccagagctaggtgtgaagactccagaggagggctgcctcctgaacactgcccatgttactggccctgaggcccgctgtgctgcccttcgggaggaattcctggccttccgccgccgccgagatgctactagggctcggctaccagcctatcgacagccagtcccccaccccgaacaggccactctgctgtgaacatccctgatgtgaggctgtgaaaaggcatatggacctgcaaaggaggcccccaaccagacagacctagtttcaaacgagggcactgcccctgcctgcccctttggtgcccaggcacagaccctgatagtgggtttgggtcaccttggtatggaatgtatgtgctgaccccctaggtgagtctggggattggaacagggatcttaggtctgcctctctctctctctctctctctctctctctctctgtgtgtgtgtgtgtgtgtgtgaagttttttacaggtgaataaacaaagtttgaaagatg

SEQ ID NO: 142445 - DNA, 4044 bp, Homo sapiens
  Payload ID: 8150
  Gene Symbol: IGSF9
  Gene Name: immunoglobulin superfamily, member 9
  Uniprot ID: Q9P2J2
  ENST ID: ENST00000368094
  CDS Start-End: 199-3738
gtggagccgagcggtgcggagcagatctggtggttctccggagagcagcttcctcgggtgttacatgagccaagccctcactgtacagaagagtgagagctgaaacctgttccctgagctgatcagaaggacatcccttggcccctccatctgggctcctgtggataggaggggctgggtgagcaggccagctgggctatggtgtggtgcctcggcctggccgtcctcagcctggtcatcagccagggggctgacggtcgagggaagcctgaggtggtatcggtggtgggccgggctggggagagtgtggtgctgggctgtgacctgctgcccccggccggccggccccccctgcatgtcatcgagtggctgcgctttggattcctgcttcccatcttcatccagttcggcctctactctccccgaattgaccctgattacgtgggacgagtccggctgcagaagggggcctctctccagattgagggtctccgggtggaagaccagggctggtacgagtgccgcgtgttcttcctggaccagcacatccctgaagacgattttgctaacggctcctgggtgcatctgacagtcaattcaccccctcaattccaggagacacctcctgctgtgttggaagtgcaggaactggagcctgtgaccctgcgttgtgtggcccgtggcagccccctgcctcatgtgacgtggaagctccgaggaaaggaccttggccagggccagggccaggtgcaagtgcagaacgggacgctgcggatccgccgggtagagcgaggcagctctggggtctacacctgccaagcctccagcactgagggcagcgccacccacgccacccagctgctagtgctaggacccccagtcatcgtggtgccccccaagaacagcacagtcaatgcctcccaggatgtttcattggcctgccatgctgaggcataccctgctaacctcacctacagctggttccaggacaacatcaatgtcttccacattagccgcctgcagccccgggtgcggatcctggtggacgggagcctgcggctgctggccacccagcctgatgatgccggctgctacacctgtgtgcccagcaatggcctcctgcatccaccctcagcctctgcctacctcactgtgctctacccagcccaggtgacagctatgcctcctgagacacccctgcccataggcatgccgggggtgatccgctgcccggttcgtgccaaccccccactgctctttgtcagctggaccaaggatggaaaggccctgcagctggacaagttccctggctggtcccagggcacagaaggctcactgatcatcgccctggggaacgaggatgccctgggagaatactcctgcaccccctacaacagtcttggtaccgccgggccctctcctgtgacccgcgtgctgctcaaggctcccccagcttttatagagcggcccaaggaagaatatttccaagaagtagggcgggagctgctcatcccctgctccgcccaaggggaccctcctcctgttgtctcttggaccaaggtgggccgggggctgcaaggccaggcccaggtggacagcaacagcagcctcatcctgcgaccattgaccaaggaggcccacgggcactgggaatgcagtgccagcaatgctgtggcccgagtggccacctccacgaacgtctacgtgctgggcactagccctcatgttgtcaccaatgtgtccgtggtggctttgcccaagggtgccaatgtctcctgggagcctggctttgatggtggttatctgcagagattcagtgtctggtacaccccactggccaagcgtcctgaccgaatgcaccatgactgggtgtccttggcagtgcctgtgggggctgctcacctcctagtgccagggctgcagccccacacccagtaccagttcagcgtgctagctcagaacaagctggggagtggtcccttcagcgaaatcgtcttgtctgctccggaagggcttcctaccacgccagctgcacccgggcttcccccaacagagataccgcctcccctgtcccctccgcggggtctggtggcagtgaggacaccccggggggtactcctgcattgggatcccccagagctggtccctaagagactggatggctacgtcttggaaggccggcaaggctcccagggctgggaggtgctggacccggctgtggcaggcacagaaacagagctgctggtgccaggcctcatcaaggatgttctctacgagttccgcctcgtggccttcgcgggcagcttcgtcagcgaccccagcaacacggccaacgtctccacttccggtctggaggtctacccttcgcgcacgcagctgccgggcctcctgcctcagcccgtgctggccggcgtggtgggcggagtctgctttctgggagtggccgtccttgtgagcatcctggccggctgcctcctgaaccggcgcagggctgcccgccgccgccgcaagcgcctccgccaagatccacctcttatcttctctccgaccgggaagtcagctgcaccctctgctctgggctcaggcagtcctgacagcgtggcgaagctgaagctccagggatccccagtccccagcctgcgccagagtctgctctggggggatcctgccggaactcccagcccccacccggatcctccatctagccggggacccttacctctggagcccatttgccggggcccagacgggcgctttgtgatggggcccactgtggcggccccccaggaaaggtcaggccgggagcaggcagaacctcggactccagcccagcgtctggcccggtcctttgactgtagcagcagcagccccagtggggcaccccagcccctctgcattgaagacatcagccctgtggcaccccctccagcagccccacccagtcccttgccaggtcctggacccctgctccagtacctgagcctgcccttcttccgagagatgaatgtggatggggactggcccccgcttgaggagcccagccctgctgcacccccagattacatggatacccggcgctgtcccacctcatctttccttcgttctccagaaacccctcctgtatcccccagggaatcacttcctggggctgtggtaggggctggggccactgcagagcccccttacacagccctggctgactggacactgagggagcggctgctgccaggccttctccctgctgcccctcgaggcagcctcaccagccagagcagtgggcgaggcagcgcttcgttcctgcggcccccctccacagccccctctgcaggaggcagctacctcagccctgctccaggagacaccagcagctgggccagtggccctgagagatggccccgaagggagcatgtggtgacagtcagcaagaggaggaacacatctgtggacgagaactatgagtgggactcagaattccctggggacatggaattgctggagactttgcacctgggcttggccagctcccggctcagacctgaagctgagccagagctaggtgtgaagactccagaggagggctgcctcctgaacactgcccatgttactggccctgaggcccgctgtgctgcccttcgggaggaattcctggccttccgccgccgccgagatgctactagggctcggctaccagcctatcgacagccagtcccccaccccgaacaggccactctgctgtgaacatccctgatgtgaggctgtgaaaaggcatatggacctgcaaaggaggcccccaaccagacagacctagtttcaaacgagggcactgcccctgcctgcccctttggtgcccaggcacagaccctgatagtgggtttgggtcaccttggtatggaatgtatgtgctgaccccctaggtgagtctggggattggaacagggatcttaggtctgcctctctctctctctctctctctctctctctctctgtgtgtgtgtgtgtgtgtgtgaagttttttacaggtgaataaacaaagtttgaaagatg

SEQ ID NO: 142446 - DNA, 2663 bp, Homo sapiens
  Payload ID: 8150
  Gene Symbol: IGSF9
  Gene Name: immunoglobulin superfamily, member 9
  ENST ID: ENST00000611023
  CDS Start-End: 207-2360
cggcgagagtggagccgagcggtgcggagcagatctggtggttctccggagagcagcttcctcgggtgttacatgagccaagccctcactgtacagaagagtgagagctgaaacctgttccctgagctgatcagaaggacatcccttggcccctccatctgggctcctgtggataggaggggctgggtgagcaggccagctgggctatggtgtggtgcctcggcctggccgtcctcagcctggtcatcagccagggggctgacggtcgagggaagcctgaggtggtatcggtggtgggccgggctggggagagtgtggtgctgggctgtgacctgctgcccccggccggccggccccccctgcatgtcatcgagtggctgcgctttggattcctgcttcccatcttcatccagttcggcctctactctccccgaattgaccctgattacgtgggacgagtccggctgcagaagggggcctctctccagattgagggtctccgggtggaagaccagggctggtacgagtgccgcgtgttcttcctggaccagcacatccctgaagacgattttgctaacggctcctgggtgcatctgacagtcaattcaccccctcaattccaggagacacctcctgctgtgttggaagtgcaggaactggagcctgtgaccctgcgttgtgtggcccgtggcagccccctgcctcatgtgacgtggaagctccgaggaaaggaccttggccagggccagggccaggtgcaagtgcagaacgggacgctgcggatccgccgggtagagcgaggcagctctggggtctacacctgccaagcctccagcactgagggcagcgccacccacgccacccagctgctagtgctaggacccccagtcatcgtggtgccccccaagaacagcacagtcaatgcctcccaggatgtttcattggcctgccatgctgaggcataccctgctaacctcacctacagctggttccaggacaacatcaatgtcttccacattagccgcctgcagccccgggtgcggatcctggtggacgggagcctgcggctgctggccacccagcctgatgatgccggctgctacacctgtgtgcccagcaatggcctcctgcatccaccctcagcctctgcctacctcactgtgctctacccagcccaggtgacagctatgcctcctgagacacccctgcccataggcatgccgggggtgatccgctgcccggttcgtgccaaccccccactgctctttgtcagctggaccaaggatggaaaggccctgcagctggacaagttccctggctggtcccagggcacagaaggctcactgatcatcgccctggggaacgaggatgccctgggagaatactcctgcaccccctacaacagtcttggtaccgccgggccctctcctgtgacccgcgtgctgctcaaggctcccccagcttttatagagcggcccaaggaagaatatttccaagaagtagggcgggagctgctcatcccctgctccgcccaaggggaccctcctcctgcagccccacccagtcccttgccaggtcctggacccctgctccagtacctgagcctgcccttcttccgagagatgaatgtggatggggactggcccccgcttgaggagcccagccctgctgcacccccagattacatggatacccggcgctgtcccacctcatctttccttcgttctccagaaacccctcctgtatcccccagggaatcacttcctggggctgtggtaggggctggggccactgcagagcccccttacacagccctggctgactggacactgagggagcggctgctgccaggccttctccctgctgcccctcgaggcagcctcaccagccagagcagtgggcgaggcagcgcttcgttcctgcggcccccctccacagccccctctgcaggaggcagctacctcagccctgctccaggagacaccagcagctgggccagtggccctgagagatggccccgaagggagcatgtggtgacagtcagcaagaggaggaacacatctgtggacgagaactatgagtgggactcagaattccctggggacatggaattgctggagactttgcacctgggcttggccagctcccggctcagacctgaagctgagccagagctaggtgtgaagactccagaggagggctgcctcctgaacactgcccatgttactggccctgaggcccgctgtgctgcccttcgggaggaattcctggccttccgccgccgccgagatgctactagggctcggctaccagcctatcgacagccagtcccccaccccgaacaggccactctgctgtgaacatccctgatgtgaggctgtgaaaaggcatatggacctgcaaaggaggcccccaaccagacagacctagtttcaaacgagggcactgcccctgcctgcccctttggtgcccaggcacagaccctgatagtgggtttgggtcaccttggtatggaatgtatgtgctgaccccctaggtgagtctggggattggaacagggatcttaggtctgcctctctctctctctctctctctctctctctctctgtgtgtgtgtgtgtgtgtgtgaagttttttacaggtgaataaacaaagtttgaaag

SEQ ID NO: 142447 - DNA, 4050 bp, Homo sapiens
  Payload ID: 8151
  Gene Symbol: IGSF9B
  Gene Name: immunoglobulin superfamily, member 9B
  Uniprot ID: Q9UPX0
  ENST ID: ENST00000321016
  CDS Start-End: 1-4050
atgatttggtatgtggccactttcatagcaagtgtgatcggcacccgagggcttgcggctgaaggcgcccacggcctgcgagaggagcccgagtttgtgacggcaagagctggggagagcgtggtcctgcgatgcgacgtgatccacccagtgacgggacagcccccaccctatgtcgtagagtggttcaagttcggggtccccatccctatcttcatcaagtttggctactacccgccgcacgtggaccctgagtatgcaggccgggccagtcttcatgataaggcatctctgcggctggaacaagttcgctctgaggaccagggctggtatgagtgcaaagtgctcatgctggaccagcagtatgacaccttccacaatggcagctgggtccacctcaccatcaacgcccctcccacctttacagaaacacccccccagtacatcgaggccaaggagggtggtagtatcaccatgacctgcacagcttttgggaaccccaagcccattgtcacctggctcaaggaggggacgctcctcggtgctagtgggaaataccaggtgagtgacggcagcctgacagtgacatcggtcagtcgggaggacagaggtgcctacacctgccgagcgtacagcattcagggggaggctgtccacacgactcacctgcttgtccaagggccccctttcatcgtctcccctcctgagaacatcaccgtcaacatctcccaggatgctctgctcacctgccgggcagaggcgtatccgggcaacctcacctacacctggtactggcaggacgagaacgtctactttcagaacgacctgaagctgagggtgcgcatcctaatcgatgggaccctgatcatcttccgggtgaagccggaggactcggggaagtacacctgtgtgcccagcaacagcctggggcgctccccctccgcctcggcgtacctgaccgtgcagtacccagcgcgtgtcctcaacatgccccctgtgatttacgtgcccgtggggatccatggctacatccgctgccctgtggacgcagaaccaccggccaccgtggtcaagtggaacaaggacggccgtcccctgcaggttgagaagaacctcggttggaccctgatggaggatggctccattcgaattgaggaggccacagaggaggctcttggcacttatacctgtgtgccttacaacactctggggaccatgggccagtctgcccctgcgaggcttgtcctgaaggaccccccctatttcacggtgctaccaggctgggagtacaggcaggaggccggccgggagctacttatcccctgtgctgccgcaggggacccctttcctgtcatcacttggagaaaggtagggaagcccagcagaagcaagcacagtgccctgcccagtgggagcctgcagttccgtgccctgagtaaggaggaccacggggagtgggaatgtgtcgccaccaacgtggtcacgagcatcactgccagcacccacctcaccgtcatcggcaccagcccccatgccccgggcagtgtccgggtccaggtctccatgacaactgccaacgtgtcctgggaaccaggctatgatggaggctacgagcagacattctcagtttggatgaagcgggcacagtttgggccccatgactggctgtccttgccagtgccgccaggacccagctggctgctggtggacaccctggagcctgagacagcgtaccagttcagcgtcctggcccagaacaagctgggaaccagcgccttcagtgaggtggtcactgtgaacactttagcattccctattacaactccagaacccctggtgctggtcaccccaccgaggtgcctcatagccaatcggactcagcagggtgtgctcctgtcctggcttccgcctgccaaccacagctttcccatcgaccgctacatcatggagttccgtgtcgcagagcgctgggagttgctcgacgatggcatccccggcaccgaaggagagttctttgccaaggatctgtcacaggacacgtggtatgagttccgggttctggccgtcatgcaggatctgatcagcgagcccagcaacatcgccggcgtctccagcacagacatcttcccgcagccggacctgaccgaggatgggctggcgcggcctgtgctggcgggaatcgtagctaccatctgcttcttggcagctgccatcctgttcagcaccctggctgcctgctttgtcaacaagcagcgcaagcgtaagctcaagcgcaaaaaagaccctccactctccatcacccactgcaggaagagcctggagtctcccttgtcctctggcaaggtgagccccgagagcatccgcacgctccgagcgccgtcagaatcctccgacgaccagggccagcccgcggccaagaggatgctgagccccacccgtgagaaggagctgtcgctgtacaagaagaccaagcgggccatcagcagcaagaagtacagcgtggccaaggcagaggccgaggcagaggccaccacgcccatcgagctcatcagcagaggccctgacggccgcttcgtgatggaccctgccgagatggagccctcgctgaagagcaggcgcatcgagggcttccccttcgccgaggagacggacatgtaccccgagttccgccagtcggacgaggagaacgaggacccactggtgcccacatctgtggccgccctgaagtcccagctcacccctctgtcatccagccaggagtcctacctgccaccaccagcatacagccctcggttccagccccgcgggctggagggccccggtggcctggaaggtcggcttcaggccacaggccaggcccggccccctgccccccggcccttccaccatggccagtattatgggtacctcagcagcagcagccctggggaggtggagccgcccccgttctacgtgccagaagtgggcagccccctgagctccgtcatgtcgtccccgcccctgcccaccgaggggccctttggccaccccaccatccccgaggagaatggagagaatgcatccaacagcacgctgcccttgactcagacacctacaggagggcgctcccctgagccctggggccggccagaattccccttcggggggctggagaccccagcgatgatgttcccccaccagctgccaccctgtgatgtgcccgagagtctgcagcccaaggccggcctcccccgaggactgccccccacctccctgcaggtgcccgcggcctacccgggcatcctgtctctggaggcaccgaagggttgggcaggcaagtcgcccggcaggggccctgtcccagcgccccccgccgccaagtggcaggacagacctatgcaacctctggtaagccaagggcagctgcgacatacaagccaaggcatgggcatacctgtgctgccttaccccgagccggctgagccgggggcgcacggcggccccagcacatttggcctggacacccggtggtatgagccccagccccggccccggcctagccctcggcaggccaggcgcgccgagcccagtttacatcaagtggtgctacagccctcccggctctcacctctgacccaaagccccctcagctcccgcaccggctcccctgagctcgccgcccgtgcccggcctcgcccgggcctcctgcagcaggcagagatgtcagagatcaccctgcagccgccggctgcagtcagcttttctcgaaagtctacgccgtccacaggctccccctcccagagcagccgcagtgggagtcccagctaccggcccgccatgggcttcaccactctggccaccggctacccttcccctccacccggccccgcccctgctgggcctggggacagcttggacgtgtttggacagacgccttcccctcgaaggacgggggaggaattgctccgaccggagaccccaccacccacgttacctacttcagggaagctgcagagagacagaccagctcccgcgaccagcccgcctgagagagcactctctaaactgtag

SEQ ID NO: 142448 - DNA, 618 bp, Homo sapiens
  Payload ID: 8151
  Gene Symbol: IGSF9B
  Gene Name: immunoglobulin superfamily, member 9B
  ENST ID: ENST00000533160
  CDS Start-End: 1-618
tcctttctgtgtccaacctggccgtccccatcaggcgcccacggcctgcgagaggagcccgagtttgtgacggcaagagctggggagagcgtggtcctgcgatgcgacgtgatccacccagtgacgggacagcccccaccctatgtcgtagagtggttcaagttcggggtccccatccctatcttcatcaagtttggctactacccgccgcacgtggaccctgagtatgcaggccgggccagtcttcatgataaggcatctctgcggctggaacaagttcgctctgaggaccagggctggtatgagtgcaaagtgctcatgctggaccagcagtatgacaccttccacaatggcagctgggtccacctcaccatcaacgcccctcccacctttacagaaacacccccccagtacatcgaggccaaggagggtggtagtatcaccatgacctgcacagcttttgggaaccccaagcccattgtcacctggctcaaggaggggacgctcctcggtgctagtgggaaataccaggtgagtgacggcagcctgacagtgacatcggtcagtcgggaggacagaggtgcctacacctgccgagcgtacagcattcagggggag

SEQ ID NO: 142449 - DNA, 565 bp, Homo sapiens
  Payload ID: 8151
  Gene Symbol: IGSF9B
  Gene Name: immunoglobulin superfamily, member 9B
  ENST ID: ENST00000526663
  CDS Start-End: 80-565
agtctgctggaggcagctgacctatttttcttgggaatcttcctgcttttctgttctctcttgcgtgaataagcaggagatggggcctccaagagggctctggagaaagagtccgagtgcgccagagctgggaggagtctcagccggcctgactgtcctttctgagaaggtcccgctcagcctggctttctgtcctctgtggccccttgcctccctcctggtcgtgtgtgcccccgagatggagcgggggcctgtgacttgcacacaggcacagactgtacgaggcgcccacggcctgcgagaggagcccgagtttgtgacggcaagagctggggagagcgtggtcctgcgatgcgacgtgatccacccagtgacgggacagcccccaccctatgtcgtagagtggttcaagttcggggtccccatccctatcttcatcaagtttggctactacccgccgcacgtggaccctgagtatgcaggccgggccagtcttcatgataaggcatctctgcggctggaacaagttcgctctgaggaccagggctggtatgagtgcaaagtg

SEQ ID NO: 142450 - DNA, 5050 bp, Homo sapiens
  Payload ID: 8151
  Gene Symbol: IGSF9B
  Gene Name: immunoglobulin superfamily, member 9B
  Uniprot ID: Q9UPX0
  ENST ID: ENST00000533871
  CDS Start-End: 232-4545
gctccgcccgggcgagtagtgcaggtgccgctgcgccggggccggggaggcgcgcgccgagccgagcggagcctaggagggatggagagctggccacccgggctgcaggagcaccggcgcggggcgtaggcggcgcgaggcgggcgcgaggcgggcgctcgggcgcgaggcgcgtgcgggcgcgggagcactttgcgataggatgaggctccgggctggcgcggtagtactatgatttggtatgtggccactttcatagcaagtgtgatcggcacccgagggcttgcggctgaaggcgcccacggcctgcgagaggagcccgagtttgtgacggcaagagctggggagagcgtggtcctgcgatgcgacgtgatccacccagtgacgggacagcccccaccctatgtcgtagagtggttcaagttcggggtccccatccctatcttcatcaagtttggctactacccgccgcacgtggaccctgagtatgcaggccgggccagtcttcatgataaggcatctctgcggctggaacaagttcgctctgaggaccagggctggtatgagtgcaaagtgctcatgctggaccagcagtatgacaccttccacaatggcagctgggtccacctcaccatcaacgcccctcccacctttacagaaacacccccccagtacatcgaggccaaggagggtggtagtatcaccatgacctgcacagcttttgggaaccccaagcccattgtcacctggctcaaggaggggacgctcctcggtgctagtgggaaataccaggtgagtgacggcagcctgacagtgacatcggtcagtcgggaggacagaggtgcctacacctgccgagcgtacagcattcagggggaggctgtccacacgactcacctgcttgtccaagggccccctttcatcgtctcccctcctgagaacatcaccgtcaacatctcccaggatgctctgctcacctgccgggcagaggcgtatccgggcaacctcacctacacctggtactggcaggacgagaacgtctactttcagaacgacctgaagctgagggtgcgcatcctaatcgatgggaccctgatcatcttccgggtgaagccggaggactcggggaagtacacctgtgtgcccagcaacagcctggggcgctccccctccgcctcggcgtacctgaccgtgcagtacccagcgcgtgtcctcaacatgccccctgtgatttacgtgcccgtggggatccatggctacatccgctgccctgtggacgcagaaccaccggccaccgtggtcaagtggaacaaggacggccgtcccctgcaggttgagaagaacctcggttggaccctgatggaggatggctccattcgaattgaggaggccacagaggaggctcttggcacttatacctgtgtgccttacaacactctggggaccatgggccagtctgcccctgcgaggcttgtcctgaaggaccccccctatttcacggtgctaccaggctgggagtacaggcaggaggccggccgggagctacttatcccctgtgctgccgcaggggacccctttcctgtcatcacttggagaaaggtagggaagcccagcagaagcaagcacagtgccctgcccagtgggagcctgcagttccgtgccctgagtaaggaggaccacggggagtgggaatgtgtcgccaccaacgtggtcacgagcatcactgccagcacccacctcaccgtcatcggcaccagcccccatgccccgggcagtgtccgggtccaggtctccatgacaactgccaacgtgtcctgggaaccaggctatgatggaggctacgagcagacattctcagtttggatgaagcgggcacagtttgggccccatgactggctgtccttgccagtgccgccaggacccagctggctgctggtggacaccctggagcctgagacagcgtaccagttcagcgtcctggcccagaacaagctgggaaccagcgccttcagtgaggtggtcactgtgaacactttagcattccctattacaactccagaacccctggtgctggtcaccccaccgaggtgcctcatagccaatcggactcagcagggtgtgctcctgtcctggcttccgcctgccaaccacagctttcccatcgaccgctacatcatggagttccgtgtcgcagagcgctgggagttgctcgacgatggcatccccggcaccgaaggagagttctttgccaaggatctgtcacaggacacgtggtatgagttccgggttctggccgtcatgcaggatctgatcagcgagcccagcaacatcgccggcgtctccagcacagacatcttcccgcagccggacctgaccgaggatgggctggcgcggcctgtgctggcgggaatcgtagctaccatctgcttcttggcagctgccatcctgttcagcaccctggctgcctgctttgtcaacaagcagcgcaagcgtaagctcaagcgcaaaaaagaccctccactctccatcacccactgcaggaagagcctggagtctcccttgtcctctggcaaggtgagccccgagagcatccgcacgctccgagcgccgtcagaatcctccgacgaccagggccagcccgcggccaagaggatgctgagccccacccgtgagaaggagctgtcgctgtacaagaagaccaagcgggccatcagcagcaagaagtacagcgtggccaaggcagaggccgaggcagaggccaccacgcccatcgagctcatcagcagaggccctgacggccgcttcgtgatggaccctgccgagatggagccctcgctgaagagcaggcgcatcgagggcttccccttcgccgaggagacggacatgtaccccgagttccgccagtcggacgaggagaacgaggacccactggtgcccacatctgtggccgccctgaagtcccagctcacccctctgtcatccagccaggagtcctacctgccaccaccagcatacagccctcggttccagccccgcgggctggagggccccggtggcctggaaggtcggcttcaggccacaggccaggcccggccccctgccccccggcccttccaccatggccagtattatgggtacctcagcagcagcagccctggggaggtggagccgcccccgttctacgtgccagaagtgggcagccccctgagctccgtcatgtcgtccccgcccctgcccaccgaggggccctttggccaccccaccatccccgaggagaatggagagaatgcatccaacagcacgctgcccttgactcagacacctacaggagggcgctcccctgagccctggggccggccagaattccccttcggggggctggagaccccagcgatgatgttcccccaccagctgccaccctgtgatgtgcccgagagtctgcagcccaaggccggcctcccccgaggactgccccccacctccctgcaggtgcccgcggcctacccgggcatcctgtctctggaggcaccgaagggttgggcaggcaagtcgcccggcaggggccctgtcccagcgccccccgccgccaagtggcaggacagacctatgcaacctctggtaagccaagggcagctgcgacatacaagccaaggcatgggcatacctgtgctgccttaccccgagccggctgagccgggggcgcacggcggccccagcacatttggcctggacacccggtggtatgagccccagccccggccccggcctagccctcggcaggccaggcgcgccgagcccagtttacatcaagtggtgctacagccctcccggctctcacctctgacccaaagccccctcagctcccgcaccggctcccctgagctcgccgcccgtgcccggcctcgcccgggcctcctgcagcaggcagagatgtcagagatcaccctgcagccgccggctgcagtcagcttttctcgaaagtctacgccgtccacaggctccccctcccagagcagccgcagtgggagtcccagctaccggcccgccatgggcttcaccactctggccaccggctacccttcccctccacccggccccgcccctgctgggcctggggacagcttggacgtgtttggacagacgccttcccctcgaaggacgggggaggaattgctccgaccggagaccccaccacccacgttacctacttcaggaacacttccacctgcacccgggaacgctgctgcgcctgagaggctggaggctctgaaataccaacggataaagaagcccaaaaagtcatccaagggctcttcgaagtcaaagaaacgatccgacgattctgcctcccagactcagcagcttcccaactctcaggttctgtggcccgatgaagctgtctgcctccgaaagaagaagagacattctcgtcctgacccctttgcccggctctcagacttgtgccaccgccagcttccggaagaccagacagcgattctcaacagtgtggaccacgatgacccaggacatgccactttgctgtgactccaccccactctaggtgtccccggggcgaggttgctgggctcaggcagggagggccactgtgtgggggtgtgtcctcctccgtctgccaagggcggcccagacctttgtcctgcatgccccctcttttgccagagcgggtgtctccctccagatcctggccgcctgtcttcaggacggagggtgggcacaccttccacctgtgggtcgaggtcaggaagtggattggagactgggcaacacctgtctcctcccctccgccccctgcttcactaggttgatttttctcatctcttccaatgtctttggaagtgaagaggaaagcaatggcttttactgctctctgcttctgtttcagtttttcaagtcctggaagaaggctggacttaatgtccatcttccacaccccacatatatatagatatagatacagatgcatatgtctgtagtgtgtgggtttctctatgtgtgtatatatatatatatatatgtacattgaggcaaa

SEQ ID NO: 142451 - DNA, 4439 bp, Homo sapiens
  Payload ID: 8152
  Gene Symbol: IGFN1
  Gene Name: immunoglobulin-like and fibronectin type III domain containing 1
  Uniprot ID: Q86VF2
  ENST ID: ENST00000295591
  CDS Start-End: 131-3886
gtcaatccagagcctcagcaagcagcagctggaaacggggaagagggagcagacaggaagcgggaggtcagctgtacacccagggtaatagaacttctaccctcagaggagtcaaagaggaggcagaactatggcaggaaagctccggaagtcccacatccctggagtgagcatctggcagctggtggaggagatccctgaaggctgcagcacgccggactttgagcagaagcccgtcacctcggctctgccagaggggaaaaatgctgtctttcgggctgtggtctgtggggagcccaggcccgaggtgcgttggcagaactccaaaggtgacctcagtgattccagcaagtacaagatctcctccagccctggcagcaaggagcacgtgctgcagatcaacaagctgacaggcgaggacacggatctgtaccgctgcacagcagtaaatgcgtacggagaggccgcttgctcagtgagactcactgtcatcgaagttggctttcggaagaatcggaagaggcacagggaaccgcaggaagacctcaggaaggagctgatggacttccggaagttgctgaaaaagagggccccaccagcccccaagaaaaagatggaccttgagcagatatggcagctgctgatgacagcagacaggaaggactacgagaagatctgcttgaagtatggcatcgtcgactaccgtggcatgttgcgcaggctgcaggagatgaagaaggaacaggaggacaagatggcacagtacatcaacaccatctccagcttaagacacatcagggtcaccaaggatgggaatgcaaagtttgacttggagctggatctcaaggattctcagagcaagatttacctgtataaggatggtgagatgatcccctatggcttcaacaaccaaaccaagcactgtctgcgccggctggggaagcgctatgagttccagattcaagacctgaggcctgaggactctggcatttaccaggtcaaggtggaggatgctgtggtcttctccacagaactggaggccagtgccatccccccaagagtggtggtcccactggcggagacccactgtgaggagcagggtgacgcagtctttgaatgtaccctctccagcccctgccctagtgcagcctggcatttccggcaccggctactccaccccagtgacaaatatgaagtgtatgtgtcccctgacgggctgacccaccggctggtggtgaggggggcacgtttctcagacatgggcccctattcgctgggcaccgggctctacacttccagcgcctggctggtggttgaagctgggaaggataaagaccttcagtccacaagtgctgaccacaaactgcagagcaggagaagtggcaaagacggcaggttggacatctatggagagaggagagatgctacccggagttccacatccagatacaagcctggcactggcagtttctccaaggatgcccaaggccccatgggccacttctcccagggcctggctgacatggaagtgcagccgggggaggccgccacactctcctgtaccctcaccagtgacctgggacctggcacctggtttaaggatggcgtcaagctcaccacccaggatggagtcatctttaagcaagacggtctcgtgcacagcctcttcatcacgcatgtgcaggggacccaagctgggaggtacacctttgtagctggtgaccagcagagcgaggccaccctgaccgtccaggattcccctaccattgctccagatgtgacagagaaactgagagagccactggtggtcaaggctgggaagccggtgatagtgaagatccccttccagagccacctccccattcaggctgcctggaggaaggacggggctgaggtggtgggcagcagtgacagggaggcccaggtggacctgggggatggctacacgcggctgtgcctccccagcgcaggcaggaaggactgtggccagtacagcgtgacactgaggagtgagggaggctctgtgcaggccgagctcactctgcaagtcatagacaagcctgatcccccacaaggccccatggaggttcaggattgccatagggctggcgtctgcctccgctggcggcccccaagggacaatgggggccggactgtagagtgctacgtggtggagagacggcaggctggcaggagcacttggctgaaggtgggcgaggcccccgctgacagcaccaccttcacggatgcccatgtggagccaggcaggaagtataccttccgagtgcgggctgtgacctcagagggggctggcgaggccctggagtctgaggagatattggtggctcctgaggctctccccaaggccccttccgcgccagccatcctgtcggcctccagccagggcatcacactgacatggacagcacctcggggccccggcagcgcccacatcctgggctacctgatcgagaggcgtaagaaggggagcaacacctggacggcagtgaacgaccagccggtgcctgagaggaggtggacggtggcggacgtgcggcagggctgtcagtatgagttccgggtcacagctgtggctccctcaggtcccggagagcctggacctccatcggatgctgtctttgctcgggaccccatgagaccccctgggctggtgaggaatctccaagtcacagacagatcgaacaccagcatcactctgagctgggctgggccagacacccaggaaggggatgaagcccaggggtatgtggtggagctgtgcagctcagacagtctccagtggctcccgtgccatgtgggcaccgtgccagtcaccacctacacggccaaggggcttcggcctggagagggctacttcgtgcgggtgacagcagttaatgaaggaggccagagccagcccagtgccctggacacattagtgcaagccatgcctgttactgtctgtcccaagttcctcgtggactccagcaccaaggacttgctgacagtcaaggtcggggacacagttcgtgtgcccgtctcctttgaagccatgcccatgcctgaggtgacctggctgaaggatggcttgcccttgcccaaaagaagtgtgactgtcactaaggatggcctcacccagcttctgatccctgtggctggactctcagacagtggtctctacactgtggtgctgaggaccctgcaggggaaggaggttgcccacagcttccgtatcagggtggcagcatgcccgcaggcccctgggcccatccacctgcaggagaacgtgcctgggacggtgacggccgagtgggaaccctctcctgacgaggcccaggatgtcccgctgcactacgcggtgttcacacgctcctcagcgcacggtccctggcacgaggcagccgaccgcatccacaccaaccgcttcaccctcctgggcatcctccccggccacgaataccacttcagggtggtggccaagaatgagctgggggccagcaaaccctcggacaccagccagccctggtgcatcccccggcagcgcgacaggttcacagtgaaggctccgtgctaccgggagcccgacctgagccagaagccccggttcctggtgggcctgcggtcccacctgctgccccagggctgcgagtgctgcatgagctgtgccgtgcagggctcgccccggccccacgtcacctggttcaagaatgaccgcagcctggaaggaaaccccgcggtgtacagcactgacctgctgggcgtgtgctccctcaccatccccagcgtatccccgaaggacagcggggagtacaaggctgtggctgagaacacgctgggccaggcagtcagcactgccaccctcattgtcatagaacccagcacctagcctcacctcaccctgggatggtcctggacccttgaagcttcacttccgacacctgcactggcccgggaagccaatcccaaggatggaggctgtgcccagagccccaggaaaatgggagtgagaagatgcctggcgaggttttggccaggaggacgtgaagtccttggggaagaaaaacaagggaggagggcattccacctcctggctccaagctaagtcactcaacagaatgacagcgaacctcctggaccctcaccatatgggtttctttcttcttcgcttcaggagatccagagggcacctgcctgcaggatgggccggctccttattttcctgggctgagccgtttggagggagggtgggcacagctgggcctgctgtgaccactgggagggaagaggagaggaggtcagaggacctgggtgaggactagggcatcaaggtcgtgtgtgtgggtgggggcagcctccacctcctggattcaagagattccaggggtgcagcaagtgctttctatgcgtttcttcattaaaacattaggctaatacaggca

SEQ ID NO: 142452 - DNA, 11810 bp, Homo sapiens
  Payload ID: 8152
  Gene Symbol: IGFN1
  Gene Name: immunoglobulin-like and fibronectin type III domain containing 1
  Uniprot ID: Q86VF2
  ENST ID: ENST00000335211
  CDS Start-End: 131-11257
gtcaatccagagcctcagcaagcagcagctggaaacggggaagagggagcagacaggaagcgggaggtcagctgtacacccagggtaatagaacttctaccctcagaggagtcaaagaggaggcagaactatggcaggaaagctccggaagtcccacatccctggagtgagcatctggcagctggtggaggagatccctgaaggctgcagcacgccggactttgagcagaagcccgtcacctcggctctgccagaggggaaaaatgctgtctttcgggctgtggtctgtggggagcccaggcccgaggtgcgttggcagaactccaaaggtgacctcagtgattccagcaagtacaagatctcctccagccctggcagcaaggagcacgtgctgcagatcaacaagctgacaggcgaggacacggatctgtaccgctgcacagcagtaaatgcgtacggagaggccgcttgctcagtgagactcactgtcatcgaagttggctttcggaagaatcggaagaggcacagggaaccgcaggaagacctcaggaaggagctgatggacttccggaagttgctgaaaaagagggccccaccagcccccaagaaaaagatggaccttgagcagatatggcagctgctgatgacagcagacaggaaggactacgagaagatctgcttgaagtatggcatcgtcgactaccgtggcatgttgcgcaggctgcaggagatgaagaaggaacaggaggacaagatggcacagtacatcaacaccatctccagcttaagacacatcagggtcaccaaggatgggaatgcaaagtttgacttggagctggatctcaaggattctcagagcaagatttacctgtataaggatggtgagatgatcccctatggcttcaacaaccaaaccaagcactgtctgcgccggctggggaagcgctatgagttccagattcaagacctgaggcctgaggactctggcatttaccaggtcaaggtggaggatgctgtggtcttctccacagaactggaggccagtgccatccccccaagagtggtggtcccactggcggagacccactgtgaggagcagggtgacgcagtctttgaatgtaccctctccagcccctgccctagtgcagcctggcatttccggcaccggctactccaccccagtgacaaatatgaagtgtatgtgtcccctgacgggctgacccaccggctggtggtgaggggggcacgtttctcagacatgggcccctattcgctgggcaccgggctctacacttccagcgcctggctggtggttgaagctgggaaggataaagaccttcagtccacaagtgctgaccacaaactgcagaggcaaggagcccaggcatcaggagcagaagagtctgggagcatcgagagccagggagagaaatccagagagcagggccccagggggggctcccttgaaggggctgggccggcttctgggctccagcacatagccagcccagacagggatggccttggcagacatggctactccttgatgggggacaaagggacagctgactcagcctggggccctggacaggagggcgagggctttccagtagcagagggaagcagagccactcttcccagggaaaatcaatcccacagagagggaggctgggccagaagccttgcagagaggccccatctacagggagagagctcagaatcagggttgggcctcccagaaaaacaacagcaagatcgtggcagagacagcaacagtgatgaatgctggaggaaagcaggaggctgggaggctgggtccagtcggcttcaggctggaggactggggagcagcagggaaggaaaggagcacagaggggacagtggaagacaactggacaggcatgccccagagcaactgtgggatgctcgactgggacctgggagaggaaagagcgacctgcagggatgccagtctgatcctgtagggtcctggccaagaggaaagcagatagagatttcacaggatgacagcctggctgagatggacagaggggatgctccaagtagggaaagggggagaggaatagtagtgtggggtggtgggactggcctgggagaagctggagacagcaatggggcaggaggtcctggcaccctggagcttactggaggaagaggttctggctccaaggtgggcatggcccctgaatcctggggttctcagggaggtagagatgctgactatggggaagccaggggctactgggggtcaggagagttgctagaacagatacctggaggcaaggacttccaggaaccatcaatatcaggtggtagaaaattccttctgggagatgggagtcctgagatcaaagctgaagactcactgcaggaggcagatggtatatgccggggggagtctgtagttacaggaagtgcctacaaaactggccctggaggcccaggagaccccagaggctgcgaaggtgtcctacaggagctcaggggaagggatggccaggaaacagcttgggcctcgggtgaggtagagtatgaccccagaagcttccagtcttcccagggctggacagcaggtcacagagcagcagggggtattggcagaatagaatctaagggcacaagtccttgggatgacacaccatctagcctcagaaaaactggggcccaccatgggcctggagtgctggggcccagtggaggacaagagggtatgggtggtatctgggtggctggactgacggagtctggtcagggggtggatgccagaagccactggctaagtagggctccaggcctgggtgctcagggatctggggggacactaggagataagaaaggattaagaggtcctgggtcaatagggtctgaaccagatttctggaatgggtcagggagctccagagtaaaaggacccagaggtgagacaggctataaggatggcttggaaggtcccgggagaatggaatctaggtacgagggtggcttaggatattctagggaaataagctctaaaagcggggctggttatagctatggctcaggggttccaggagaaatggggtccggccatggtgctggttgtagagtttcccctagggcacctgcgggagtggagtctgaggaagggggtgggtacaggcatggctccggagcgcctgggggagtgtggtctggaaatgaagattctggccctgcaggaggagggtctgggagagttgccagtcttaaaaatggctcaggtggtcctgatggagcacccatgaatgacaccaggaattgggcctctgcatgccaggcaggcatggaccctaggggagggcaccattcagatggtggcctagggagtcctggggtgacagggtctgcgggtagaggtggtctcaaggcccctggagtagtggagactgttgggatgggatgtgtggaagcagaaccagagagctctggaagaataaggccttggggtcagactggaaattatgggggcttcagagcctcagaggccctgggggcctttggagaaggaggctatgaagatggctctgggggtccaggagccatgggaccagggtctctgagggcaggaagcaaagtgggtgagggggatgggacaagatgccctggtgctaaggcctctggagctggagctggttatagggatgataccaggcaccctgagtcactcgcacctcacaatggggccgcttctgggagccagtgggcttatggggctggcaatgtgctgggttatgaggatggatcagaacttccagggcctcagggaactggggtcagaacagcctatggagaaaggtcaaggggccttgggcctaggagtacagggccagggggtgaggcaggctttagagatggttcaggaggcctccaaggaatgggatcagcagatgggccaggttgtaggaagggtattgggagttctggggaaatggggtcagtggataaggaaggttataagaaagatttgggggctcctgagaatatgggttcggggagcaaggcagattatagggatggtgtagggggttctggggcaatggggtcaatggatgaagcaggttataggaaagatttaggggctcctgagggaataagttcagggagcaaggcagattataggggtggtttacaggattccagggaagcgggttcagggagcaaggcagattatagcggtggtttaaagggttccagggaaatcgggtcaatggatgaaacagataataggaaagatttgggggttcctgagggaatgggtgcaggttacagggctggtttaaggggtcctggggagatggggtcactggatgagtcaggtcataggaatgggattggaggttatggggaaatggggtcaggttatagggaggatttgggggctcctgagggaatgggcacagggagcaaggcaggttatagggatggcttaaggggttctggagaaatgaggtcaatggatgaggcaggttataggaaaaatttgggagctcctgagagaatggattcagggagcaaggcaggttacaggggtggtttaaggggttctggggaaatggggttaattgaggcaggctataggaaagatttgggggtttctgagggagggggttcagggagcaaagcaggttataggggtggcttaggttctggggaaatggggtctgtggataaggcaggctataggaaggatttgggggcttctgaggcaataggttcagggagtaaggcaggttttacggatggtttaggaggttctgaagaaatggggtcagtgaataaggcaggttataggaaggatttgggggctcctaagggaatgggttcagggagtaaggcaagttttagggatggtttaggaggttctggagaaatggggtcagtgaatgaagcaggttataggaaggacttgggggttcctgagggaataggttcaggaagtaaggcaggttttagggatggtttagggggttctgaagaaatggggtcagtgaataaggcaggttataggaaggatttgggggctcctaagggaataggttcagggagcaaggcaggttttagggatggtttagggagttctggggaaatggggtcaatggatgaggcaggttataggaagaatttgggggctcctgagggaataggttcagggagtaaggcaggttttagggatggtttagggagttctgtagaaatggggtcagtgaatgaggcaggttataggaaggatttgggggctcctgagggaatgggttcagggagtaaggcaggtttcagggatggtttagggggttctggagaaatggggtcagtgaatgaagcaggttataggaaggatttgggtgctcctaagggaataggttcagggagcaaggcagattttagggatgctttagggagttctggggaaatggggtcaatggatgaggcaggttataggaaggatttgtgggctcctgagggaataggttcaggaagtaaggcaggttttagggatggtttagggagttctgtagaaatggggtcagtgaatgaggcaggttataggaaggatttgggggctcctgagggaatgggttcagggagtaaggcaggtttcagggatggtttagggggttctggagaaatggggtcagtgaatgaagcaggttataggaaggatttgggtgctcctaagggaataggttcagggagcaaggcagattttagggatgctttagggagttctggggaaatggggtcaatggatgaggcaggttataggaaggatttgtgggctcctgagggaataggttcaggaagtaaggcaggttttagggatggtttagggagttctgtagaaatggggtcagtgaatgaggcaggttataggaaggatttgggggctcctgagggaatgggttcagggagtaaggaaggtttcagggatggtttagggggttctgaagaaatggggtcagtgaataaggcaggttataggaaggatttgggggctcctaagggaatgggttcagggagtaaggaaggtttcagggatggtttagggggttctgaggaaatggggtcaatggatgaggcaggttataggaaggatttgggggctcctgagggaataggttcagggagtaaggcaggtttcagggatggtttagggggttctgaagaaatgcggtcaatggatgaggcaggttataggaaggatttgggggctcctgagagaataggttcaggaagtaaggcaggttttagggatggtttagggagttctgtagaaatggggtcagtgaatgaggcaggttataggaaggatttaggggctcctaagggaatgggttcagggagtaagacaggtttcagggatggtttagggggttctgaagaaatggagtcaatggatgaggcaggttataggaaggatttgggggctcctgagggaataggttcaggaagtaaggcaggttttagggatggtttagggagttctacagaaatggggtcagtgaatgaggcaggttataggaaggatttgggggctcctaagggaatgggttcagagagtaaggcaggttttagggatggtttagggagttctggggaaatggggtcaatggatgaggcaggttataggaaggatttgggagctcctgagggaatgggttcagggagtaaggcaggtttcagggatggtttagggggttctgaagaaatggggtcagtgaataaggcaggttataggaaggatttgggggctcctaagggaatgggttcagggagtaaggcaggtttcagggatggtttagggagttctggggaaatggggtcaatggatgaggcagattataggaaggatttgggagctcctgaggaaatgggttcaggcagttacacagattacaggaatggtttaggcagttctggaaaaatcagttcaggggatgaggcaggttataagaatgttttagggggttctgggaggaatccattagggagcgaggcaggttctaggggtagtttggaggattctgggtacattttgtcatggaatgaggcaggttctaggcaaggctttgggggaactagtggcatggggtcagggagtgaggtcagttatagaggaggctcaggaggatctggggaaacgggaccagagggtaagatgggttatggagatggttcagggaggcttggagtaccaggctcactggctggaataggacatgaggctggacccagaggccataaagccatgggtcacaggtcaggatattgggtagcatcagagggtgacacgaactccaaggatggtccagagcgagccagggaaaccaggcttgtggatggggcaggacctggggtggaacctgggatggctggaatgccaggcactgcaggtggcatggcacacagagacagcctcaggggcacaggggtgctggggtctcagggagggcgacagactctttcagatgagcgaggctccaccaaagatcttgggggctatggaacttcagggatccctgaggcctcggaggctgctggtgccaagggaaaaccagatgtcaaagaatggcaagacagttctgggactccagggtcttctagagacagaggggctcccagggtgaaggataggtctccagaccaagcagggataatgggggcttctgggtttcttgatggcaagggggcagtggaaggtgagacctgggcaggaatggctgctctagggtctggatatgaacgggacatctggaaagcaggcccaggaatgacagacaggggtagagttgctggccagggggggttggcatctcagggaggtggggactcacttttgggaggcagaagggtaggctcagggagttcagtggggacaggtcaggatctggacagcggctctatgcctgggggaaggggcaagtcaacatcagggcctgctgatagacaagggacgagcaatgcttgggctcctgattgggaaaaccaggggtttagccaaggcagcatagatgctgggaagcagcccgcaggctccagagcttccggttctctgcaggagaaagatgccgcttttggtgggacccatgaagggccagggggctttaagggtggggagggtgcaccaggccaagaggcggctggtggatgccgaagcccatggtccctggatagcaaaggttcaagtcctggaaggggcagttctgttgatgcagaggactcaggtatcctgggcaaggggaattctactgagtgggggaatgccctcaccccaaaacctggggagtccggacctcagggagcctggaatggcttagatggtccctttggcagaaaagcctctagagataggtcaggagggacccaggacctgagctctcagcgaggcaagggacagagaggaggaaagaggtccctcggggagcaggggtccctggaggctgagaatggtgaggtccagggtcctggggccctaaaggaggatgaagggcagggagtggaagaggctgggaggtcaggcaggaggcctggctcactcaggagcaggtctcaggcacagtcaggggctgaggttggaggaggaaagagaaggggagcagacgaggctggaagcatggggtggcagcctatgggagagaactgggggtgcctggaggagatgctgaatgaagatcagagccgggagccccctggtcaccttggtagcaggagaagtggcaaagacggcaggttggacatctatggagagaggagagatgctacccggagttccacatccagatacaagcctggcactggcagtttctccaaggatgcccaaggccccatgggccacttctcccagggcctggctgacatggaagtgcagccgggggaggccgccacactctcctgtaccctcaccagtgacctgggacctggcacctggtttaaggatggcgtcaagctcaccacccaggatggagtcatctttaagcaagacggtctcgtgcacagcctcttcatcacgcatgtgcaggggacccaagctgggaggtacacctttgtagctggtgaccagcagagcgaggccaccctgaccgtccaggattcccctaccattgctccagatgtgacagagaaactgagagagccactggtggtcaaggctgggaagccggtgatagtgaagatccccttccagagccacctccccattcaggctgcctggaggaaggacggggctgaggtggtgggcagcagtgacagggaggcccaggtggacctgggggatggctacacgcggctgtgcctccccagcgcaggcaggaaggactgtggccagtacagcgtgacactgaggagtgagggaggctctgtgcaggccgagctcactctgcaagtcatagacaagcctgatcccccacaaggccccatggaggttcaggattgccatagggctggcgtctgcctccgctggcggcccccaagggacaatgggggccggactgtagagtgctacgtggtggagagacggcaggctggcaggagcacttggctgaaggtgggcgaggcccccgctgacagcaccaccttcacggatgcccatgtggagccaggcaggaagtataccttccgagtgcgggctgtgacctcagagggggctggcgaggccctggagtctgaggagatattggtggctcctgaggctctccccaaggccccttccgcgccagccatcctgtcggcctccagccagggcatcacactgacatggacagcacctcggggccccggcagcgcccacatcctgggctacctgatcgagaggcgtaagaaggggagcaacacctggacggcagtgaacgaccagccggtgcctgagaggaggtggacggtggcggacgtgcggcagggctgtcagtatgagttccgggtcacagctgtggctccctcaggtcccggagagcctggacctccatcggatgctgtctttgctcgggaccccatgagaccccctgggctggtgaggaatctccaagtcacagacagatcgaacaccagcatcactctgagctgggctgggccagacacccaggaaggggatgaagcccaggggtatgtggtggagctgtgcagctcagacagtctccagtggctcccgtgccatgtgggcaccgtgccagtcaccacctacacggccaaggggcttcggcctggagagggctacttcgtgcgggtgacagcagttaatgaaggaggccagagccagcccagtgccctggacacattagtgcaagccatgcctgttactgtctgtcccaagttcctcgtggactccagcaccaaggacttgctgacagtcaaggtcggggacacagttcgtgtgcccgtctcctttgaagccatgcccatgcctgaggtgacctggctgaaggatggcttgcccttgcccaaaagaagtgtgactgtcactaaggatggcctcacccagcttctgatccctgtggctggactctcagacagtggtctctacactgtggtgctgaggaccctgcaggggaaggaggttgcccacagcttccgtatcagggtggcagcatgcccgcaggcccctgggcccatccacctgcaggagaacgtgcctgggacggtgacggccgagtgggaaccctctcctgacgaggcccaggatgtcccgctgcactacgcggtgttcacacgctcctcagcgcacggtccctggcacgaggcagccgaccgcatccacaccaaccgcttcaccctcctgggcatcctccccggccacgaataccacttcagggtggtggccaagaatgagctgggggccagcaaaccctcggacaccagccagccctggtgcatcccccggcagcgcgacaggttcacagtgaaggctccgtgctaccgggagcccgacctgagccagaagccccggttcctggtgggcctgcggtcccacctgctgccccagggctgcgagtgctgcatgagctgtgccgtgcagggctcgccccggccccacgtcacctggttcaagaatgaccgcagcctggaaggaaaccccgcggtgtacagcactgacctgctgggcgtgtgctccctcaccatccccagcgtatccccgaaggacagcggggagtacaaggctgtggctgagaacacgctgggccaggcagtcagcactgccaccctcattgtcatagaacccagcacctagcctcacctcaccctgggatggtcctggacccttgaagcttcacttccgacacctgcactggcccgggaagccaatcccaaggatggaggctgtgcccagagccccaggaaaatgggagtgagaagatgcctggcgaggttttggccaggaggacgtgaagtccttggggaagaaaaacaagggaggagggcattccacctcctggctccaagctaagtcactcaacagaatgacagcgaacctcctggaccctcaccatatgggtttctttcttcttcgcttcaggagatccagagggcacctgcctgcaggatgggccggctccttattttcctgggctgagccgtttggagggagggtgggcacagctgggcctgctgtgaccactgggagggaagaggagaggaggtcagaggacctgggtgaggactagggcatcaaggtcgtgtgtgtgggtgggggcagcctccacctcctggattcaagagattccaggggtgcagcaagtgctttctatgcgtttcttcattaaaacattaggctaatacaggca

SEQ ID NO: 142453 - DNA, 3932 bp, Homo sapiens
  Payload ID: 8152
  Gene Symbol: IGFN1
  Gene Name: immunoglobulin-like and fibronectin type III domain containing 1
  ENST ID: ENST00000412892
  CDS Start-End: 1-3379
aggcagaagggtaggctcagggagttcagtggggacaggtcaggatctggacagcggctctatgcctgggggaaggggcaagtcaacatcagggcctgctgatagacaagggacgagcaatgcttgggctcctgattgggaaaaccaggggtttagccaaggcagcatagatgctgggaagcagcccgcaggctccagagcttccggttctctgcaggagaaagatgccgcttttggtgggacccatgaagggccagggggctttaagggtggggagggtgcaccaggccaagaggcggctggtggatgccgaagcccatggtccctggatagcaaaggttcaagtcctggaaggggcagttctgttgatgcagaggactcaggtatcctgggcaaggggaattctactgagtgggggaatgccctcaccccaaaacctggggagtccggacctcagggagcctggaatggcttagatggtccctttggcagaaaagcctctagagataggtcaggagggacccaggacctgagctctcagcgaggcaagggacagagaggaggaaagaggtccctcggggagcaggggtccctggaggctgagaatggtgaggtccagggtcctggggccctaaaggaggatgaagggcagggagtggaagaggctgggaggtcaggcaggaggcctggctcactcaggagcaggtctcaggcacagtcaggggctgaggttggaggaggaaagagaaggggagcagacgaggctggaagcatggggtggcagcctatgggagagaactgggggtgcctggaggagatgctgaatgaagatcagagccgggagccccctggtcaccttggtagcaggagaagtggcaaagacggcaggttggacatctatggagagaggagagatgctacccggagttccacatccagatacaagcctggcactggcagtttctccaaggatgcccaaggccccatgggccacttctcccagggcctggctgacatggaagtgcagccgggggaggccgccacactctcctgtaccctcaccagtgacctgggacctggcacctggtttaaggatggcgtcaagctcaccacccaggatggagtcatctttaagcaagacggtctcgtgcacagcctcttcatcacgcatgtgcaggggacccaagctgggaggtacacctttgtagctggtgaccagcagagcgaggccaccctgaccgtccaggattcccctaccattgctccagatgtgacagagaaactgagagagccactggtggtcaaggctgggaagccggtgatagtgaagatccccttccagagccacctccccattcaggctgcctggaggaaggacggggctgaggtggtgggcagcagtgacagggaggcccaggtggacctgggggatggctacacgcggctgtgcctccccagcgcaggcaggaaggactgtggccagtacagcgtgacactgaggagtgagggaggctctgtgcaggccgagctcactctgcaagtcatagacaagcctgatcccccacaaggccccatggaggttcaggattgccatagggctggcgtctgcctccgctggcggcccccaagggacaatgggggccggactgtagagtgctacgtggtggagagacggcaggctggcaggagcacttggctgaaggtgggcgaggcccccgctgacagcaccaccttcacggatgcccatgtggagccaggcaggaagtataccttccgagtgcgggctgtgacctcagagggggctggcgaggccctggagtctgaggagatattggtggctcctgaggctctccccaaggccccttccgcgccagccatcctgtcggcctccagccagggcatcacactgacatggacagcacctcggggccccggcagcgcccacatcctgggctacctgatcgagaggcgtaagaaggggagcaacacctggacggcagtgaacgaccagccggtgcctgagaggaggtggacggtggcggacgtgcggcagggctgtcagtatgagttccgggtcacagctgtggctccctcaggtcccggagagcctggacctccatcggatgctgtctttgctcgggaccccatgagaccccctgggctggtgaggaatctccaagtcacagacagatcgaacaccagcatcactctgagctgggctgggccagacacccaggaaggggatgaagcccaggggtatgtggtggagctgtgcagctcagacagtctccagtggctcccgtgccatgtgggcaccgtgccagtcaccacctacacggccaaggggcttcggcctggagagggctacttcgtgcgggtgacagcagttaatgaaggaggccagagccagcccagtgccctggacacattagtgcaagccatgcctgttactgtctgtcccaagttcctcgtggactccagcaccaaggacttgctgacagtcaaggtcggggacacagttcgtgtgcccgtctcctttgaagccatgcccatgcctgaggtgacctggctgaaggatggcttgcccttgcccaaaagaagtgtgactgtcactaaggatggcctcacccagcttctgatccctgtggctggactctcagacagtggtctctacactgtggtgctgaggaccctgcaggggaaggaggttgcccacagcttccgtatcagggtggcagcatgcccgcaggcccctgggcccatccacctgcaggagaacgtgcctgggacggtgacggccgagtgggaaccctctcctgacgaggcccaggatgtcccgctgcactacgcggtgttcacacgctcctcagcgcacggtccctggcacgaggcagccgaccgcatccacaccaaccgcttcaccctcctgggcatcctccccggccacgaataccacttcagggtggtggccaagaatgagctgggggccagcaaaccctcggacaccagccagccctggtgcatcccccggcagcgcgacaggttcacagtgaaggctccgtgctaccgggagcccgacctgagccagaagccccggttcctggtgggcctgcggtcccacctgctgccccagggctgcgagtgctgcatgagctgtgccgtgcagggctcgccccggccccacgtcacctggttcaagaatgaccgcagcctggaaggaaaccccgcggtgtacagcactgacctgctgggcgtgtgctccctcaccatccccagcgtatccccgaaggacagcggggagtacaaggctgtggctgagaacacgctgggccaggcagtcagcactgccaccctcattgtcatagaacccagcacctagcctcacctcaccctgggatggtcctggacccttgaagcttcacttccgacacctgcactggcccgggaagccaatcccaaggatggaggctgtgcccagagccccaggaaaatgggagtgagaagatgcctggcgaggttttggccaggaggacgtgaagtccttggggaagaaaaacaagggaggagggcattccacctcctggctccaagctaagtcactcaacagaatgacagcgaacctcctggaccctcaccatatgggtttctttcttcttcgcttcaggagatccagagggcacctgcctgcaggatgggccggctccttattttcctgggctgagccgtttggagggagggtgggcacagctgggcctgctgtgaccactgggagggaagaggagaggaggtcagaggacctgggtgaggactagggcatcaaggtcgtgtgtgtgggtgggggcagcctccacctcctggattcaagagattccaggggtgcagcaagtgctttctatgcgtttcttcattaaaacattaggctaatacaggca

SEQ ID NO: 142454 - DNA, 4085 bp, Homo sapiens
  Payload ID: 8152
  Gene Symbol: IGFN1
  Gene Name: immunoglobulin-like and fibronectin type III domain containing 1
  Uniprot ID: Q86VF2
  ENST ID: ENST00000437879
  CDS Start-End: 131-1843
gtcaatccagagcctcagcaagcagcagctggaaacggggaagagggagcagacaggaagcgggaggtcagctgtacacccagggtaatagaacttctaccctcagaggagtcaaagaggaggcagaactatggcaggaaagctccggaagtcccacatccctggagtgagcatctggcagctggtggaggagatccctgaaggctgcagcacgccggactttgagcagaagcccgtcacctcggctctgccagaggggaaaaatgctgtctttcgggctgtggtctgtggggagcccaggcccgaggtgcgttggcagaactccaaaggtgacctcagtgattccagcaagtacaagatctcctccagccctggcagcaaggagcacgtgctgcagatcaacaagctgacaggcgaggacacggatctgtaccgctgcacagcagtaaatgcgtacggagaggccgcttgctcagtgagactcactgtcatcgaagttggctttcggaagaatcggaagaggcacagggaaccgcaggaagacctcaggaaggagctgatggacttccggaagttgctgaaaaagagggccccaccagcccccaagaaaaagatggaccttgagcagatatggcagctgctgatgacagcagacaggaaggactacgagaagatctgcttgaagtatggcatcgtcgactaccgtggcatgttgcgcaggctgcaggagatgaagaaggaacaggaggacaagatggcacagtacatcaacaccatctccagcttaagacacatcagggtcaccaaggatgggaatgcaaagtttgacttggagctggatctcaaggattctcagagcaagatttacctgtataaggatggtgagatgatcccctatggcttcaacaaccaaaccaagcactgtctgcgccggctggggaagcgctatgagttccagattcaagacctgaggcctgaggactctggcatttaccaggtcaaggtggaggatgctgtggtcttctccacagaactggaggccagtgccatccccccaagagtggtggtcccactggcggagacccactgtgaggagcagggtgacgcagtctttgaatgtaccctctccagcccctgccctagtgcagcctggcatttccggcaccggctactccaccccagtgacaaatatgaagtgtatgtgtcccctgacgggctgacccaccggctggtggtgaggggggcacgtttctcagacatgggcccctattcgctgggcaccgggctctacacttccagcgcctggctggtggttgaagctgggaaggataaagaccttcagtccacaagtgctgaccacaaactgcagagcaggagaagtggcaaagacggcaggttggacatctatggagagaggagagatgctacccggagttccacatccagatacaagcctggcactggcagtttctccaaggatgcccaaggccccatgggccacttctcccagggcctggctgacatggaagtgcagccgggggaggccgccacactctcctgtaccctcaccagtgacctgggacctggcacctggtttaaggatggcgtcaagctcaccacccaggatggagtcatctttaagcaagacggtctcgtgcacagcctcttcatcacgcatgtgcaggggacccaagctgggaggtacacctttgtagctggtgaccagcagagcgaggccaccctgaccgtccaggattcccctaccattgctccagatgtgacagagaaactgagagagccactggtggtcaaggctgggaagccgatccagacctaccactaactctgctcagactgcttaggaagaagcagttgagatgaacacagtgctgggctcctgctgggggggaggagccggttatgcttctctgaccccaatacactgggccctcaggaagttgctgggtaggatggtggtccccagccctgagtggtgccagcaagacaagcctgatcccccacaaggccccatggaggttcaggattgccatagggctggcgtctgcctccgctggcggcccccaagggacaatgggggccggactgtagagtgctacgtggtggagagacggcaggctggcaggagcacttggctgaaggtgggcgaggcccccgctgacagcaccaccttcacggatgcccatgtggagccaggcaggaagtataccttccgagtgcgggctgtgacctcagagggggctggcgaggccctggagtctgaggagatattggtggctcctgaggctctccccaaggccccttccgcgccagccatcctgtcggcctccagccagggcatcacactgacatggacagcacctcggggccccggcagcgcccacatcctgggctacctgatcgagaggcgtaagaaggggagcaacacctggacggcagtgaacgaccagccggtgcctgagaggaggtggacggtggcggacgtgcggcagggctgtcagtatgagttccgggtcacagctgtggctccctcaggtcccggagagcctggacctccatcggatgctgtctttgctcgggaccccatgagaccccctgggctggtgaggaatctccaagtcacagacagatcgaacaccagcatcactctgagctgggctgggccagacacccaggaaggggatgaagcccaggggtatgtggtggagctgtgcagctcagacagtctccagtggctcccgtgccatgtgggcaccgtgccagtcaccacctacacggccaaggggcttcggcctggagagggctacttcgtgcgggtgacagcagttaatgaaggaggccagagccagcccagtgccctggacacattagtgcaagccatgcctgttactgtctgtcccaagttcctcgtggactccagcaccaaggacttgctgacagtcaaggtcggggacacagttcgtgtgcccgtctcctttgaagccatgcccatgcctgaggtgacctggctgaaggatggcttgcccttgcccaaaagaagtgtgactgtcactaaggatggcctcacccagcttctgatccctgtggctggactctcagacagtggtctctacactgtggtgctgaggaccctgcaggggaaggaggttgcccacagcttccgtatcagggtggcagcatgcccgcaggcccctgggcccatccacctgcaggagaacgtgcctgggacggtgacggccgagtgggaaccctctcctgacgaggcccaggatgtcccgctgcactacgcggtgttcacacgctcctcagcgcacggtccctggcacgaggcagccgaccgcatccacaccaaccgcttcaccctcctgggcatcctccccggccacgaataccacttcagggtggtggccaagaatgagctgggggccagcaaaccctcggacaccagccagccctggtgcatcccccggcagcgcgacaggttcacagtgaaggctccgtgctaccgggagcccgacctgagccagaagccccggttcctggtgggcctgcggtcccacctgctgccccagggctgcgagtgctgcatgagctgtgccgtgcagggctcgccccggccccacgtcacctggttcaagaatgaccgcagcctggaaggaaaccccgcggtgtacagcactgacctgctgggcgtgtgctccctcaccatccccagcgtatccccgaaggacagcggggagtacaaggctgtggctgagaacacgctgggccaggcagtcagcactgccaccctcattgtcatagaacccagcacctagcctcacctcaccctgggatggtcctggacccttgaagcttcacttccgacacctgcactggcccgggaagccaatcccaaggatggaggctgtgcccagagccccaggaaaatgggagtgagaagatgcctggcgaggttttggccaggaggacgtgaagtccttggggaagaaaaacaagggaggagggcattccacctcctggctccaagctaagtcactcaacagaatgacagcgaacctcctgga

SEQ ID NO: 142455 - DNA, 2659 bp, Homo sapiens
  Payload ID: 8153
  Gene Symbol: ILDR1
  Gene Name: immunoglobulin-like domain containing receptor 1
  Uniprot ID: Q86SU0
  ENST ID: ENST00000273691
  CDS Start-End: 107-1615
ccgaggggttccttggagaaggtggtgcgtcctggggcggcagctgaggaagaaagacgcagtgccccgaagcccctgagctgaaaagggccagaaagggggcggcatggcatggcccaaactgcccgcaccttggctgctgctctgcacctggctcccagcagggtgcctgtccttgcttgtgacggtccagcacacagaacgctatgtcaccctgtttgcctctatcatcctcaaatgtgactacaccacctctgcccagctccaggacgtggtggtgacatggcgcttcaagtccttctgcaaggaccctatctttgactactactcagcgtcataccaggcagctttatccctgggccaggacccatccaatgactgcaacgacaaccagcgggaagttcgcatagtggcccagcggcgggggcagaatgagcccgtgctgggggtagattaccggcagcgcaagatcaccatccagaaccgagcagatctcgtgataaatgaagtgatgtggtgggaccatggagtgtattactgcaccattgaggctccaggggacacatcaggagaccccgataaggaagtaaagctcatcgtcctacactggctgacagtgatcttcatcatcctgggagccctcctcctcctgctgctgattggagtgtgctggtgccagtgctgtcctcagtattgctgctgctatatccgctgtccctgctgtcctgcccactgctgctgtcctgaggaagatttgtccctgccgtccagcctcccgcagatgccaatgacccagaccaccaatcagcctcccatcgccaatggtgtcctggagtatttggagaaagaactgcggaacctcaacctggcccagcctctgccccctgacctcaaaggcagatttggccatccctgcagcatgctgtcctccctgggctctgaggtcgtggaacgcagaatcatccacctgcccccactgatcagagacctgtcatcctcaaggaggaccagtgactccctgcaccagcagtggctcaccccaattccctccaggccctgggatctgagggaggggagaagccaccaccattaccctgatttccaccaggagctccaggaccgggggccaaagtcttgggcattggaaagaagggagttggacccatcgtggagtggaaggcaccgtagctctaggctgaatgggtcacccatacactggtcagacagggacagcctaagcgatgtcccctcatccagtgaggcacgctggcggccgagccaccctcctttcaggagccgctgtcaggagaggccccgcaggcccagcccccgggagagcactcagaggcacgggagacgacgcaggcaccgcagctactctcctcccttgccctccggcctcagttcctggagctctgaagaggacaaggagaggcagccccagagctggcgggcccaccgccgcggctcgcactccccacactggcccgaggagaagccgcctagctaccgctcacttgatatcactccaggcaagaatagcaggaaaaaagggagtgtggagaggcgctcggagaaagacagctctcatagtggaaggagtgtggtcatttagtcaccaagcacagcacaacttctgtggctacttctcggctcctgtgtgtcatcagcatcacctaggtttccagctgacttgggaactgcaagtctgagtctaacagtttttggcttagattctgagaatcaaatagaagaattttaaatacaagagtttgagattgggtatagtggctcacacctgtaatcacagcactttgggaggctaagaatcacttgagactaggagttcaagatcagcctgggaaacatagtgagaccccgtctctacaaaaaatataaaaattagttaggtgtggtggcatgcacttgtagtcccagctactcaagaggctgaggcagaaggatcccttgagcccaggagtgcaaggctgcaatgagccaggatcccatgatcacacatctgtattccagcctgggcaatagagcaagtccccattactaaaaaacccaaaaggccaaaaaacaaaaaagttagagttcgaggaattaccaactgtagttttagccttggttcatgctctcttgcatatttatataatctctgacttgtaatggaccctgactggaatgtgatccctcaggaacttagtagcctgagtctttcagtagactacactgcccagaaccctggccattctcaaaatgagaacttgggaatgtttaagaagaaatcaaacatgtttcaggaaaaggaaatctatggagtattatagggacattcccatgggaatgtatcttcctccatggcatgtcttgagggtcctttcttgttaggagtttatcctgccagcccataaatggactatttattgtaagtgtagaaaatcacagagaagcagttttgcaccagccttattcctgtgccttgttttcctcttgctctttttttacctgtatatctaatttatattttcatatatattgtgtattgattgaagtcactttaaatccttcttgggaatgacacagtatataaataaggaagaaagaaaacatgccaagctgagcatgctgctccaaataaatatctgctttccta

SEQ ID NO: 142456 - DNA, 2226 bp, Homo sapiens
  Payload ID: 8153
  Gene Symbol: ILDR1
  Gene Name: immunoglobulin-like domain containing receptor 1
  Uniprot ID: Q86SU0
  ENST ID: ENST00000344209
  CDS Start-End: 128-1768
ctgcgccgagggaggggaaacccgaggggttccttggagaaggtggtgcgtcctggggcggcagctgaggaagaaagacgcagtgccccgaagcccctgagctgaaaagggccagaaagggggcggcatggcatggcccaaactgcccgcaccttggctgctgctctgcacctggctcccagcagggtgcctgtccttgcttgtgacggtccagcacacagaacgctatgtcaccctgtttgcctctatcatcctcaaatgtgactacaccacctctgcccagctccaggacgtggtggtgacatggcgcttcaagtccttctgcaaggaccctatctttgactactactcagcgtcataccaggcagctttatccctgggccaggacccatccaatgactgcaacgacaaccagcgggaagttcgcatagtggcccagcggcgggggcagaatgagcccgtgctgggggtagattaccggcagcgcaagatcaccatccagaaccgagcagatctcgtgataaatgaagtgatgtggtgggaccatggagtgtattactgcaccattgaggctccaggggacacatcaggagaccccgataaggaagtaaagctcatcgtcctacactggctgacagtgatcttcatcatcctgggagccctcctcctcctgctgctgattggagtgtgctggtgccagtgctgtcctcagtattgctgctgctatatccgctgtccctgctgtcctgcccactgctgctgtcctgaggaagccctggcccgccaccgctacatgaagcaggcccaggccctaggtcctcagatgatgggaaaacccctgtactggggggcggacaggagctcccaggtttcatcttatccaatgcacccgctgctgcagcgagatttgtccctgccgtccagcctcccgcagatgccaatgacccagaccaccaatcagcctcccatcgccaatggtgtcctggagtatttggagaaagaactgcggaacctcaacctggcccagcctctgccccctgacctcaaaggcagatttggccatccctgcagcatgctgtcctccctgggctctgaggtcgtggaacgcagaatcatccacctgcccccactgatcagagacctgtcatcctcaaggaggaccagtgactccctgcaccagcagtggctcaccccaattccctccaggccctgggatctgagggaggggagaagccaccaccattaccctgatttccaccaggagctccaggaccgggggccaaagtcttgggcattggaaagaagggagttggacccatcgtggagtggaaggcaccgtagctctaggctgaatgggtcacccatacactggtcagacagggacagcctaagcgatgtcccctcatccagtgaggcacgctggcggccgagccaccctcctttcaggagccgctgtcaggagaggccccgcaggcccagcccccgggagagcactcagaggcacgggagacgacgcaggcaccgcagctactctcctcccttgccctccggcctcagttcctggagctctgaagaggacaaggagaggcagccccagagctggcgggcccaccgccgcggctcgcactccccacactggcccgaggagaagccgcctagctaccgctcacttgatatcactccaggcaagaatagcaggaaaaaagggagtgtggagaggcgctcggagaaagacagctctcatagtggaaggagtgtggtcatttagtcaccaagcacagcacaacttctgtggctacttctcggctcctgtgtgtcatcagcatcacctaggtttccagctgacttgggaactgcaagtctgagtctaacagtttttggcttagattctgagaatcaaatagaagaattttaaatacaagagtttgagattgggtatagtggctcacacctgtaatcacagcactttgggaggctaagaatcacttgagactaggagttcaagatcagcctgggaaacatagtgagaccccgtctctacaaaaaatataaaaattagttaggtgtggtggcatgcacttgtagtcccagctactcaagaggctgaggcagaaggatcccttgagcccaggagtgcaaggctgcaatgagccaggatcccatgatcacacatctgtattccagcctgggcaatagagcaagtccccattactaaaaaacccaaaa

SEQ ID NO: 142457 - DNA, 1456 bp, Homo sapiens
  Payload ID: 8153
  Gene Symbol: ILDR1
  Gene Name: immunoglobulin-like domain containing receptor 1
  Uniprot ID: Q86SU0
  ENST ID: ENST00000393631
  CDS Start-End: 46-1419
gtgccccgaagcccctgagctgaaaagggccagaaagggggcggcatggcatggcccaaactgcccgcaccttggctgctgctctgcacctggctcccagcagggtgcctgtccttgcttgtgacggtccagcacacagaacgctatgtcaccctgtttgcctctatcatcctcaaatgtgactacaccacctctgcccagctccaggacgtggtggtgacatggcgcttcaagtccttctgcaaggaccctatctttgactactactcagcgtcataccaggcagctttatccctgggccaggacccatccaatgactgcaacgacaaccagcgggaagttcgcatagtggcccagcggcgggggcagaatgagcccgtgctgggggtagattaccggcagcgcaagatcaccatccagaaccccctggcccgccaccgctacatgaagcaggcccaggccctaggtcctcagatgatgggaaaacccctgtactggggggcggacaggagctcccaggtttcatcttatccaatgcacccgctgctgcagcgagatttgtccctgccgtccagcctcccgcagatgccaatgacccagaccaccaatcagcctcccatcgccaatggtgtcctggagtatttggagaaagaactgcggaacctcaacctggcccagcctctgccccctgacctcaaaggcagatttggccatccctgcagcatgctgtcctccctgggctctgaggtcgtggaacgcagaatcatccacctgcccccactgatcagagacctgtcatcctcaaggaggaccagtgactccctgcaccagcagtggctcaccccaattccctccaggccctgggatctgagggaggggagaagccaccaccattaccctgatttccaccaggagctccaggaccgggggccaaagtcttgggcattggaaagaagggagttggacccatcgtggagtggaaggcaccgtagctctaggctgaatgggtcacccatacactggtcagacagggacagcctaagcgatgtcccctcatccagtgaggcacgctggcggccgagccaccctcctttcaggagccgctgtcaggagaggccccgcaggcccagcccccgggagagcactcagaggcacgggagacgacgcaggcaccgcagctactctcctcccttgccctccggcctcagttcctggagctctgaagaggacaaggagaggcagccccagagctggcgggcccaccgccgcggctcgcactccccacactggcccgaggagaagccgcctagctaccgctcacttgatatcactccaggcaagaatagcaggaaaaaagggagtgtggagaggcgctcggagaaagacagctctcatagtggaaggagtgtggtcatttagtcaccaagcacagcacaacttctgtggctacttctcg

SEQ ID NO: 142458 - DNA, 1612 bp, Homo sapiens
  Payload ID: 8153
  Gene Symbol: ILDR1
  Gene Name: immunoglobulin-like domain containing receptor 1
  Uniprot ID: Q86SU0
  ENST ID: ENST00000462014
  CDS Start-End: 47-1591
taagaacccagactctgtctgtgagctcctagccaggtcaggcaggatggcaggcaatatcttttgcccatttgcattgtttttcttacccatgagcagagtaggtcaccttcagcattttctcctgctcttggctttagggtgcctgtccttgcttgtgacggtccagcacacagaacgctatgtcaccctgtttgcctctatcatcctcaaatgtgactacaccacctctgcccagctccaggacgtggtggtgacatggcgcttcaagtccttctgcaaggaccctatctttgactactactcagcgtcataccaggcagctttatccctgggccaggacccatccaatgactgcaacgacaaccagcgggaagttcgcatagtggcccagcggcgggggcagaatgagcccgtgctgggggtagattaccggcagcgcaagatcaccatccagaaccgagcagatctcgtgataaatgaagtgatgtggtgggaccatggagtgtattactgcaccattgaggctccaggggacacatcaggagaccccgataaggaagtaaagctcatcgtcctacactggctgacagtgatcttcatcatcctgggagccctcctcctcctgctgctgattggagtgtgctggtgccagtgctgtcctcagtattgctgctgctatatccgctgtccctgctgtcctgcccactgctgctgtcctgaggaagatttgtccctgccgtccagcctcccgcagatgccaatgacccagaccaccaatcagcctcccatcgccaatggtgtcctggagtatttggagaaagaactgcggaacctcaacctggcccagcctctgccccctgacctcaaaggcagatttggccatccctgcagcatgctgtcctccctgggctctgaggtcgtggaacgcagaatcatccacctgcccccactgatcagagacctgtcatcctcaaggaggaccagtgactccctgcaccagcagtggctcaccccaattccctccaggccctgggatctgagggaggggagaagccaccaccattaccctgatttccaccaggagctccaggaccgggggccaaagtcttgggcattggaaagaagggagttggacccatcgtggagtggaaggcaccgtagctctaggctgaatgggtcacccatacactggtcagacagggacagcctaagcgatgtcccctcatccagtgaggcacgctggcggccgagccaccctcctttcaggagccgctgtcaggagaggccccgcaggcccagcccccgggagagcactcagaggcacgggagacgacgcaggcaccgcagctactctcctcccttgccctccggcctcagttcctggagctctgaagaggacaaggagaggcagccccagagctggcgggcccaccgccgcggctcgcactccccacactggcccgaggagaagccgcctagctaccgctcacttgatatcactccaggcaagaatagcaggaaaaaagggagtgtggagaggcgctcggagaaagacagctctcatagtggaaggagtgtggtcatttagtcaccaagcacagcacaactt

SEQ ID NO: 142459 - DNA, 13140 bp, Homo sapiens
  Payload ID: 8154
  Gene Symbol: ILDR2
  Gene Name: immunoglobulin-like domain containing receptor 2
  Uniprot ID: Q71H61
  ENST ID: ENST00000271417
  CDS Start-End: 57-1976
gttccagccatttcccactttcctcactccgtaattcggctgggaagttggggaagatggatagggtcttgctgaggtggatttctctcttctggctaacagccatggtcgaaggccttcaggtcacagtgcccgacaagaagaaggtggccatgctcttccagcccactgtgcttcgctgccacttctcaacatcctcccatcagcctgcagttgtgcagtggaagttcaagtcctactgccaggatcgcatgggagaatccttgggcatgtcctctacccgggcccaatctctcagcaagagaaacctggaatgggacccctacttggattgtttggacagcaggaggactgttcgagtagtagcttcaaaacagggctcgactgtcaccctgggagatttctacaggggcagagagatcacgattgttcatgatgcagatcttcaaattggaaagcttatgtggggagacagcggactctattactgtattatcaccaccccagatgacctggaggggaaaaatgaggactcagtggaactgctggtgttgggcaggacagggctgcttgctgatctcttgcccagttttgctgtggagattatgccagagtgggtgtttgttggcctggtgctcctgggcgtcttcctcttcttcgtcctggtggggatctgctggtgccagtgctgccctcacagctgctgctgctatgtccgctgcccatgctgcccagattcctgctgctgccctcaagccttgtatgaagcagggaaagcagcaaaggccgggtaccctccctctgtctccggtgtccccggcccttactccatcccctctgtccctttgggaggagccccctcatctggcatgctgatggacaagccgcatccacctcccttggcaccaagtgactccactggaggaagccacagtgttcgcaaaggttaccggatccaggctgacaaagagagagactccatgaaggtcctgtactatgttgagaaggagctggctcagtttgatccagccagaaggatgagaggcagatataacaacaccatctcagaactcagctccctacatgaggaggacagcaatttccgccagtctttccatcagatgagaagcaagcagttccctgtgtctggggacttggagagcaatcctgactattggtcaggtgtcatgggaggcagcagtggggcaagccgcgggccctcagccatggagtataacaaagaggatcgagagagcttcaggcacagccagccgcgctccaagtcggagatgctgtcgcggaagaacttcgccacgggggtgccggccgtttccatggacgagctggcggccttcgctgactcctacggccagcggccccgccgggcagacggcaacagtcacgaggcgcggggcgggagccgcttcgagcgctcggagtcgcgggcgcacagcggcttctaccaggacgactccttggaggagtactacggtcagcgcagccgcagccgcgagcccctgaccgatgctgaccgcggctgggccttcagccccgcgcgccgcagacccgccgaggacgcgcacctgccgcggctggtgagccgcacgccaggcaccgcacccaaatacgaccactcgtacctgggcagcgcgcgggagcgccaggcgcggcccgagggcgccagccgcggtggcagcctggagacgccatccaagcggagcgcgcagctcggcccgcgcagcgcctcctactacgcttggtcgccgcccggcacctacaaggccggctcgtcgcaggacgaccaggaggacgcgtccgacgacgcgctgccgccctacagcgagctggagctgacccgcggcccgtcctaccgcggccgcgacctgccctaccacagcaactcggagaagaagaggaaaaaggagcccgccaagaaaaccaatgactttccaaccaggatgtcccttgtggtctgatgttgtcaacatttctctggataatgagaaatcagacatggactacggggacaagacacaaatctaagaaccagcaggcccaggaccttctctggccatcaccttggaagatttgctgatctctgctttggcaagggatggcaggcagcctttaagggaggctgatttcaaacctctgtgcccatctaactagtttgagaagcttaccaagaaagcaagaatgtgtgagaacattcctacatacagagtttctcaactatagcgtttatcctgcccagcctcctcccttaacagaaccaggactccatttgcaattctgaaagagagttagctctggactgctaaactccagaaattgcctatgcctacaatatgcttttctatacctcctgtgctatacttagagacagaagaatttattactactattagaaggccttcttctgacaagggaagatagcttcaagtcaaaatataccttttatccccatcactttacagtcactagtcaatgactgttgttacactaaaatcaaaaggcctttggtgagctcagtgacagtgacctctgggacaatcacagaaatgacttcactgctgttctgaatgacaattcttaagtggctaggacaaagcaaaagcgagtatacctttttgaaaagctgtctaagtggtatttccttttccattctgagaacgtaaactgctttttccttttctgctgcacatgtcaatatcggagtcttagacattaagggctcttctcttcctcccctctcctggacttcccacaggttggtgccacacacacagccctgcctccctctgcactctgattagattgtcattgaatgccttgtgataaatgcttaaaatatacacatgaaagagaagagggaggaaagaggagaaagcagtaatgcatatagaaaagaatgagaaggaatttaaaagggaaataacatcatctcattatattttgaatgtggaccatttcacccacaaacttcactcagtcttttccggttttgtgcttcacttgccgttaattgtttctgccatcccagttctgccattctaggacatgggggatgtggaacatacagcatttggcctgactagactgccactatggctgctttcaagagattagagatactgctttctcaggaaggagtacttcctattcccacccttgcctaaatgatagattttgcctaaatcccaaagctagatctctggattttatcgtttgtgtagatagcaaaaatggccacgaactctttccttctcatcaagaggtgccatcttttttccaaccccttgaatctggagttggctatgtgatttgatttagccagtagcccaacaaatgtgacacaagcagagacttgaaaagttcttgtgcatggggcttgtcctcttttgctgctcttgggaaccttgcaactaccatcaggtgaacaagcctggactatcctgctgcatgacaaaagaaaagggcccagttacccttgtcaccctatctgacagcccgtcaacttccagctgatgcagacatgggtgagtccaggtgataccaatagaagaactgcctagctgaacccagcccaaatttctgattcctactcgaggcgtgagaagttggtgcattctttatgttcatttctctttaagaacaaacctgactcgttcttgtctgaatgttcatccctgaacctcttaatccatccaaacttgtgtttctcatagcctccactattgttgacaaatttttatcaaagcttttcaccctgcactcttgtggagtggaggataatgcttgactttgctatcccttaatccagcagtggtttcttccctgtctatggatccgtggacaacctctgaagatctcttctttaccatccttttggtcttctccagagccaccctactggggctagaccctattctcaaagtaccattcctctagtatccatttgtacttcatgacatttccaaaaaaagtcctatgtttgcaatgaaataagaaagtggctgggtgagggtcggagggatgagctggtatgtgtcattgcttggagaattgacctaccaaaggacttccgtgttgctttggccagtcccagagaaatcaggagaacagttgaacccagtgctggcacttccaagggctggaagacacaagccataaccctggtgctgagttttagacttgctggtgtccctggcctctgaaagcctaggtctagcctgtctgtttggaccccagttcagatggaaaagatgataaaaaacatttcttagtcaccagctttggatttcaacttgctcaggcaattttggagaatattgggtagctgtggtagctattatcgctttatactgagcactgtgtcaggcttttcaccaccaaagagcctcatagcaccagctgcagagaccaaaaataatgtttttttaaagctacggacgtatgattttggtgaaggttgagggtagcaatgggaaagaaagaattattaaaattggaaacctgcaattccaaagacaacaaaactacagatagactgaaaagtacaaagaagatagcaggctactgaattaaccttgggagttgggaccaggttgtcctttgtagaactggataaatcattcagacttccaggctttcagtagagagaaaaagcagttgtttctgggtatatggacaggagttaaggctgagttgacaagtcaaaacttcttgtcctcagcacccctgactttcctctatgtgtccttttgtttcttctcctttgaatagtgtgtcctgcacaggaaatggttatatttgttagcttctttcctaggtcttattggagtacaaagtaaatcttgtgtaagacataatctctgtccactaggaccccgtaatttaataggggaaataagacatgctcaagaaaggagattttatacatagagtatgaaatagtgctatggataaattataataaaaccagagatttagtttttttaaaaaatgagaatactttgatattaaagtgttgtatgtgtttgtccatcatcttatttaaacatagacttggtgatctgaaaagccaatactcaaaagtctgaactgaaaagaggtgaattaggatcgggaaagggtgagcagcaggggtcccagggggatgatgcataagctgctgtgcttgcctgtgagtcactactgagtcaggaacacgctggaggagggagtgtggatgcaggtggcagggaggtgtcccctggtagatgagctgcttctctaggccatgcatggattcattaggaagttggagacaatggccatggacctggtgcatggcagctattccatccaagcacgttcacaggggagctcagcgtggctgctcctggggctcagttctgcggctgtgagtgctgctgcccatattcaccaacacagggcaggcctcacggagatgctaggcctcacatcccccttctcatgatcctcactgtgcacttgacataggattaggcatactggagatgagaaaaggctgccacccaaacccaaggcacctgaccacatctgtaaatatttctgaatagtccacaaaatttcacataggtagtctgattagatcttgcctttgagagaagctgaagtcacagatactgttgtaatttaccaccgcccctcacccaattttttttaataggtgaagaaaccatcactgccattaatgaagtcacaaacctattaggtctttagactcccaacctctggatcttttctgctgattagtgtttcccaaaattgcctaaccacaagaattaacttgatagctgctgttaaaaaggtattgttggaccctgttttggagattgattgggtgggtctagagccagaattcatatttttaatatgcattccaggagactcctgtgatcagatgcatttggaaatcattgcactaagtcatacctctgggtactccaaacagctagtcctgaggcttccttgggccttagaattttttcttcaaatgtcctggtgaggtccctctcaatcctttggggctggctgtggtgagtcactcagaagtctggctgtgacctggatgggctcaccagagtacgctagtggtagtgggaaaacaggcagagagaaaggagtgtcaggagcactcccagggaggctgttgtagatatttccattcccagaacagtgatctattgtgacagtctcagaacagacaacaagaattacaggtaattttctcattctcttgatatatttttagcaaaacttaaatcatgaatagaaggaaaagatgccattggggaaatagaaaaactcaatcattttataaagcatacaaatcataaggatgactggccaatagcactcccactttggtcttacctaaagttgggtggacaagaataataaaagtcctcattttatatccttccaaaatcagatttaaatgctgccagcatcttaatggaagtctgaaattgattgataggatgtagaaatccaaattcactaaaatagggggccagctacataaagtcctagaaggaaaaagtgcctcgcttttttctgccattatcctaccccctagtcatctggggaattgatctatgaagcttgaagaaggggcatttaacatcagagtggtgcaagggcagtgttgagatgctttaagcagcagcctgagctttagcactatttgaaggggagaaggttaatactaataatatttgtgttatttttatgatatattactgtttacagaacactttcatttgatcccaacatcaactgctgtgatagaggcagggcagatgttgtggtctcattacatagaatgtaaaactgaggttgaaaaatactaagtgacttgtctgtagtcaaatggtttttaaaattataaagccaggccttctgactgtcttgtctggtgtcctttccaattccttaaatactcatgggactggaatctgggtattccagattccagtttctcttcacagccagacatctggtgagaagagccgtagacttgatgcttgttcatatgtcatggatgtggcgaagccatgaagacagatactgttgctgcttcatccaactaagcaccattcattcctcaaatgctaatctaagagggagttgtagcttcactcaaggagagtttcgttttctttttctttcttttttttttttttgagacagggtcttgctctgtggcccatggtgcagtgcagtgcagtggtgctatcagctcactgcagtctcaaactcctagctcaagcaatcctcctccctcagcctcccaagtaggtaggactacagatatatgccaccacgtccagcaaattttgtttgtttgtagagatggggtcttgctatatttcccaggcttgtctcaaactcctggcctcaagtgatcctcccaccttggctgcctaaagtgctggtattacagacatgagccactgaacccagctgagagcctcactttcatcacctgtgctgtgaggggtaatatatgcttcaggttttctggagaatccttcttgcagagaagtttctgaatgaaacgacagattcatctggattcagaactccaggcagaagctgcttaacagcaaaaatctggcatcttcactacattttaagattttaggtagaactaagagggatcagatatagaggaataaggaatgtgagaaggaaaaagatatagtagtttagctaaatttttcttagagtttcttggtggggctggccatgaagtaactagtctgactcatttcttctgggaaggctaaaagagacacagatagcttctcttttaccttggctttaaggaaaagccattttattaacaaaagtattagacacgactgcataagaaatttgctgtgtgagaataaagaacaagggagtaggagggtgggacagagaagggtgagaagttggcttcgtgagggccacctgtcagttgtctttgtgccttgtgacatcaaaactgaaatgtttgtattactgttgtccatgactttttttttctgtgtcagacatacaaattgaatttggttgtaatgttttaaacgtaataaagaattcttacctacatttgttaccaagaactcataattaacacaactatggttaatcatgatctgacattaaatggcctcagcaagagaaagaatcatatgatacatgtccttctctgattgttgtaagtacagtaatagaggaatacatattgtggggttacagagggggctggtactgacagagcaaaaggtatgcttttacagattgtaataagctagataaattctgttgtcactcttactgctctccacagactgtaacattcagaaggagatgaagggtaggaaaggtggttggataaggtgatggtacctagctcatttccaagaggggcacaagcatatgcctgctagaaattacacttggggaagggaggaaggaagctattcgtgggaggacatttcaagttctgttaagatttgagaaattccacagcaccataattaagaggaggcaattaaaaacctttgttagcaaaagaagtgataaatacctctgagaactattaatcctgttttggatggctaagccctctcaagggaattccagattttagtggccttgtcaagcagaaaatctgtttttgcttgaagcatctgggctcaattttttttaagtagttaacttaaaaatgttaacatgtagatttaacttaaagatagactctaaaacagtttgattacctctggattttgtattattttgtgttttaattccatttaggtttttcagctttataaaatatttttgtttttatttataaagtatttgtttagaatcacccacgtgttttttctacacatctttttttcctatatttcagatcttccttttgaaatattttctttctgaaggaagtttacttcagtaatgatttgttggtaggatactcatcagtctttgttgatgtaaaagtctttatttcattcttgttcttgaaagataatttcactgattatgattctagattgatagttattttctttcaggacattgaagttattattacactcccttctgacttttatttttgcttttaagaagtcaattaccagtttaattatccttcctaatctgtctggtctctctgactgttctaaagatttttttgtctctagtgttctttggtttaattaacatgtgaccaggtgtggatttctttttatttatccaaattaggatttgtggtgtttcctaaatccgtggattggatttcccattaaatatggaaaactctcagctatattaacacatcaaatatttcctcttctttttaaactctctcttgagaattccaattgttagattttttttcattctatgccccatattgtttaatctatattttgtatttcctctctctgtgttttctattccctattcaggtaaatttcttcaggtttatcttccagctcactaattttcttttcagctagctctaatctcctttatttgagttttaattttaattaatatgtatttcatttctaggagtttagttctttttcaaatttacatagtccctgttgtcttgtgacttactctttttttttttttacaatgccctcttatttatctgaatatcttaaagatactaacttaaaattttatatccagtaattccaatatctacagtctttgtgggtctacttttagagtttgttacttctgctaactttcactcacagttttttgtttctttatgggttttatagttttttattttaagctcatgtgtggtgcaatgccatattacattgtgccagtcaagaaaaacctttcttgctccttatctgccttacatttctccataatgactctatatatacacagcaaccctggggaagccaggaagagtgaatgattgagtaaggaagaagtaagtgtgctaaatgggaaaaaatgaaaaaggcacacatacacgcattgtgcatttctttctaatgcaacctgtagactgcaaacaaaatcttaagatggggagggcaagaggctttaactttacatattctttagagtttgataatataagagaatggctgtcttaattatagacatagactgttttagggtttaagagtgaacagaaggctgttaattgttaagagtggccaaataaattatggatgtagatttcattcaagaggcaaggaaggccgggccctgtggctcacacctgaaatcccaacagttagggagacaaaggtgggaggatagcttgagccaggagttcaagacctacctgggcagtatagtgagatcccatcctccacaaaaaggtaaaaatttaaaaagacaagaaaaaaaagaagcagcaaggaaggactagactcataggatggattaaaattaggcaaaacaaataattcatttttccctatgattatctaattctaatccaatttttatatgctttcatttcaagaaataagaagtaggctaatttcaggttctcttagaaaatcttggcagagacatcctaatcatactcatcacaccacttaggtgaaaattatattttctgctgaattggttataagcatttcctgaatacttatcaggtggcctaagatgactcaccaaaaatggcatgaggtgtagaagtagctaggaagttgcttagaggtgagtgagttggtctgacacgccatctagtggcacacatccaagagagtgactctattgctaaccttccagtattggatggaggtgtgcctcacattacttaagggaaaagctacatatgaatttatatagcttattttaatgctatatatgaatttatatagatgaatttggcttttgaaaaacaaattaagtgcattaggaattttttctttaaaagtgatatgtttttcttacactttgcaagtttagaacttgccatattatgtttttgaggcaggcttctgtggatataatgtggggaaaaccatgaggtttttgcttgggatcaagtgggatttaggtgcatgccttttgtgatttaaagctattttaaagtgtgcttttaacaccatggaattacaattgttttctgaagtcaggtcaggactctgattctgcagaattatggtgaagccagtttctctttaacaagcaaaaaccgtgtcatcaaactgtacaaccaaaggacctaaatagtccattccctagtcttcagctgtacaaagatgaatcaatctctctgtctcttgttctctctctcactgtctctaaaaaccaagcagaggagaaaattccagacatgttaaaacactttacttttttttaaaacaatccttgctctctggagatattttctcacattttgttacaaattttgtgtagaagcatagccacagtggattttttctggctctttttctttctctgagacgttaatgtccagtagagcaaagctagaaggatatatatatatatatatatatataaatatatatatttatatatatttatatatatatatatatatatatgtatgtatacacacacacatatatatgtcaatttctattaaccttgtttttggaaaaacgctttgttcaactgaatgtagttaaattataatggacattaatatacaaccccaccctcccagcctctttttgttgctggtatgacttaggcacctagcttttctcattccctcaggccaaggcgatagcctcttatgtttcattcctttggcagctgtattagtaaaaaaatttttggttgcaaatgacaggaagatagctcagactagcttaagaacaagaaaaggagaaatggagctcatctattagagagatcctggagtagctcacaggctggaagagctgtaggaactgagaacaaacctgggtctcaatgtagtaagatttaagattccctgtccatcatccacacctacttgtgtttttacatcaatacattttctcagtgaggatagacttactccaaaaggcaggaatatagccactagcagtctgagagtcacaactttccagctcatttgaccaagcaggcaaaaggctttactcatgagaacaatcctggagaaagactgcagtcaactcatattgagtcatgtgcccatatctgagctaatcatgtggccagagatgtggcaagtctgtttatgaccaggaaggtgagactgcgatggactggatagtgggataggaagatttctccaaagagagaagagagttgttattaatagaagaagtgagaatagtgatgctgggcagacaaaacacatacacaacaccaacagctatctgctactgcatccgaaaagattctttatctgcagccacagagccctgaacaaccagcctttccggcttccttttgttgccaattccctcacacgtattattccaacccaaggcttcagggaggctgtttttaccacagttcagtgacaaatcctaccagagccttccatataccagtgaatgtccttggttatacttgtctcgttctgaatttagaaatccatctctgtgtcactgccttcattaggacctttcgtctcctccctggattcttctggtaccctcatttcttgtctcctacttcctgttgtctcctaattattcaccttctactttttttgttagaggttccagacagtttcaagaaaaatacttaatgctgggcaaggtgcttctcccttcctctctaagttccatagaacaggggacattttgcttctctgttgctatggactgagtgttttgtgtcttccccaaatttttatgtcaaaatcctaatcctaatgtgatggtatttgggcatgaggcctttgggaggtgattaggtcagtagggtggagctcttatgatggaattagtgtccttataagaagagacaggagagagattacttcctctctttctctgccatgtgaggatacagcaaggtatctgtctgcaaaccaggaaaaggaccttcgccaggaactgaatgtattggtgcactgagcttggacttcccagattctagaactgtgagaaataaatttctgatatttaa

SEQ ID NO: 142460 - DNA, 1238 bp, Homo sapiens
  Payload ID: 8154
  Gene Symbol: ILDR2
  Gene Name: immunoglobulin-like domain containing receptor 2
  ENST ID: ENST00000529387
  CDS Start-End: 215-718
cggaccccggaagcccgcggcagcgcgcgctcagccggcggcgcgatccagcccccggccccgcctgcgcggccggcccggcgggcgctgcgcccagggacgcccggtgcccgccgctccgccgccgcccgctgccgcggggtgacagcgatccttctgttccagccatttcccactttcctcactccgtaattcggctgggaagttggggaagatggatagggtcttgctgaggtggatttctctcttctggctaacagccatggtcgaaggccttcaggtcacagtgcccgacaagaagaaggtggccatgctcttccagcccactgtgcttcgctgccacttctcaacatcctcccatcagcctgcagttgtgcagtggaagttcaagtcctactgccaggatcgcatgggagaatccttgggcatgtcctctacccgggcccaatctctcagcaagagaaacctggaatgggacccctacttggattgtttggacagcaggaggactgttcgagtagtagcttcaaaacagggctcgactgtcaccctgggagatttctacaggggcagagagatcacgattgttcatgatgcagatcttcaaattggaaagcttatgtggggagacagcggactctattactgtattatcaccaccccagatgacctggaggggaaaaatgaggactcagtggaactgctggtgttggaatgactttccaaccaggatgtcccttgtggtctgatgttgtcaacatttctctggataatgagaaatcagacatggactacggggacaagacacaaatctaagaaccagcaggcccaggaccttctctggccatcaccttggaagatttgctgatctctgctttggcaagggatggcaggcagcctttaagggaggctgatttcaaacctctgtgcccatctaactagtttgagaagcttaccaagaaagcaagaatgtgtgagaacattcctacatacagagtttctcaactatagcgtttatcctgcccagcctcctcccttaacagaaccaggactccatttgcaattctgaaagagagttagctctggactgctaaactccagaaattgcctatgcctacaatatgcttttctatacctcctgtgctatacttagagacagaagaatttattactactattagaaggccttcttctgacaagggaagatagcttcaagtcaaaatataccttttatcccc

SEQ ID NO: 142461 - DNA, 2446 bp, Homo sapiens
  Payload ID: 8154
  Gene Symbol: ILDR2
  Gene Name: immunoglobulin-like domain containing receptor 2
  ENST ID: ENST00000528703
  CDS Start-End: 215-1957
cggaccccggaagcccgcggcagcgcgcgctcagccggcggcgcgatccagcccccggccccgcctgcgcggccggcccggcgggcgctgcgcccagggacgcccggtgcccgccgctccgccgccgcccgctgccgcggggtgacagcgatccttctgttccagccatttcccactttcctcactccgtaattcggctgggaagttggggaagatggatagggtcttgctgaggtggatttctctcttctggctaacagccatggtcgaaggccttcaggtcacagtgcccgacaagaagaaggtggccatgctcttccagcccactgtgcttcgctgccacttctcaacatcctcccatcagcctgcagttgtgcagtggaagttcaagtcctactgccaggatcgcatgggagaatccttgggcatgtcctctacccgggcccaatctctcagcaagagaaacctggaatgggacccctacttggattgtttggacagcaggaggactgttcgagtagtagcttcaaaacagggctcgactgtcaccctgggagatttctacaggggcagagagatcacgattgttcatgatgcagatcttcaaattggaaagcttatgtggggagacagcggactctattactgtattatcaccaccccagatgacctggaggggaaaaatgaggactcagtggaactgctggtgttgggcaggacagggctgcttgctgatctcttgcccagttttgctgtggagattatgccagagtgggtgtttgttggcctggtgctcctgggcgtcttcctcttcttcgtcctggtggggatctgctggtgccagtgctgccctcacagctgctgctgctatgtccgctgcccatgctgcccagattcctgctgctgccctcaagcctttcgcaaaggttaccggatccaggctgacaaagagagagactccatgaaggtcctgtactatgttgagaaggagctggctcagtttgatccagccagaaggatgagaggcagatataacaacaccatctcagaactcagctccctacatgaggaggacagcaatttccgccagtctttccatcagatgagaagcaagcagttccctgtgtctggggacttggagagcaatcctgactattggtcaggtgtcatgggaggcagcagtggggcaagccgcgggccctcagccatggagtataacaaagaggatcgagagagcttcaggcacagccagccgcgctccaagtcggagatgctgtcgcggaagaacttcgccacgggggtgccggccgtttccatggacgagctggcggccttcgctgactcctacggccagcggccccgccgggcagacggcaacagtcacgaggcgcggggcgggagccgcttcgagcgctcggagtcgcgggcgcacagcggcttctaccaggacgactccttggaggagtactacggtcagcgcagccgcagccgcgagcccctgaccgatgctgaccgcggctgggccttcagccccgcgcgccgcagacccgccgaggacgcgcacctgccgcggctggtgagccgcacgccaggcaccgcacccaaatacgaccactcgtacctgggcagcgcgcgggagcgccaggcgcggcccgagggcgccagccgcggtggcagcctggagacgccatccaagcggagcgcgcagctcggcccgcgcagcgcctcctactacgcttggtcgccgcccggcacctacaaggccggctcgtcgcaggacgaccaggaggacgcgtccgacgacgcgctgccgccctacagcgagctggagctgacccgcggcccgtcctaccgcggccgcgacctgccctaccacagcaactcggagaagaagaggaaaaaggagcccgccaagaaaaccaatgactttccaaccaggatgtcccttgtggtctgatgttgtcaacatttctctggataatgagaaatcagacatggactacggggacaagacacaaatctaagaaccagcaggcccaggaccttctctggccatcaccttggaagatttgctgatctctgctttggcaagggatggcaggcagcctttaagggaggctgatttcaaacctctgtgcccatctaactagtttgagaagcttaccaagaaagcaagaatgtgtgagaacattcctacatacagagtttctcaactatagcgtttatcctgcccagcctcctcccttaacagaaccaggactccatttgcaattctgaaagagagttagctctggactgctaaactccagaaattgcctatgcctacaatatgcttttctatacctcctgtgctatacttagagacagaagaatttattactactattagaaggccttcttctgacaagggaagatagcttcaagtcaaaatataccttttatcccc

SEQ ID NO: 142462 - DNA, 2299 bp, Homo sapiens
  Payload ID: 8154
  Gene Symbol: ILDR2
  Gene Name: immunoglobulin-like domain containing receptor 2
  ENST ID: ENST00000526687
  CDS Start-End: 215-1810
cggaccccggaagcccgcggcagcgcgcgctcagccggcggcgcgatccagcccccggccccgcctgcgcggccggcccggcgggcgctgcgcccagggacgcccggtgcccgccgctccgccgccgcccgctgccgcggggtgacagcgatccttctgttccagccatttcccactttcctcactccgtaattcggctgggaagttggggaagatggatagggtcttgctgaggtggatttctctcttctggctaacagccatggtcgaaggccttcaggtcacagtgcccgacaagaagaaggtggccatgctcttccagcccactgtgcttcgctgccacttctcaacatcctcccatcagcctgcagttgtgcagtggaagttcaagtcctactgccaggatcgcatgggagaatccttgggcatgtcctctacccgggcccaatctctcagcaagagaaacctggaatgggacccctacttggattgtttggacagcaggaggactgttcgagtagtagcttcaaaacagggctcgactgtcaccctgggagatttctacaggggcagagagatcacgattgttcatgatgcagatcttcaaattggaaagcttatgtggggagacagcggactctattactgtattatcaccaccccagatgacctggaggggaaaaatgaggactcagtggaactgctggtgttgggcaggacagggctgcttgctgatctcttgcccagttttgctgtggagattatgccagttcgcaaaggttaccggatccaggctgacaaagagagagactccatgaaggtcctgtactatgttgagaaggagctggctcagtttgatccagccagaaggatgagaggcagatataacaacaccatctcagaactcagctccctacatgaggaggacagcaatttccgccagtctttccatcagatgagaagcaagcagttccctgtgtctggggacttggagagcaatcctgactattggtcaggtgtcatgggaggcagcagtggggcaagccgcgggccctcagccatggagtataacaaagaggatcgagagagcttcaggcacagccagccgcgctccaagtcggagatgctgtcgcggaagaacttcgccacgggggtgccggccgtttccatggacgagctggcggccttcgctgactcctacggccagcggccccgccgggcagacggcaacagtcacgaggcgcggggcgggagccgcttcgagcgctcggagtcgcgggcgcacagcggcttctaccaggacgactccttggaggagtactacggtcagcgcagccgcagccgcgagcccctgaccgatgctgaccgcggctgggccttcagccccgcgcgccgcagacccgccgaggacgcgcacctgccgcggctggtgagccgcacgccaggcaccgcacccaaatacgaccactcgtacctgggcagcgcgcgggagcgccaggcgcggcccgagggcgccagccgcggtggcagcctggagacgccatccaagcggagcgcgcagctcggcccgcgcagcgcctcctactacgcttggtcgccgcccggcacctacaaggccggctcgtcgcaggacgaccaggaggacgcgtccgacgacgcgctgccgccctacagcgagctggagctgacccgcggcccgtcctaccgcggccgcgacctgccctaccacagcaactcggagaagaagaggaaaaaggagcccgccaagaaaaccaatgactttccaaccaggatgtcccttgtggtctgatgttgtcaacatttctctggataatgagaaatcagacatggactacggggacaagacacaaatctaagaaccagcaggcccaggaccttctctggccatcaccttggaagatttgctgatctctgctttggcaagggatggcaggcagcctttaagggaggctgatttcaaacctctgtgcccatctaactagtttgagaagcttaccaagaaagcaagaatgtgtgagaacattcctacatacagagtttctcaactatagcgtttatcctgcccagcctcctcccttaacagaaccaggactccatttgcaattctgaaagagagttagctctggactgctaaactccagaaattgcctatgcctacaatatgcttttctatacctcctgtgctatacttagagacagaagaatttattactactattagaaggccttcttctgacaagggaagatagcttcaagtcaaaatataccttttatcccc

SEQ ID NO: 142463 - DNA, 2242 bp, Homo sapiens
  Payload ID: 8154
  Gene Symbol: ILDR2
  Gene Name: immunoglobulin-like domain containing receptor 2
  ENST ID: ENST00000525740
  CDS Start-End: 215-1753
cggaccccggaagcccgcggcagcgcgcgctcagccggcggcgcgatccagcccccggccccgcctgcgcggccggcccggcgggcgctgcgcccagggacgcccggtgcccgccgctccgccgccgcccgctgccgcggggtgacagcgatccttctgttccagccatttcccactttcctcactccgtaattcggctgggaagttggggaagatggatagggtcttgctgaggtggatttctctcttctggctaacagccatggtcgaaggccttcaggtcacagtgcccgacaagaagaaggtggccatgctcttccagcccactgtgcttcgctgccacttctcaacatcctcccatcagcctgcagttgtgcagtggaagttcaagtcctactgccaggatcgcatgggagaatccttgggcatgtcctctacccgggcccaatctctcagcaagagaaacctggaatgggacccctacttggattgtttggacagcaggaggactgttcgagtagtagcttcaaaacagggctcgactgtcaccctgggagatttctacaggggcagagagatcacgattgttcatgatgcagatcttcaaattggaaagcttatgtggggagacagcggactctattactgtattatcaccaccccagatgacctggaggggaaaaatgaggactcagtggaactgctggtgttggttcgcaaaggttaccggatccaggctgacaaagagagagactccatgaaggtcctgtactatgttgagaaggagctggctcagtttgatccagccagaaggatgagaggcagatataacaacaccatctcagaactcagctccctacatgaggaggacagcaatttccgccagtctttccatcagatgagaagcaagcagttccctgtgtctggggacttggagagcaatcctgactattggtcaggtgtcatgggaggcagcagtggggcaagccgcgggccctcagccatggagtataacaaagaggatcgagagagcttcaggcacagccagccgcgctccaagtcggagatgctgtcgcggaagaacttcgccacgggggtgccggccgtttccatggacgagctggcggccttcgctgactcctacggccagcggccccgccgggcagacggcaacagtcacgaggcgcggggcgggagccgcttcgagcgctcggagtcgcgggcgcacagcggcttctaccaggacgactccttggaggagtactacggtcagcgcagccgcagccgcgagcccctgaccgatgctgaccgcggctgggccttcagccccgcgcgccgcagacccgccgaggacgcgcacctgccgcggctggtgagccgcacgccaggcaccgcacccaaatacgaccactcgtacctgggcagcgcgcgggagcgccaggcgcggcccgagggcgccagccgcggtggcagcctggagacgccatccaagcggagcgcgcagctcggcccgcgcagcgcctcctactacgcttggtcgccgcccggcacctacaaggccggctcgtcgcaggacgaccaggaggacgcgtccgacgacgcgctgccgccctacagcgagctggagctgacccgcggcccgtcctaccgcggccgcgacctgccctaccacagcaactcggagaagaagaggaaaaaggagcccgccaagaaaaccaatgactttccaaccaggatgtcccttgtggtctgatgttgtcaacatttctctggataatgagaaatcagacatggactacggggacaagacacaaatctaagaaccagcaggcccaggaccttctctggccatcaccttggaagatttgctgatctctgctttggcaagggatggcaggcagcctttaagggaggctgatttcaaacctctgtgcccatctaactagtttgagaagcttaccaagaaagcaagaatgtgtgagaacattcctacatacagagtttctcaactatagcgtttatcctgcccagcctcctcccttaacagaaccaggactccatttgcaattctgaaagagagttagctctggactgctaaactccagaaattgcctatgcctacaatatgcttttctatacctcctgtgctatacttagagacagaagaatttattactactattagaaggccttcttctgacaagggaagatagcttcaagtcaaaatataccttttatcccc

SEQ ID NO: 142464 - DNA, 2566 bp, Homo sapiens
  Payload ID: 8154
  Gene Symbol: ILDR2
  Gene Name: immunoglobulin-like domain containing receptor 2
  ENST ID: ENST00000529071
  CDS Start-End: 215-2077
cggaccccggaagcccgcggcagcgcgcgctcagccggcggcgcgatccagcccccggccccgcctgcgcggccggcccggcgggcgctgcgcccagggacgcccggtgcccgccgctccgccgccgcccgctgccgcggggtgacagcgatccttctgttccagccatttcccactttcctcactccgtaattcggctgggaagttggggaagatggatagggtcttgctgaggtggatttctctcttctggctaacagccatggtcgaaggccttcaggtcacagtgcccgacaagaagaaggtggccatgctcttccagcccactgtgcttcgctgccacttctcaacatcctcccatcagcctgcagttgtgcagtggaagttcaagtcctactgccaggatcgcatgggagaatccttgggcatgtcctctacccgggcccaatctctcagcaagagaaacctggaatgggacccctacttggattgtttggacagcaggaggactgttcgagtagtagcttcaaaacagggctcgactgtcaccctgggagatttctacaggggcagagagatcacgattgttcatgatgcagatcttcaaattggaaagcttatgtggggagacagcggactctattactgtattatcaccaccccagatgacctggaggggaaaaatgaggactcagtggaactgctggtgttggagtgggtgtttgttggcctggtgctcctgggcgtcttcctcttcttcgtcctggtggggatctgctggtgccagtgctgccctcacagctgctgctgctatgtccgctgcccatgctgcccagattcctgctgctgccctcaagccttgtatgaagcagggaaagcagcaaaggccgggtaccctccctctgtctccggtgtccccggcccttactccatcccctctgtccctttgggaggagccccctcatctggcatgctgatggacaagccgcatccacctcccttggcaccaagtgactccactggaggaagccacagtgttcgcaaaggttaccggatccaggctgacaaagagagagactccatgaaggtcctgtactatgttgagaaggagctggctcagtttgatccagccagaaggatgagaggcagatataacaacaccatctcagaactcagctccctacatgaggaggacagcaatttccgccagtctttccatcagatgagaagcaagcagttccctgtgtctggggacttggagagcaatcctgactattggtcaggtgtcatgggaggcagcagtggggcaagccgcgggccctcagccatggagtataacaaagaggatcgagagagcttcaggcacagccagccgcgctccaagtcggagatgctgtcgcggaagaacttcgccacgggggtgccggccgtttccatggacgagctggcggccttcgctgactcctacggccagcggccccgccgggcagacggcaacagtcacgaggcgcggggcgggagccgcttcgagcgctcggagtcgcgggcgcacagcggcttctaccaggacgactccttggaggagtactacggtcagcgcagccgcagccgcgagcccctgaccgatgctgaccgcggctgggccttcagccccgcgcgccgcagacccgccgaggacgcgcacctgccgcggctggtgagccgcacgccaggcaccgcacccaaatacgaccactcgtacctgggcagcgcgcgggagcgccaggcgcggcccgagggcgccagccgcggtggcagcctggagacgccatccaagcggagcgcgcagctcggcccgcgcagcgcctcctactacgcttggtcgccgcccggcacctacaaggccggctcgtcgcaggacgaccaggaggacgcgtccgacgacgcgctgccgccctacagcgagctggagctgacccgcggcccgtcctaccgcggccgcgacctgccctaccacagcaactcggagaagaagaggaaaaaggagcccgccaagaaaaccaatgactttccaaccaggatgtcccttgtggtctgatgttgtcaacatttctctggataatgagaaatcagacatggactacggggacaagacacaaatctaagaaccagcaggcccaggaccttctctggccatcaccttggaagatttgctgatctctgctttggcaagggatggcaggcagcctttaagggaggctgatttcaaacctctgtgcccatctaactagtttgagaagcttaccaagaaagcaagaatgtgtgagaacattcctacatacagagtttctcaactatagcgtttatcctgcccagcctcctcccttaacagaaccaggactccatttgcaattctgaaagagagttagctctggactgctaaactccagaaattgcctatgcctacaatatgcttttctatacctcctgtgctatacttagagacagaagaatttattactactattagaaggccttcttctgacaagggaagatagcttcaagtcaaaatataccttttatcccc

SEQ ID NO: 142465 - DNA, 1950 bp, Homo sapiens
  Payload ID: 8154
  Gene Symbol: ILDR2
  Gene Name: immunoglobulin-like domain containing receptor 2
  ENST ID: ENST00000469934
  CDS Start-End: 215-1528
cggaccccggaagcccgcggcagcgcgcgctcagccggcggcgcgatccagcccccggccccgcctgcgcggccggcccggcgggcgctgcgcccagggacgcccggtgcccgccgctccgccgccgcccgctgccgcggggtgacagcgatccttctgttccagccatttcccactttcctcactccgtaattcggctgggaagttggggaagatggatagggtcttgctgaggtggatttctctcttctggctaacagccatggtcgaaggccttcaggtcacagtgcccgacaagaagaaggtggccatgctcttccagcccactgtgcttcgctgccacttctcaacatcctcccatcagcctgcagttgtgcagtggaagttcaagtcctactgccaggatcgcatgggagaatccttgggcatgtcctctacccgggcccaatctctcagcaagagaaacctggaatgggacccctacttggattgtttggacagcaggaggactgttcgagtagtagcttcaaaacagggctcgactgtcaccctgggagatttctacaggggcagagagatcacgattgttcatgatgcagatcttcaaattggaaagcttatgtggggagacagcggactctattactgtattatcaccaccccagatgacctggaggggaaaaatgaggactcagtggaactgctggtgttgggcaggacagggctgcttgctgatctcttgcccagttttgctgtggagattatgccagagtgggtgtttgttggcctggtgctcctgggcgtcttcctcttcttcgtcctggtggggatctgctggtgccagtgctgccctcacagctgctgctgctatgtccgctgcccatgctgcccagattcctgctgctgccctcaagccttgtatgaagcagggaaagcagcaaaggccgggtaccctccctctgtctccggtgtccccggcccttactccatcccctctgtccctttgggaggagccccctcatctggcatgctgatggacaagccgcatccacctcccttggcaccaagtgactccactggaggaagccacagtgttcgcaaaggttaccggatccaggctgacaaagagagagactccatgaaggtcctgtactatgttgagaaggagctggctcagtttgatccagccagaaggatgagaggcagatataacaacaccatctcagaactcagctccctacatgaggaggacagcaatttccgccagtctttccatcagatgagaagcaagcagttccctgtgtctggggacttggagagcaatcctgactattggtcaggtgtcatgggaggcagcagtggggcaagccgcgggccctcagccatggagtataacaaagaggatcgagagagcttcaggcacagaatgactttccaaccaggatgtcccttgtggtctgatgttgtcaacatttctctggataatgagaaatcagacatggactacggggacaagacacaaatctaagaaccagcaggcccaggaccttctctggccatcaccttggaagatttgctgatctctgctttggcaagggatggcaggcagcctttaagggaggctgatttcaaacctctgtgcccatctaactagtttgagaagcttaccaagaaagcaagaatgtgtgagaacattcctacatacagagtttctcaactatagcgtttatcctgcccagcctcctcccttaacagaaccaggactccatttgcaattctgaaagagagttagctctggactgctaaactccagaaattgcctatgcctacaatatgcttttctatacctcctgtgctatacttagagacagaagaatttattactactattagaaggccttcttctgacaagggaagatagcttcaagtcaaaatataccttttatcccc

SEQ ID NO: 142466 - DNA, 2165 bp, Homo sapiens
  Payload ID: 8155
  Gene Symbol: IRG1
  Gene Name: immunoresponsive 1 homolog (mouse)
  Uniprot ID: A6NK06
  ENST ID: ENST00000377462
  CDS Start-End: 63-1508
ccagcaaacaaattactcctctggttcactcctcctgaactgaacctcttctttacaacgaaatgatgctcaagtctatcacagaaagctttgccacagcaatccatggcttgaaagtgggacacctgacagatcgtgttattcagaggagcaagaggatgattctagacactctgggtgctgggttcctgggaaccactacggaagtgtttcacatagccagccaatatagcaagatctacagttccaacatatccagcactgtttggggtcagccagacatcaggctcccgcccacatatgctgcttttgtgaacggtgtggctattcactccatggattttgatgacacgtggcaccctgccacccacccttctggggctgtccttcctgtcctcacagctttagcagaagccctgccaaggagtccaaagttttctggccttgacctgctgctggctttcaatgttggtattgaagtgcaaggccgattactgcatttcgccaaggaggccaatgacatgccaaagagattccatcccccttccgtggtaggaacgttgggtagtgctgctgctgcatccaagtttttaggacttagctcgacaaagtgccgagaagctctggccattgctgtttcccatgctggggcacccatggccaatgctgccacccagaccaagcccctccacattggcaatgctgccaagcatgggatagaagctgcatttttggcaatgttgggtctccaaggaaacaagcaggtcttggacttggaggcaggatttggggccttttatgccaactattccccaaaagtccttccaagcatagcttcctacagttggctgctggaccagcaggacgtggcctttaagcgttttcctgcacatttatctacccactgggtggcagacgcagctgcatctgtgagaaagcaccttgtagcagagagagccctgcttccaactgactacattaagagaattgtgctcaggataccaaatgtccagtatgtaaacaggccctttccagtttcggagcatgaagcccgtcattcattccagtatgtggcctgtgccatgctgcttgatggtggcatcactgtcccctcattccatgaatgccagatcaacaggccacaggtgagagagctgctcagtaaggtggagctggagtaccctccggacaacttgccaagcttcaacatactgtactgtgaaataagtgtcaccctcaaggatggagccaccttcacagatcgctctgataccttctatgggcactggagaaaaccactgagccaggaggacctagaggaaaagttcagagccaatgcctccaagatgctgtcctgggacacagtggaaagccttataaagatagtcaaaaatctagaagacctagaagactgttctgtgttaactacacttctcaaaggaccctctccaccagaggtagcttcaaactctccagcatgtaataattctatcacaaatctctcctgaggcttaccaacatctaaatgactttgcatttggggagattcaatgatttggtttgtaaagcaagggtctgctgcttggttttcccaggaaaaatgaacaaagatggagagagtccagaaacagaactacatatatctggaaggagccttctcctgaaaattttgcaggacagttccacttacctaaatcaagatgaaacacacacacaaaaatgagtttgtaagcattcacaagggtgaaattcaactcacctgtgatttacttataaaattaatctcttcataggaattatgtgtggacttcatgagcctcaaggttttagagggatgtgaacctgcatgtatattttctgacagtggagagggctctggtgcattgtgtcaccaacagatctcctagaccatggcttattaccaagccctccacagtgcaaggggtgctactggggaatgggtgggtttaaatcctgcctctgccattcactagatgtagccttgagcatgttaccattagccctctgcctcagtttccctatttgtcaagccgaagtaaaaagcagtctggaaaaatcgcattttggctctagaacccatggtcttaagcactgcaatatatcacctttcagtataaaaatatttgaatcagagttgcaataaa

SEQ ID NO: 142467 - DNA, 2097 bp, Homo sapiens
  Payload ID: 8155
  Gene Symbol: IRG1
  Gene Name: immunoresponsive 1 homolog (mouse)
  ENST ID: ENST00000449753
  CDS Start-End: 1-1446
ttccctttaaagtctatcacagaaagctttgccacagcaatccatggcttgaaagtgggacacctgacagatcgtgttattcagaggagcaagaggatgattctagacactctgggtgctgggttcctgggaaccactacggaagtgtttcacatagccagccaatatagcaagatctacagttccaacatatccagcactgtttggggtcagccagacatcaggctcccgcccacatatgctgcttttgtgaacggtgtggctattcactccatggattttgatgacacgtggcaccctgccacccacccttctggggctgtccttcctgtcctcacagctttagcagaagccctgccaaggagtccaaagttttctggccttgacctgctgctggctttcaatgttggtattgaagtgcaaggccgattactgcatttcgccaaggaggccaatgacatgccaaagagattccatcccccttccgtggtaggaacgttgggtagtgctgctgctgcatccaagtttttaggacttagctcgacaaagtgccgagaagctctggccattgctgtttcccatgctggggcacccatggccaatgctgccacccagaccaagcccctccacattggcaatgctgccaagcatgggatagaagctgcatttttggcaatgttgggtctccaaggaaacaagcaggtcttggacttggaggcaggatttggggccttttatgccaactattccccaaaagtccttccaagcatagcttcctacagttggctgctggaccagcaggacgtggcctttaagcgttttcctgcacatttatctacccactgggtggcagacgcagctgcatctgtgagaaagcaccttgtagcagagagagccctgcttccaactgactacattaagagaattgtgctcaggataccaaatgtccagtatgtaaacaggccctttccagtttcggagcatgaagcccgtcattcattccagtatgtggcctgtgccatgctgcttgatggtggcatcactgtcccctcattccatgaatgccagatcaacaggccacaggtgagagagctgctcagtaaggtggagctggagtaccctccggacaacttgccaagcttcaacatactgtactgtgaaataagtgtcaccctcaaggatggagccaccttcacagatcgctctgataccttctatgggcactggagaaaaccactgagccaggaggacctagaggaaaagttcagagccaatgcctccaagatgctgtcctgggacacagtggaaagccttataaagatagtcaaaaatctagaagacctagaagactgttctgtgttaactacacttctcaaaggaccctctccaccagaggtagcttcaaactctccagcatgtaataattctatcacaaatctctcctgaggcttaccaacatctaaatgactttgcatttggggagattcaatgatttggtttgtaaagcaagggtctgctgcttggttttcccaggaaaaatgaacaaagatggagagagtccagaaacagaactacatatatctggaaggagccttctcctgaaaattttgcaggacagttccacttacctaaatcaagatgaaacacacacacaaaaatgagtttgtaagcattcacaagggtgaaattcaactcacctgtgatttacttataaaattaatctcttcataggaattatgtgtggacttcatgagcctcaaggttttagagggatgtgaacctgcatgtatattttctgacagtggagagggctctggtgcattgtgtcaccaacagatctcctagaccatggcttattaccaagccctccacagtgcaaggggtgctactggggaatgggtgggtttaaatcctgcctctgccattcactagatgtagccttgagcatgttaccattagccctctgcctcagtttccctatttgtcaagccgaagtaaaaagcagtctggaaaaatcgcattttggctctagaacccatggtcttaagcactgcaatatatcacctttcagtataaaaatatttgaatcagagttgc

SEQ ID NO: 142468 - DNA, 2479 bp, Homo sapiens
  Payload ID: 8156
  Gene Symbol: IMPDH1
  Gene Name: IMP (inosine 5'-monophosphate) dehydrogenase 1
  Uniprot ID: P20839
  ENST ID: ENST00000348127
  CDS Start-End: 82-1773
actcgaccgggctgcgctcactgcccagccggggccccgggagcctccaggctcccgcccgccctgagctgcggcctccgcatggaggggccactcactccaccaccgctgcagggaggcggagccgccgctgttccggagcccggagcccggcaacacccgggacacgagacggcggcgcagcggtacagcgcccgactgctgcaggccggctacgagcccgagagcatggcggactacctgatcagcggcggcaccggctacgtgcccgaggatgggctcaccgcgcagcagctcttcgccagcgccgacggcctcacctacaacgacttcctgattctcccaggattcatagacttcatagctgatgaggtggacctgacctcagccctgacccggaagatcacgctgaagacgccactgatctcctcccccatggacactgtgacagaggctgacatggccattgccatggctctgatgggaggtattggtttcattcaccacaactgcaccccagagttccaggccaacgaggtgcggaaggtcaagaagtttgaacagggcttcatcacggaccctgtggtgctgagcccctcgcacactgtgggcgatgtgctggaggccaagatgcggcatggcttctctggcatccccatcactgagacgggcaccatgggcagcaagctggtgggcatcgtcacctcccgagacatcgactttcttgctgagaaggaccacaccaccctcctcagtgaggtgatgacgccaaggattgaactggtggtggctccagcaggtgtgacgttgaaagaggcaaatgagatcctgcagcgtagcaagaaagggaagctgcctatcgtcaatgattgcgatgagctggtggccatcatcgcccgcaccgacctgaagaagaaccgagactaccctctggcctccaaggattcccagaagcagctgctctgtggggcagctgtgggcacccgtgaggatgacaaataccgtctggacctgctcacccaggcgggcgtcgacgtcatagtcttggactcgtcccaagggaattcggtgtatcagatcgccatggtgcattacatcaaacagaagtacccccacctccaggtgattggggggaacgtggtgacagcagcccaggccaagaacctgattgatgctggtgtggacgggctgcgcgtgggcatgggctgcggctccatctgcatcacccaggaagtgatggcctgtggtcggccccagggcactgctgtgtacaaggtggctgagtatgcccggcgctttggtgtgcccatcatagccgatggcggcatccagaccgtgggacacgtggtcaaggccctggcccttggagcctccacagtgatgatgggctccctgctggccgccactacggaggcccctggcgagtacttcttctcagacggggtgcggctcaagaagtaccggggcatgggctcactggatgccatggagaagagcagcagcagccagaaacgatacttcagcgagggggataaagtgaagatcgcgcagggtgtctcgggctccatccaggacaaaggatccattcagaagttcgtgccctacctcatagcaggcatccaacacggctgccaggatatcggggcccgcagcctgtctgtccttcggtccatgatgtactcaggagagctcaagtttgagaagcggaccatgtcggcccagattgagggtggtgtccatggcctgcactcttacgaaaagcggctgtactgaggacagcggtggaggccgaggtggtggaggggatgcaccccagtgtccacttttgggcacagcctccctccataactgagtggtccacagatttgcactacgggttctccagctcctttccaggcagagaggaggggaggtcctgaggggactgctgcccctcactcggcatcccctgcagagtcaggactgctcccggggccaggctgccctgggagcccccctccgagcccagccagccaggctctcaggccctgcgcctgcctcaggtctttcttgctgcagcctgctccagcctggcccccaccccaggggcaggcggcccctcctggcttctcctgtagggcacctccctgcccctagcctcccaggaaatggtgctctcctggccctgcctctggcccttcccgggccgctgcccctcagccatgtggcacttctgagctcctgacctaggccaaggggaggtctctgcccccttccccggccctgggctacccttgggtcctgctcctcaggccgctcccctgtccctggccatgggtaggagactgccctggtcatggccgcctgcctgtcattcctgactcaccaccgtccccaggtgaaccattcctcccttctcctcagctgcagtcgaaggctttaactttgcacacttgggatcacagttgcgtcattgtgtattaaatacttggaataaatc

SEQ ID NO: 142469 - DNA, 2881 bp, Homo sapiens
  Payload ID: 8156
  Gene Symbol: IMPDH1
  Gene Name: IMP (inosine 5'-monophosphate) dehydrogenase 1
  Uniprot ID: P20839
  ENST ID: ENST00000338791
  CDS Start-End: 352-2151
tcggaaggggccaggagacactggaaggtccggacggcagggaaggggacggggttctttccagtcccacccgtgtagggacacctctccccctcatcccccgatgtaccctcgctgaatctgggatgggagagacgaaccgagtctaggcatctgcgtagcagcgccggggagagcggggagcccagggcggagcccagtcgactcccggattcccctgccccgcccccggcacgaggccccgccccggcggccccgcccctcctcgggactcgaccgggctgcgctcactgcccagccggggccccgggagcctccaggctcccgcccgccctgagctgcggcctccgcatggaggggccactcactccaccaccgctgcagggaggcggagccgccgctgttccggagcccggagcccggcaacacccgggacacgagacggcggcgcagcggtacagcgcccgactgctgcaggccggctacgagcccgagagccctagattggacctcgctacacacccgacgacaccccgttcagaactatcttcagtggtcttactggcaggtgttggtgtccagatggatcgccttcgcagggctagcatggcggactacctgatcagcggcggcaccggctacgtgcccgaggatgggctcaccgcgcagcagctcttcgccagcgccgacggcctcacctacaacgacttcctgattctcccaggattcatagacttcatagctgatgaggtggacctgacctcagccctgacccggaagatcacgctgaagacgccactgatctcctcccccatggacactgtgacagaggctgacatggccattgccatggctctgatgggaggtattggtttcattcaccacaactgcaccccagagttccaggccaacgaggtgcggaaggtcaagaagtttgaacagggcttcatcacggaccctgtggtgctgagcccctcgcacactgtgggcgatgtgctggaggccaagatgcggcatggcttctctggcatccccatcactgagacgggcaccatgggcagcaagctggtgggcatcgtcacctcccgagacatcgactttcttgctgagaaggaccacaccaccctcctcagtgaggtgatgacgccaaggattgaactggtggtggctccagcaggtgtgacgttgaaagaggcaaatgagatcctgcagcgtagcaagaaagggaagctgcctatcgtcaatgattgcgatgagctggtggccatcatcgcccgcaccgacctgaagaagaaccgagactaccctctggcctccaaggattcccagaagcagctgctctgtggggcagctgtgggcacccgtgaggatgacaaataccgtctggacctgctcacccaggcgggcgtcgacgtcatagtcttggactcgtcccaagggaattcggtgtatcagatcgccatggtgcattacatcaaacagaagtacccccacctccaggtgattggggggaacgtggtgacagcagcccaggccaagaacctgattgatgctggtgtggacgggctgcgcgtgggcatgggctgcggctccatctgcatcacccaggaagtgatggcctgtggtcggccccagggcactgctgtgtacaaggtggctgagtatgcccggcgctttggtgtgcccatcatagccgatggcggcatccagaccgtgggacacgtggtcaaggccctggcccttggagcctccacagtgatgatgggctccctgctggccgccactacggaggcccctggcgagtacttcttctcagacggggtgcggctcaagaagtaccggggcatgggctcactggatgccatggagaagagcagcagcagccagaaacgatacttcagcgagggggataaagtgaagatcgcgcagggtgtctcgggctccatccaggacaaaggatccattcagaagttcgtgccctacctcatagcaggcatccaacacggctgccaggatatcggggcccgcagcctgtctgtccttcggtccatgatgtactcaggagagctcaagtttgagaagcggaccatgtcggcccagattgagggtggtgtccatggcctgcactcttacgaaaagcggctgtactgaggacagcggtggaggccgaggtggtggaggggatgcaccccagtgtccacttttgggcacagcctccctccataactgagtggtccacagatttgcactacgggttctccagctcctttccaggcagagaggaggggaggtcctgaggggactgctgcccctcactcggcatcccctgcagagtcaggactgctcccggggccaggctgccctgggagcccccctccgagcccagccagccaggctctcaggccctgcgcctgcctcaggtctttcttgctgcagcctgctccagcctggcccccaccccaggggcaggcggcccctcctggcttctcctgtagggcacctccctgcccctagcctcccaggaaatggtgctctcctggccctgcctctggcccttcccgggccgctgcccctcagccatgtggcacttctgagctcctgacctaggccaaggggaggtctctgcccccttccccggccctgggctacccttgggtcctgctcctcaggccgctcccctgtccctggccatgggtaggagactgccctggtcatggccgcctgcctgtcattcctgactcaccaccgtccccaggtgaaccattcctcccttctcctcagctgcagtcgaaggctttaactttgcacacttgggatcacagttgcgtcattgtgtattaaatacttggaataaatcaagcaggtctcaacgcctccacta

SEQ ID NO: 142470 - DNA, 2580 bp, Homo sapiens
  Payload ID: 8156
  Gene Symbol: IMPDH1
  Gene Name: IMP (inosine 5'-monophosphate) dehydrogenase 1
  Uniprot ID: P20839
  ENST ID: ENST00000354269
  CDS Start-End: 82-1851
actcgaccgggctgcgctcactgcccagccggggccccgggagcctccaggctcccgcccgccctgagctgcggcctccgcatggaggggccactcactccaccaccgctgcagggaggcggagccgccgctgttccggagcccggagcccggcaacacccgggacacgagacggcggcgcagcggtacagcgcccgactgctgcaggccggctacgagcccgagagctgtttcctcctagaactatcttcagtggtcttactggcaggtgttggtgtccagatggatcgccttcgcagggctagcatggcggactacctgatcagcggcggcaccggctacgtgcccgaggatgggctcaccgcgcagcagctcttcgccagcgccgacggcctcacctacaacgacttcctgattctcccaggattcatagacttcatagctgatgaggtggacctgacctcagccctgacccggaagatcacgctgaagacgccactgatctcctcccccatggacactgtgacagaggctgacatggccattgccatggctctgatgggaggtattggtttcattcaccacaactgcaccccagagttccaggccaacgaggtgcggaaggtcaagaagtttgaacagggcttcatcacggaccctgtggtgctgagcccctcgcacactgtgggcgatgtgctggaggccaagatgcggcatggcttctctggcatccccatcactgagacgggcaccatgggcagcaagctggtgggcatcgtcacctcccgagacatcgactttcttgctgagaaggaccacaccaccctcctcagtgaggtgatgacgccaaggattgaactggtggtggctccagcaggtgtgacgttgaaagaggcaaatgagatcctgcagcgtagcaagaaagggaagctgcctatcgtcaatgattgcgatgagctggtggccatcatcgcccgcaccgacctgaagaagaaccgagactaccctctggcctccaaggattcccagaagcagctgctctgtggggcagctgtgggcacccgtgaggatgacaaataccgtctggacctgctcacccaggcgggcgtcgacgtcatagtcttggactcgtcccaagggaattcggtgtatcagatcgccatggtgcattacatcaaacagaagtacccccacctccaggtgattggggggaacgtggtgacagcagcccaggccaagaacctgattgatgctggtgtggacgggctgcgcgtgggcatgggctgcggctccatctgcatcacccaggaagtgatggcctgtggtcggccccagggcactgctgtgtacaaggtggctgagtatgcccggcgctttggtgtgcccatcatagccgatggcggcatccagaccgtgggacacgtggtcaaggccctggcccttggagcctccacagtgatgatgggctccctgctggccgccactacggaggcccctggcgagtacttcttctcagacggggtgcggctcaagaagtaccggggcatgggctcactggatgccatggagaagagcagcagcagccagaaacgatacttcagcgagggggataaagtgaagatcgcgcagggtgtctcgggctccatccaggacaaaggatccattcagaagttcgtgccctacctcatagcaggcatccaacacggctgccaggatatcggggcccgcagcctgtctgtccttcggtccatgatgtactcaggagagctcaagtttgagaagcggaccatgtcggcccagattgagggtggtgtccatggcctgcactcttacgaaaagcggctgtactgaggacagcggtggaggccgaggtggtggaggggatgcaccccagtgtccacttttgggcacagcctccctccataactgagtggtccacagatttgcactacgggttctccagctcctttccaggcagagaggaggggaggtcctgaggggactgctgcccctcactcggcatcccctgcagagtcaggactgctcccggggccaggctgccctgggagcccccctccgagcccagccagccaggctctcaggccctgcgcctgcctcaggtctttcttgctgcagcctgctccagcctggcccccaccccaggggcaggcggcccctcctggcttctcctgtagggcacctccctgcccctagcctcccaggaaatggtgctctcctggccctgcctctggcccttcccgggccgctgcccctcagccatgtggcacttctgagctcctgacctaggccaaggggaggtctctgcccccttccccggccctgggctacccttgggtcctgctcctcaggccgctcccctgtccctggccatgggtaggagactgccctggtcatggccgcctgcctgtcattcctgactcaccaccgtccccaggtgaaccattcctcccttctcctcagctgcagtcgaaggctttaactttgcacacttgggatcacagttgcgtcattgtgtattaaatacttggaataaatcaagcaggtctcaacgcctccact

SEQ ID NO: 142471 - DNA, 2431 bp, Homo sapiens
  Payload ID: 8156
  Gene Symbol: IMPDH1
  Gene Name: IMP (inosine 5'-monophosphate) dehydrogenase 1
  Uniprot ID: P20839
  ENST ID: ENST00000419067
  CDS Start-End: 1-1701
atggaggggccactcactccaccaccgctgcagggaggcggagccgccgctgttccggagcccggagcccggcaacacccgggacacgagacggcggcgcagcggtacagcgcccgactgctgcaggccggctacgagcccgagagccctagattggacctcgctacacacccgacgacaccccgttcagaactatcttcagtggtcttactggcaggtgttggtgtccagatggatcgccttcgcagggctagcgacttcctgattctcccaggattcatagacttcatagctgatgaggtggacctgacctcagccctgacccggaagatcacgctgaagacgccactgatctcctcccccatggacactgtgacagaggctgacatggccattgccatggctctgatgggaggtattggtttcattcaccacaactgcaccccagagttccaggccaacgaggtgcggaaggtcaagaagtttgaacagggcttcatcacggaccctgtggtgctgagcccctcgcacactgtgggcgatgtgctggaggccaagatgcggcatggcttctctggcatccccatcactgagacgggcaccatgggcagcaagctggtgggcatcgtcacctcccgagacatcgactttcttgctgagaaggaccacaccaccctcctcagtgaggtgatgacgccaaggattgaactggtggtggctccagcaggtgtgacgttgaaagaggcaaatgagatcctgcagcgtagcaagaaagggaagctgcctatcgtcaatgattgcgatgagctggtggccatcatcgcccgcaccgacctgaagaagaaccgagactaccctctggcctccaaggattcccagaagcagctgctctgtggggcagctgtgggcacccgtgaggatgacaaataccgtctggacctgctcacccaggcgggcgtcgacgtcatagtcttggactcgtcccaagggaattcggtgtatcagatcgccatggtgcattacatcaaacagaagtacccccacctccaggtgattggggggaacgtggtgacagcagcccaggccaagaacctgattgatgctggtgtggacgggctgcgcgtgggcatgggctgcggctccatctgcatcacccaggaagtgatggcctgtggtcggccccagggcactgctgtgtacaaggtggctgagtatgcccggcgctttggtgtgcccatcatagccgatggcggcatccagaccgtgggacacgtggtcaaggccctggcccttggagcctccacagtgatgatgggctccctgctggccgccactacggaggcccctggcgagtacttcttctcagacggggtgcggctcaagaagtaccggggcatgggctcactggatgccatggagaagagcagcagcagccagaaacgatacttcagcgagggggataaagtgaagatcgcgcagggtgtctcgggctccatccaggacaaaggatccattcagaagttcgtgccctacctcatagcaggcatccaacacggctgccaggatatcggggcccgcagcctgtctgtccttcggtccatgatgtactcaggagagctcaagtttgagaagcggaccatgtcggcccagattgagggtggtgtccatggcctgcactcttacgaaaagcggctgtactgaggacagcggtggaggccgaggtggtggaggggatgcaccccagtgtccacttttgggcacagcctccctccataactgagtggtccacagatttgcactacgggttctccagctcctttccaggcagagaggaggggaggtcctgaggggactgctgcccctcactcggcatcccctgcagagtcaggactgctcccggggccaggctgccctgggagcccccctccgagcccagccagccaggctctcaggccctgcgcctgcctcaggtctttcttgctgcagcctgctccagcctggcccccaccccaggggcaggcggcccctcctggcttctcctgtagggcacctccctgcccctagcctcccaggaaatggtgctctcctggccctgcctctggcccttcccgggccgctgcccctcagccatgtggcacttctgagctcctgacctaggccaaggggaggtctctgcccccttccccggccctgggctacccttgggtcctgctcctcaggccgctcccctgtccctggccatgggtaggagactgccctggtcatggccgcctgcctgtcattcctgactcaccaccgtccccaggtgaaccattcctcccttctcctcagctgcagtcgaaggctttaactttgcacacttgggatcacagttgcgtcattgtgtattaaatacttggaataaatcaagcaggtctcaacgcctccacta

SEQ ID NO: 142472 - DNA, 1888 bp, Homo sapiens
  Payload ID: 8156
  Gene Symbol: IMPDH1
  Gene Name: IMP (inosine 5'-monophosphate) dehydrogenase 1
  ENST ID: ENST00000470772
  CDS Start-End: 79-1620
agtagcagcagcagcagcggcggcagcggcgggcggccgcgcgggtgtttatgtcgggtcgcggggtctcgcggcagcatggcggactacctgatcagcggcggcaccggctacgtgcccgaggatgggctcaccgcgcagcagctcttcgccagcgccgacggcctcacctacaacgacttcctgattctcccaggattcatagacttcatagctgatgaggtggacctgacctcagccctgacccggaagatcacgctgaagacgccactgatctcctcccccatggacactgtgacagaggctgacatggccattgccatggctctgatgggaggtattggtttcattcaccacaactgcaccccagagttccaggccaacgaggtgcggaaggtcaagtttgaacagggcttcatcacggaccctgtggtgctgagcccctcgcacactgtgggcgatgtgctggaggccaagatgcggcatggcttctctggcatccccatcactgagacgggcaccatgggcagcaagctggtgggcatcgtcacctcccgagacatcgactttcttgctgagaaggaccacaccaccctcctcagtgaggtgatgacgccaaggattgaactggtggtggctccagcaggtgtgacgttgaaagaggcaaatgagatcctgcagcgtagcaagaaagggaagctgcctatcgtcaatgattgcgatgagctggtggccatcatcgcccgcaccgacctgaagaagaaccgagactaccctctggcctccaaggattcccagaagcagctgctctgtggggcagctgtgggcacccgtgaggatgacaaataccgtctggacctgctcacccaggcgggcgtcgacgtcatagtcttggactcgtcccaagggaattcggtgtatcagatcgccatggtgcattacatcaaacagaagtacccccacctccaggtgattggggggaacgtggtgacagcagcccaggccaagaacctgattgatgctggtgtggacgggctgcgcgtgggcatgggctgcggctccatctgcatcacccaggaagtgatggcctgtggtcggccccagggcactgctgtgtacaaggtggctgagtatgcccggcgctttggtgtgcccatcatagccgatggcggcatccagaccgtgggacacgtggtcaaggccctggcccttggagcctccacagtgatgatgggctccctgctggccgccactacggaggcccctggcgagtacttcttctcagacggggtgcggctcaagaagtaccggggcatgggctcactggatgccatggagaagagcagcagcagccagaaacgatacttcagcgagggggataaagtgaagatcgcgcagggtgtctcgggctccatccaggacaaaggatccattcagaagttcgtgccctacctcatagcaggcatccaacacggctgccaggatatcggggcccgcagcctgtctgtccttcggtccatgatgtactcaggagagctcaagtttgagaagcggaccatgtcggcccagattgagggtggtgtccatggcctgcactcttacgaaaagcggctgtactgaggacagcggtggaggccgaggtggtggaggggatgcaccccagtgtccacttttgggcacagcctccctccataactgagtggtccacagatttgcactacgggttctccagctcctttccaggcagagaggaggggaggtcctgaggggactgctgcccctcactcggcatcccctgcagagtcaggactgctcccggggccaggctgccctgggagcccccctccgagcccagccagccaggctctcaggccctgcgcctgcctca

SEQ ID NO: 142473 - DNA, 598 bp, Homo sapiens
  Payload ID: 8156
  Gene Symbol: IMPDH1
  Gene Name: IMP (inosine 5'-monophosphate) dehydrogenase 1
  ENST ID: ENST00000489263
  CDS Start-End: 47-598
cccgggagcctccaggctcccgcccgccctgagctgcggcctccgcatggaggggccactcactccaccaccgctgcagggaggcggagccgccgctgttccggagcccggagcccggcaacacccgggacacgagacggcggcgcagcggtacagcgcccgactgctgcaggccggctacgagcccgagagcgacttcctgattctcccaggattcatagacttcatagctgatgaggtggacctgacctcagccctgacccggaagatcacgctgaagacgccactgatctcctcccccatggacactgtgacagaggctgacatggccattgccatggctaagtttgaacagggcttcatcacggaccctgtggtgctgagcccctcgcacactgtgggcgatgtgctggaggccaagatgcggcatggcttctctggcatccccatcactgagacgggcaccatgggcagcaagctggtgggcatcgtcacctcccgagacatcgactttcttgctgagaaggaccacaccaccctcctcagtgaggtgatgacgccaaggattgaactggtggtggctccagcaggtgtgacg

SEQ ID NO: 142474 - DNA, 2422 bp, Homo sapiens
  Payload ID: 8156
  Gene Symbol: IMPDH1
  Gene Name: IMP (inosine 5'-monophosphate) dehydrogenase 1
  ENST ID: ENST00000484496
  CDS Start-End: 1-681
agccctagattggacctcgctacacacccgacgacaccccgttcagaactatcttcagtggtcttactggcaggtgttggtgtccagatggatcgccttcgcagggctagcatggcggactacctgatcagcggcggcaccggctacgtgcccgaggatgggctcaccgcgcagcagctcttcgccagcgccgacggcctcacctacaacgacttcctgattctcccaggattcatagacttcatagctgatgaggtggacctgacctcagccctgacccggaagatcacgctgaagacgccactgatctcctcccccatggacactgtgacagaggctgacatggccattgccatggctctgatgggaggtattggtttcattcaccacaactgcaccccagagttccaggccaacgaggtgcggaaggtcaagtttgaacagggcttcatcacggaccctgtggtgctgagcccctcgcacactgtgggcgatgtgctggaggccaagatgcggcatggcttctctggcatccccatcactgagacgggcaccatgggcagcaagctggtgggcatcgtcacctcccgagacatcgactttcttgctgagaaggaccacaccaccctcctcagtgaggcaaatgttcctggccccacaggtgatgacgccaaggattgaactggtggtggctccagcaggtgtgacgttgaaagaggcaaatgagatcctgcagcgtagcaagaaagggaagctgcctatcgtcaatgattgcgatgagctggtggccatcatcgcccgcaccgacctgaagaagaaccgagactaccctctggcctccaaggattcccagaagcagctgctctgtggggcagctgtgggcacccgtgaggatgacaaataccgtctggacctgctcacccaggcgggcgtcgacgtcatagtcttggactcgtcccaagggaattcggtgtatcagatcgccatggtgcattacatcaaacagaagtacccccacctccaggtgattggggggaacgtggtgacagcagcccaggccaagaacctgattgatgctggtgtggacgggctgcgcgtgggcatgggctgcggctccatctgcatcacccaggaagtgatggcctgtggtcggccccagggcactgctgtgtacaaggtggctgagtatgcccggcgctttggtgtgcccatcatagccgatggcggcatccagaccgtgggacacgtggtcaaggccctggcccttggagcctccacagtgatgatgggctccctgctggccgccactacggaggcccctggcgagtacttcttctcagacggggtgcggctcaagaagtaccggggcatgggctcactggatgccatggagaagagcagcagcagccagaaacgatacttcagcgagggggataaagtgaagatcgcgcagggtgtctcgggctccatccaggacaaaggatccattcagaagttcgtgccctacctcatagcaggcatccaacacggctgccaggatatcggggcccgcagcctgtctgtccttcggtccatgatgtactcaggagagctcaagtttgagaagcggaccatgtcggcccagattgagggtggtgtccatggcctgcactcctatacctttctgccgtttacgaaaagcggctgtactgaggacagcggtggaggccgaggtggtggaggggatgcaccccagtgtccacttttgggcacagcctccctccataactgagtggtccacagatttgcactacgggttctccagctcctttccaggcagagaggaggggaggtcctgaggggactgctgcccctcactcggcatcccctgcagagtcaggactgctcccggggccaggctgccctgggagcccccctccgagcccagccagccaggctctcaggccctgcgcctgcctcaggtctttcttgctgcagcctgctccagcctggcccccaccccaggggcaggcggcccctcctggcttctcctgtagggcacctccctgcccctagcctcccaggaaatggtgctctcctggccctgcctctggcccttcccgggccgctgcccctcagccatgtggcacttctgagctcctgacctaggccaaggggaggtctctgcccccttccccggccctgggctacccttgggtcctgctcctcaggccgctcccctgtccctggccatgggtaggagactgccctggtcatggccgcctgcctgtcattcctgactcaccaccgtccccaggtgaaccattcctcccttctcctcagctgcagtcgaaggctttaactttgcacacttgggatcacagttgcgtcattgtgtattaaatacttggaataaatcaagcaggtctcaacgcctccacta

SEQ ID NO: 142475 - DNA, 952 bp, Homo sapiens
  Payload ID: 8156
  Gene Symbol: IMPDH1
  Gene Name: IMP (inosine 5'-monophosphate) dehydrogenase 1
  ENST ID: ENST00000497868
  CDS Start-End: 86-952
cgggactcgaccgggctgcgctcactgcccagccggggccccgggagcctccaggctcccgcccgccctgagctgcggcctccgcatggaggggccactcactccaccaccgctgcagggaggcggagccgccgctgttccggagcccggagcccggcaacacccgggacacgagacggcggcgcagcggtacagcgcccgactgctgcaggccggctacgagcccgagagcgacttcctgattctcccaggattcatagacttcatagctgatgaggtggacctgacctcagccctgacccggaagatcacgctgaagacgccactgatctcctcccccatggacactgtgacagaggctgacatggccattgccatggctctgatgggaggtattggtttcattcaccacaactgcaccccagagttccaggccaacgaggtgcggaaggtcaagaagtttgaacagggcttcatcacggaccctgtggtgctgagcccctcgcacactgtgggcgatgtgctggaggccaagatgcggcatggcttctctggcatccccatcactgagacgggcaccatgggcagcaagctggtgggcatcgtcacctcccgagacatcgactttcttgctgagaaggaccacaccaccctcctcagtgaggtgatgacgccaaggattgaactggtggtggctccagcaggtgtgacgttgaaagaggcaaatgagatcctgcagcgtagcaagaaagggaagctgcctatcgtcaatgattgcgatgagctggtggccatcatcgcccgcaccgacctgaagaagaaccgagactaccctctggcctccaaggattcccagaagcagctgctctgtggggcagctgtgggcacccgtgaggatgacaaataccgtctggacctgctcacccaggcgggcgtcgacgtcatagtcttg

SEQ ID NO: 142476 - DNA, 1765 bp, Homo sapiens
  Payload ID: 8156
  Gene Symbol: IMPDH1
  Gene Name: IMP (inosine 5'-monophosphate) dehydrogenase 1
  Uniprot ID: P20839
  ENST ID: ENST00000480861
  CDS Start-End: 79-1608
agtagcagcagcagcagcggcggcagcggcgggcggccgcgcgggtgtttatgtcgggtcgcggggtctcgcggcagcatggcggactacctgatcagcggcggcaccggctacgtgcccgaggatgggctcaccgcgcagcagctcttcgccagcgccgacggcctcacctacaacgacttcctgattctcccaggattcatagacttcatagctgatgaggtggacctgacctcagccctgacccggaagatcacgctgaagacgccactgatctcctcccccatggacactgtgacagaggctgacatggccattgccatggctctgatgggaggtattggtttcattcaccacaactgcaccccagagttccaggccaacgagaagtttgaacagggcttcatcacggaccctgtggtgctgagcccctcgcacactgtgggcgatgtgctggaggccaagatgcggcatggcttctctggcatccccatcactgagacgggcaccatgggcagcaagctggtgggcatcgtcacctcccgagacatcgactttcttgctgagaaggaccacaccaccctcctcagtgaggtgatgacgccaaggattgaactggtggtggctccagcaggtgtgacgttgaaagaggcaaatgagatcctgcagcgtagcaagaaagggaagctgcctatcgtcaatgattgcgatgagctggtggccatcatcgcccgcaccgacctgaagaagaaccgagactaccctctggcctccaaggattcccagaagcagctgctctgtggggcagctgtgggcacccgtgaggatgacaaataccgtctggacctgctcacccaggcgggcgtcgacgtcatagtcttggactcgtcccaagggaattcggtgtatcagatcgccatggtgcattacatcaaacagaagtacccccacctccaggtgattggggggaacgtggtgacagcagcccaggccaagaacctgattgatgctggtgtggacgggctgcgcgtgggcatgggctgcggctccatctgcatcacccaggaagtgatggcctgtggtcggccccagggcactgctgtgtacaaggtggctgagtatgcccggcgctttggtgtgcccatcatagccgatggcggcatccagaccgtgggacacgtggtcaaggccctggcccttggagcctccacagtgatgatgggctccctgctggccgccactacggaggcccctggcgagtacttcttctcagacggggtgcggctcaagaagtaccggggcatgggctcactggatgccatggagaagagcagcagcagccagaaacgatacttcagcgagggggataaagtgaagatcgcgcagggtgtctcgggctccatccaggacaaaggatccattcagaagttcgtgccctacctcatagcaggcatccaacacggctgccaggatatcggggcccgcagcctgtctgtccttcggtccatgatgtactcaggagagctcaagtttgagaagcggaccatgtcggcccagattgagggtggtgtccatggcctgcactcttacgaaaagcggctgtactgaggacagcggtggaggccgaggtggtggaggggatgcaccccagtgtccacttttgggcacagcctccctccataactgagtggtccacagatttgcactacgggttctccagctcctttccaggcagagaggaggggaggtcctgaggggactgctg

SEQ ID NO: 142477 - DNA, 590 bp, Homo sapiens
  Payload ID: 8156
  Gene Symbol: IMPDH1
  Gene Name: IMP (inosine 5'-monophosphate) dehydrogenase 1
  ENST ID: ENST00000473463
  CDS Start-End: 82-291
actcgaccgggctgcgctcactgcccagccggggccccgggagcctccaggctcccgcccgccctgagctgcggcctccgcatggaggggccactcactccaccaccgctgcagggaggcggagccgccgctgttccggagcccggagcccggcaacacccgggacacgagacggcggcgcagcggtacagcgcccgactgctgcaggccggctacgagcccgagagaactatcttcagtggtcttactggcaggtgttggtgtccagatggatcgccttcgcagggctagcatggcggactacctgatcagcggcggcaccggctacgtgcccgaggatgggctcaccgcgcagcagctcttcgccagcgccgacggcctcacctacaacgacttcctgattctcccaggattcatagacttcatagctgatgaggtggacctgacctcagccctgacccggaagatcacgctgaagacgccactgatctcctcccccatggacactgtgacagaggctgacatggccattgccatggctctgatgggaggtattggtttcattcaccacaactgcaccccagagttcc

SEQ ID NO: 142478 - DNA, 2295 bp, Homo sapiens
  Payload ID: 8156
  Gene Symbol: IMPDH1
  Gene Name: IMP (inosine 5'-monophosphate) dehydrogenase 1
  ENST ID: ENST00000469328
  CDS Start-End: 1-571
catggcggactacctgatcagcggcggcaccggctacgtgcccgaggatgggctcaccgcgcagcagctcttcgccagcgccgacggcctcacctacaacgacttcctgattctcccaggattcatagacttcatagctgatgaggtggacctgacctcagccctgacccggaagatcacgctgaagacgccactgatctcctcccccatggacactgtgacagaggctgacatggccattgccatggctctgatgggaggtattggtttcattcaccacaactgcaccccagagttccaggccaacgaggtgcggaaggtcaagtttgaacagggcttcatcacggaccctgtggtgctgagcccctcgcacactgtgggcgatgtgctggaggccaagatgcggcatggcttctctggcatccccatcactgagacgggcaccatgggcagcaagctggtgggcatcgtcacctcccgagacatcgactttcttgctgagaaggaccacaccaccctcctcagtgaggcaaatgttcctggccccacaggtgatgacgccaaggattgaactggtggtggctccagcaggtgtgacgttgaaagaggcaaatgagatcctgcagcgtagcaagaaagggaagctgcctatcgtcaatgattgcgatgagctggtggccatcatcgcccgcaccgacctgaagaagaaccgagactaccctctggcctccaaggattcccagaagcagctgctctgtggggcagctgtgggcacccgtgaggatgacaaataccgtctggacctgctcacccaggcgggcgtcgacgtcatagtcttggactcgtcccaagggaattcggtgtatcagatcgccatggtgcattacatcaaacagaagtacccccacctccaggtgattggggggaacgtggtgacagcagcccaggccaagaacctgattgatgctggtgtggacgggctgcgcgtgggcatgggctgcggctccatctgcatcacccaggaagtgatggcctgtggtcggccccagggcactgctgtgtacaaggtggctgagtatgcccggcgctttggtgtgcccatcatagccgatggcggcatccagaccgtgggacacgtggtcaaggccctggcccttggagcctccacagtgatgatgggctccctgctggccgccactacggaggcccctggcgagtacttcttctcagacggggtgcggctcaagaagtaccggggcatgggctcactggatgccatggagaagagcagcagcagccagaaacgatacttcagcgagggggataaagtgaagatcgcgcagggtgtctcgggctccatccaggacaaaggatccattcagaagttcgtgccctacctcatagcaggcatccaacacggctgccaggatatcggggcccgcagcctgtctgtccttcggtccatgatgtactcaggagagctcaagtttgagaagcggaccatgtcggcccagattgagggtggtgtccatggcctgcactcttacgaaaagcggctgtactgaggacagcggtggaggccgaggtggtggaggggatgcaccccagtgtccacttttgggcacagcctccctccataactgagtggtccacagatttgcactacgggttctccagctcctttccaggcagagaggaggggaggtcctgaggggactgctgcccctcactcggcatcccctgcagagtcaggactgctcccggggccaggctgccctgggagcccccctccgagcccagccagccaggctctcaggccctgcgcctgcctcaggtctttcttgctgcagcctgctccagcctggcccccaccccaggggcaggcggcccctcctggcttctcctgtagggcacctccctgcccctagcctcccaggaaatggtgctctcctggccctgcctctggcccttcccgggccgctgcccctcagccatgtggcacttctgagctcctgacctaggccaaggggaggtctctgcccccttccccggccctgggctacccttgggtcctgctcctcaggccgctcccctgtccctggccatgggtaggagactgccctggtcatggccgcctgcctgtcattcctgactcaccaccgtccccaggtgaaccattcctcccttctcctcagctgcagtcgaaggctttaactttgcacacttgggatcacagttgcgtcattgtgtattaaatacttggaataaatcaagcaggtctcaacgcctccacta

SEQ ID NO: 142479 - DNA, 2283 bp, Homo sapiens
  Payload ID: 8156
  Gene Symbol: IMPDH1
  Gene Name: IMP (inosine 5'-monophosphate) dehydrogenase 1
  Uniprot ID: P20839
  ENST ID: ENST00000496200
  CDS Start-End: 85-1554
gtcagcagtagcagcagcagcagcggcggcagcggcgggcggccgcgcgggtgtttatgtcgggtcgcggggtctcgcggcagcatggcggactacctgatcagcggcggcaccggctacgtgcccgaggatgggctcaccgcgcagcagctcttcgccagcgccgacggcctcacctacaacgacttcctgattctcccaggattcatagacttcatagctgatgaggtggacctgacctcagccctgacccggaagatcacgctgaagacgccactgatctcctcccccatggacactgtgacagaggctgacatggccattgccatggctaagtttgaacagggcttcatcacggaccctgtggtgctgagcccctcgcacactgtgggcgatgtgctggaggccaagatgcggcatggcttctctggcatccccatcactgagacgggcaccatgggcagcaagctggtgggcatcgtcacctcccgagacatcgactttcttgctgagaaggaccacaccaccctcctcagtgaggtgatgacgccaaggattgaactggtggtggctccagcaggtgtgacgttgaaagaggcaaatgagatcctgcagcgtagcaagaaagggaagctgcctatcgtcaatgattgcgatgagctggtggccatcatcgcccgcaccgacctgaagaagaaccgagactaccctctggcctccaaggattcccagaagcagctgctctgtggggcagctgtgggcacccgtgaggatgacaaataccgtctggacctgctcacccaggcgggcgtcgacgtcatagtcttggactcgtcccaagggaattcggtgtatcagatcgccatggtgcattacatcaaacagaagtacccccacctccaggtgattggggggaacgtggtgacagcagcccaggccaagaacctgattgatgctggtgtggacgggctgcgcgtgggcatgggctgcggctccatctgcatcacccaggaagtgatggcctgtggtcggccccagggcactgctgtgtacaaggtggctgagtatgcccggcgctttggtgtgcccatcatagccgatggcggcatccagaccgtgggacacgtggtcaaggccctggcccttggagcctccacagtgatgatgggctccctgctggccgccactacggaggcccctggcgagtacttcttctcagacggggtgcggctcaagaagtaccggggcatgggctcactggatgccatggagaagagcagcagcagccagaaacgatacttcagcgagggggataaagtgaagatcgcgcagggtgtctcgggctccatccaggacaaaggatccattcagaagttcgtgccctacctcatagcaggcatccaacacggctgccaggatatcggggcccgcagcctgtctgtccttcggtccatgatgtactcaggagagctcaagtttgagaagcggaccatgtcggcccagattgagggtggtgtccatggcctgcactcttacgaaaagcggctgtactgaggacagcggtggaggccgaggtggtggaggggatgcaccccagtgtccacttttgggcacagcctccctccataactgagtggtccacagatttgcactacgggttctccagctcctttccaggcagagaggaggggaggtcctgaggggactgctgcccctcactcggcatcccctgcagagtcaggactgctcccggggccaggctgccctgggagcccccctccgagcccagccagccaggctctcaggccctgcgcctgcctcaggtctttcttgctgcagcctgctccagcctggcccccaccccaggggcaggcggcccctcctggcttctcctgtagggcacctccctgcccctagcctcccaggaaatggtgctctcctggccctgcctctggcccttcccgggccgctgcccctcagccatgtggcacttctgagctcctgacctaggccaaggggaggtctctgcccccttccccggccctgggctacccttgggtcctgctcctcaggccgctcccctgtccctggccatgggtaggagactgccctggtcatggccgcctgcctgtcattcctgactcaccaccgtccccaggtgaaccattcctcccttctcctcagctgcagtcgaaggctttaactttgcacacttgggatcacagttgcgtcattgtgtattaaatacttggaataaatcaagcaggtctcaacgcctccact

SEQ ID NO: 142480 - DNA, 2862 bp, Homo sapiens
  Payload ID: 8156
  Gene Symbol: IMPDH1
  Gene Name: IMP (inosine 5'-monophosphate) dehydrogenase 1
  ENST ID: ENST00000626419
  CDS Start-End: 607-2148
tcggaaggggccaggagacactggaaggtccggacggcagggaaggggacggggttctttccagtcccacccgtgtagggacacctctccccctcatcccccgatgtaccctcgctgaatctgggatgggagagacgaaccgagtctaggcatctgcgtagcagcgccggggagagcggggagcccagggcggagcccagtcgactcccggattcccctgccccgcccccggcacgaggccccgccccggcggccccgcccctcctcgggactcgaccgggctgcgctcactgcccagccggggccccgggagcctccaggctcccgcccgccctgagctgcggcctccgcatggaggggccactcactccaccaccgctgcagggaggcggagccgccgctgttccggagcccggagcccggcaacacccgggacacgagacggcggcgcagcggtacagcgcccgactgctgcaggccggctacgagcccgagagccctagattggacctcgctacacacccgacgacaccccgttcagaactatcttcagtggtcttactggcaggtgttggtgtccagatggatcgccttcgcagggctagcatggcggactacctgatcagcggcggcaccggctacgtgcccgaggatgggctcaccgcgcagcagctcttcgccagcgccgacggcctcacctacaacgacttcctgattctcccaggattcatagacttcatagctgatgaggtggacctgacctcagccctgacccggaagatcacgctgaagacgccactgatctcctcccccatggacactgtgacagaggctgacatggccattgccatggctctgatgggaggtattggtttcattcaccacaactgcaccccagagttccaggccaacgaggtgcggaaggtcaagtttgaacagggcttcatcacggaccctgtggtgctgagcccctcgcacactgtgggcgatgtgctggaggccaagatgcggcatggcttctctggcatccccatcactgagacgggcaccatgggcagcaagctggtgggcatcgtcacctcccgagacatcgactttcttgctgagaaggaccacaccaccctcctcagtgaggtgatgacgccaaggattgaactggtggtggctccagcaggtgtgacgttgaaagaggcaaatgagatcctgcagcgtagcaagaaagggaagctgcctatcgtcaatgattgcgatgagctggtggccatcatcgcccgcaccgacctgaagaagaaccgagactaccctctggcctccaaggattcccagaagcagctgctctgtggggcagctgtgggcacccgtgaggatgacaaataccgtctggacctgctcacccaggcgggcgtcgacgtcatagtcttggactcgtcccaagggaattcggtgtatcagatcgccatggtgcattacatcaaacagaagtacccccacctccaggtgattggggggaacgtggtgacagcagcccaggccaagaacctgattgatgctggtgtggacgggctgcgcgtgggcatgggctgcggctccatctgcatcacccaggaagtgatggcctgtggtcggccccagggcactgctgtgtacaaggtggctgagtatgcccggcgctttggtgtgcccatcatagccgatggcggcatccagaccgtgggacacgtggtcaaggccctggcccttggagcctccacagtgatgatgggctccctgctggccgccactacggaggcccctggcgagtacttcttctcagacggggtgcggctcaagaagtaccggggcatgggctcactggatgccatggagaagagcagcagcagccagaaacgatacttcagcgagggggataaagtgaagatcgcgcagggtgtctcgggctccatccaggacaaaggatccattcagaagttcgtgccctacctcatagcaggcatccaacacggctgccaggatatcggggcccgcagcctgtctgtccttcggtccatgatgtactcaggagagctcaagtttgagaagcggaccatgtcggcccagattgagggtggtgtccatggcctgcactcttacgaaaagcggctgtactgaggacagcggtggaggccgaggtggtggaggggatgcaccccagtgtccacttttgggcacagcctccctccataactgagtggtccacagatttgcactacgggttctccagctcctttccaggcagagaggaggggaggtcctgaggggactgctgcccctcactcggcatcccctgcagagtcaggactgctcccggggccaggctgccctgggagcccccctccgagcccagccagccaggctctcaggccctgcgcctgcctcaggtctttcttgctgcagcctgctccagcctggcccccaccccaggggcaggcggcccctcctggcttctcctgtagggcacctccctgcccctagcctcccaggaaatggtgctctcctggccctgcctctggcccttcccgggccgctgcccctcagccatgtggcacttctgagctcctgacctaggccaaggggaggtctctgcccccttccccggccctgggctacccttgggtcctgctcctcaggccgctcccctgtccctggccatgggtaggagactgccctggtcatggccgcctgcctgtcattcctgactcaccaccgtccccaggtgaaccattcctcccttctcctcagctgcagtcgaaggctttaactttgcacacttgggatcacagttgcgtcattgtgtattaaatacttggaataaatcaagcaggt

SEQ ID NO: 142481 - DNA, 1643 bp, Homo sapiens
  Payload ID: 8157
  Gene Symbol: IMPDH2
  Gene Name: IMP (inosine 5'-monophosphate) dehydrogenase 2
  Uniprot ID: P12268
  ENST ID: ENST00000326739
  CDS Start-End: 41-1585
cgcggtcctcggagacacgcggcggtgtcctgtgttggccatggccgactacctgattagtgggggcacgtcctacgtgccagacgacggactcacagcacagcagctcttcaactgcggagacggcctcacctacaatgactttctcattctccctgggtacatcgacttcactgcagaccaggtggacctgacttctgctctgaccaagaaaatcactcttaagaccccactggtttcctctcccatggacacagtcacagaggctgggatggccatagcaatggcgcttacaggcggtattggcttcatccaccacaactgtacacctgaattccaggccaatgaagttcggaaagtgaagaaatatgaacagggattcatcacagaccctgtggtcctcagccccaaggatcgcgtgcgggatgtttttgaggccaaggcccggcatggtttctgcggtatcccaatcacagacacaggccggatggggagccgcttggtgggcatcatctcctccagggacattgattttctcaaagaggaggaacatgactgtttcttggaagagataatgacaaagagggaagacttggtggtagcccctgcaggcatcacactgaaggaggcaaatgaaattctgcagcgcagcaagaagggaaagttgcccattgtaaatgaagatgatgagcttgtggccatcattgcccggacagacctgaagaagaatcgggactacccactagcctccaaagatgccaagaaacagctgctgtgtggggcagccattggcactcatgaggatgacaagtataggctggacttgctcgcccaggctggtgtggatgtagtggttttggactcttcccagggaaattccatcttccagatcaatatgatcaagtacatcaaagacaaataccctaatctccaagtcattggaggcaatgtggtcactgctgcccaggccaagaacctcattgatgcaggtgtggatgccctgcgggtgggcatgggaagtggctccatctgcattacgcaggaagtgctggcctgtgggcggccccaagcaacagcagtgtacaaggtgtcagagtatgcacggcgctttggtgttccggtcattgctgatggaggaatccaaaatgtgggtcatattgcgaaagccttggcccttggggcctccacagtcatgatgggctctctcctggctgccaccactgaggcccctggtgaatacttcttttccgatgggatccggctaaagaaatatcgcggtatgggttctctcgatgccatggacaagcacctcagcagccagaacagatatttcagtgaagctgacaaaatcaaagtggcccagggagtgtctggtgctgtgcaggacaaagggtcaatccacaaatttgtcccttacctgattgctggcatccaacactcatgccaggacattggtgccaagagcttgacccaagtccgagccatgatgtactctggggagcttaagtttgagaagagaacgtcctcagcccaggtggaaggtggcgtccatagcctccattcgtatgagaagcggcttttctgaaaagggatccagcacacctcctcggtttttttttcaataaaagtttagaaagaaaaaa

SEQ ID NO: 142482 - DNA, 1469 bp, Homo sapiens
  Payload ID: 8157
  Gene Symbol: IMPDH2
  Gene Name: IMP (inosine 5'-monophosphate) dehydrogenase 2
  ENST ID: ENST00000429182
  CDS Start-End: 1-1411
catggacacagtcacagaggctgggatggccatagcaatggcgcttacaggcggtattggcttcatccaccacaactgtacacctgaattccaggccaatgaagttcggaaagtgaagaaatatgaacagggattcatcacagaccctgtggtcctcagccccaaggatcgcgtgcgggatgtttttgaggccaaggcccggcatggtttctgcggtatcccaatcacagacacaggccggatggggagccgcttggtgggcatcatctcctccagggacattgattttctcaaagaggaggaacatgactgtttcttggaagagataatgacaaagagggaagacttggtggtagcccctgcaggcatcacactgaaggaggcaaatgaaattctgcagcgcagcaagaagggaaagttgcccattgtaaatgaagatgatgagcttgtggccatcattgcccggacagacctgaagaagaatcgggactacccactagcctccaaagatgccaagaaacagctgctgtgtggggcagccattggcactcatgaggatgacaagtataggctggacttgctcgcccaggctggtgtggatgtagtggttttggactcttcccagggaaattccatcttccagatcaatatgatcaagtacatcaaagacaaataccctaatctccaagtcattggaggcaatgtggtcactgctgcccaggccaagaacctcattgatgcaggtgtggatgccctgcgggtgggcatgggaagtggctccatctgcattacgcaggaagtggctcccaagatccctccagacataaagtcccacagccccaaatgcccttctactgtcacgggttgctatatgctggcctgtgggcggccccaagcaacagcagtgtacaaggtgtcagagtatgcacggcgctttggtgttccggtcattgctgatggaggaatccaaaatgtgggtcatattgcgaaagccttggcccttggggcctccacagtcatgatgggctctctcctggctgccaccactgaggcccctggtgaatacttcttttccgatgggatccggctaaagaaatatcgcggtatgggttctctcgatgccatggacaagcacctcagcagccagaacagatatttcagtgaagctgacaaaatcaaagtggcccagggagtgtctggtgctgtgcaggacaaagggtcaatccacaaatttgtcccttacctgattgctggcatccaacactcatgccaggacattggtgccaagagcttgacccaagtccgagccatgatgtactctggggagcttaagtttgagaagagaacgtcctcagcccaggtggaaggtggcgtccatagcctccattcgtatgagaagcggcttttctgaaaagggatccagcacacctcctcggtttttttttcaataaaagtttagaaagaaaaaa

SEQ ID NO: 142483 - DNA, 865 bp, Homo sapiens
  Payload ID: 8157
  Gene Symbol: IMPDH2
  Gene Name: IMP (inosine 5'-monophosphate) dehydrogenase 2
  ENST ID: ENST00000442157
  CDS Start-End: 29-865
agacacgcggcggtgtcctgtgttggccatggccgactacctgattagtgggggcacgtcctacgtgccagacgacggactcacagcacagcagctcttcaactgcggagacggcctcacctacaatgactttctcattctccctgggtacatcgacttcactgcagaccaggtggacctgacttctgctctgaccaagaaaatcactcttaagaccccactggtttcctctcccatggacacagtcacagaggctgggatggccatagcaatggcgaaatatgaacagggattcatcacagaccctgtggtcctcagccccaaggatcgcgtgcgggatgtttttgaggccaaggcccggcatggtttctgcggtatcccaatcacagacacaggccggatggggagccgcttggtgggcatcatctcctccagggacattgattttctcaaagaggaggaacatgactgtttcttggaagagataatgacaaagagggaagacttggtggtagcccctgcaggcatcacactgaaggaggcaaatgaaattctgcagcgcagcaagaagggaaagttgcccattgtaaatgaagatgatgagcttgtggccatcattgcccggacagacctgaagaagaatcgggactacccactagcctccaaagatgccaagaaacagctgctgtgtggggcagccattggcactcatgaggatgacaagtataggctggacttgctcgcccaggctggtgtggatgtagtggttttggactcttcccagggaaattccatcttccagatcaatatgatcaagtacatcaaagacaaataccctaatctccaagtcattggaggcaatggt

SEQ ID NO: 142484 - DNA, 2028 bp, Homo sapiens
  Payload ID: 8158
  Gene Symbol: IMP3
  Gene Name: IMP3, U3 small nucleolar ribonucleoprotein
  Uniprot ID: Q9NV31
  ENST ID: ENST00000314852
  CDS Start-End: 945-1499
aaaatagaagagactcactctgaaaccaccattccagaaacccgggcagggctcggctgtccctctggctcccagattcttttggcggctctcgctttgggaggctctcacattcctctgcagatctgccccttcctccttcctcctcttgctcctgggccactgggttttcaaaaatccggaaaatccaagaggggcaaggagaaaagcagcagccgcctgaatcgagtccaagggtggatgtgtccggcttcacaacgagccaggccgggaaaacaaggactgaggcttacacaacaggccgccaactcttcgaccccggctgcgcagccggagcccccgccggctcgggcgccctctccccgccccagaagtggccagccccaaccccggaggaaggagggggcgcgacgaggctgtcgggcgacttctagccactcgctgagtggtctcttttgtttgcctaattcctcagcagtttctgagcctgacgctgaccctgctctgaatcccaggaaccccgtccaaaggtaaccccagcagaaaccggttcctcacccgggacttacgacccccgatcaccaccctcgcgtgcacgcacacactcaacagtttggagtttggagagtgagctccggcgagcagatggcgcggccagccgtctgtccgtccgtcctcctctccgccctgcggggcccggccagtggggggcgggctgcgcccccagcctgccttccccggcgctcgcagaccctccgctccgccagcgagaaggcagctccaaaacaaaaaggcgattccgggaggtggcgtcctgaggaaggaggggatcgccaaaggggagggtcccaggccgtccaggtcttggggcgccgcggcggaaatcgcgcggatgccagaacgcgctctcagcttcgggtcctgcggctgcggctgccgccatcatggtgcggaagcttaagttccacgagcagaagctgctgaagcaggtggacttcctgaactgggaggtcaccgaccacaacctgcacgagctgcgcgtgctgcggcgttaccggctgcagcggcgggaggactacacgcgctacaaccagctgagccgtgccgtgcgtgagctggcgcggcgcctgcgcgacctgcccgaacgcgaccagttccgcgtgcgcgcttcggccgcgctgctggacaagctgtatgctctcggcttggtgcccacgcgcggttcgctggagctctgcgacttcgtcacggcctcgtccttctgccgccgccgcctccccaccgtgctcctcaagctgcgcatggcgcagcaccttcaggctgccgtggcctttgtggagcaagggcacgtacgcgtgggccctgacgtggttaccgaccccgccttccttgtcacgcgcagcatggaggactttgtcacttgggtggactcgtccaagatcaagcggcacgtgctagagtacaatgaggagcgcgatgacttcgatctggaagcctagcggatctcccactttgcatggctgtcttttacagatgggaaaactgaggcctgatgctggagattctatgagggtgctctcctcaagggtatcagacggtcgtaggttcttaagaatttgattcatcagtggcaggccatgcatagagccacgggaggtgcgtccttgttttccagggaatgttcttagaacttggactactgattattaattgactgtgccttgggaaacagtgggaagtaacttggtgcagcactggggtattgttggcttcttgtgttggaaactttgtaatgtaaaaggaaaaactggaaatccccacgccctgtttccctttatcgtcttgtggttggactggttcaattcgtttaactcgaattcttgctcctggccgtggttaagctgtgtacagatgatggagagtttggcctcaagtttttataaactgagcgagactagtgttcaggatctcctcccttgtttaaatgtcaataaatgccccaactgctttgtaagtgcaactttttaa

SEQ ID NO: 142485 - DNA, 1237 bp, Homo sapiens
  Payload ID: 8158
  Gene Symbol: IMP3
  Gene Name: IMP3, U3 small nucleolar ribonucleoprotein
  Uniprot ID: Q9NV31
  ENST ID: ENST00000403490
  CDS Start-End: 156-710
ccctggccaatgggaagtgagggcgtgactttaagtctttctttcattggcccagggtcccaggccgtccaggtcttggggcgccgcggcggaaatcgcgcggatgccagaacgcgctctcagcttcgggtcctgcggctgcggctgccgccatcatggtgcggaagcttaagttccacgagcagaagctgctgaagcaggtggacttcctgaactgggaggtcaccgaccacaacctgcacgagctgcgcgtgctgcggcgttaccggctgcagcggcgggaggactacacgcgctacaaccagctgagccgtgccgtgcgtgagctggcgcggcgcctgcgcgacctgcccgaacgcgaccagttccgcgtgcgcgcttcggccgcgctgctggacaagctgtatgctctcggcttggtgcccacgcgcggttcgctggagctctgcgacttcgtcacggcctcgtccttctgccgccgccgcctccccaccgtgctcctcaagctgcgcatggcgcagcaccttcaggctgccgtggcctttgtggagcaagggcacgtacgcgtgggccctgacgtggttaccgaccccgccttccttgtcacgcgcagcatggaggactttgtcacttgggtggactcgtccaagatcaagcggcacgtgctagagtacaatgaggagcgcgatgacttcgatctggaagcctagcggatctcccactttgcatggctgtcttttacagatgggaaaactgaggcctgatgctggagattctatgagggtgctctcctcaagggtatcagacggtcgtaggttcttaagaatttgattcatcagtggcaggccatgcatagagccacgggaggtgcgtccttgttttccagggaatgttcttagaacttggactactgattattaattgactgtgccttgggaaacagtgggaagtaacttggtgcagcactggggtattgttggcttcttgtgttggaaactttgtaatgtaaaaggaaaaactggaaatccccacgccctgtttccctttatcgtcttgtggttggactggttcaattcgtttaactcgaattcttgctcctggccgtggttaagctgtgtacagatgatggagagtttggcctcaagtttttataaactgagcgagactagtgttcaggatctcctcccttgtttaaatgtcaataaatgccccaactgctttgtaagtgcaacttttt

SEQ ID NO: 142486 - DNA, 1740 bp, Homo sapiens
  Payload ID: 8159
  Gene Symbol: IMP4
  Gene Name: IMP4, U3 small nucleolar ribonucleoprotein
  Uniprot ID: Q96G21
  ENST ID: ENST00000259239
  CDS Start-End: 709-1584
cccatctggggatccccacgccggcagcaccaaggcctctgggtcagcttctttaagggcaagcgcccttagagaagcagcacggaagcaaccaatcaactggtttctccaattagcccccaagtggatcagcctgctgaactgtcggctagggttataggtggttctgagtccttccggaagctgccgaatcttagaagtcgcgccactgttgtggcgatggaagaaggcgaagctctacagaaaccattttggttgagggaagagtggttttaaagttaatttggaaaggagccggcaagcaaccttcagtcggtgtgcggtttttacagttgaactgtttccagccgctaattatgattgttttagcggttcgtcatctgaaaactgcattctgcacggcggtggtggggggaggacgaggatggagaagcctgggcggacatatttattagctgcggtcctaagtcacgtgtgacattctgtatccagtctatcggttatcccaaggagaacgccctgccggaatggccaatcgccttgagatgtccccgccctattcgccatcttaacatagggcattccccacagctgcaggcaccagtgaagcgtctaagggaccatcttggttgagggcggaagtgaggactgtgtcgcgctggaggagcccacagattctcccggacccacgtggaagcggcactcaagatgctgcgccgcgaggcccgcctgcgccgcgagtacctgtaccgcaaggcccgggaggaggcgcagcgctcagcccaggagaggaaggagcggctgcggcgcgcgctggaagaaaaccgcctgattcccactgagttacgccgagaggctctggccttacaggggtccctggagtttgatgatgctggaggtgaaggtgtgaccagccacgtggatgatgaataccgatgggcaggagtcgaggatcccaaggttatgatcactacctcccgagaccccagttcccgcctcaagatgtttgcaaaggagctgaagctggtgttcccgggcgcccagcgaatgaaccgaggtcgacatgaagtgggggcactggtgcgagcctgcaaagccaacggcgtcaccgatctgctggtcgttcacgagcatcggggcacacctgtggggctcatcgtcagccacctgccctttggtcctactgcctacttcacgctgtgcaatgtggtcatgcggcatgacatcccagacctgggcaccatgtcggaggccaagccccacctcatcacacacggcttctcctcccgcctgggcaagcgggtctctgacatcctccgatacctatttcccgtgcccaaagatgacagccaccgggtcatcaccttcgcaaaccaggacgactacatatcattccggcaccatgtgtataagaagacagaccaccgcaacgtggagctcactgaggtcgggccccgctttgagctgaagctgtacatgatccgtctgggcacgctggagcaggaggccacagcagacgtggagtggcgctggcacccttacaccaataccgcacgcaagagagtcttcctgagcaccgagtgagcacactcaccactcagtcaggacatggacttggaactcaggatggggctgtcatagacagacccaccagtaggaactgtcacagaatggcctgctgaactgggatgtggaactgtggcgggtggagaggtctgaataaaccgtctgtgtcatggc

SEQ ID NO: 142487 - DNA, 958 bp, Homo sapiens
  Payload ID: 8159
  Gene Symbol: IMP4
  Gene Name: IMP4, U3 small nucleolar ribonucleoprotein
  ENST ID: ENST00000409935
  CDS Start-End: 57-803
gtcgcgctggaggagcccacagattctcccggacccacgtggaagcggcactcaagatgctgcgccgcgaggcccgcctgcgccgcgagtacctgtaccgcaaggcccgggaggaggcgcagcgctcagcccaggagaggaaggagcggctgcggcgcgcgctggaagaaaaccgcctgattcccactgagttacgccgagaggctctggccttacaggggtccctggagtttgatgatgctggaggtgaaggtgtgaccagccacgtggatgatgaataccgatgggcaggagtcgaggatcccaaggttatgatcactacctcccgagaccccagttcccgcctcaagatgtttgcaaaggagctgaagctggtgttcccgggcgcccagcgaatgaaccgaggtcgacatgaagtgggggcactggtgcgagcctgcaaagccaacggcgtcaccgatctgctggtcgttcacgagcatcggggcacacctgtggggctcatcgtcagccacctgccctttggtcctactgcctacttcacgctgtgcaatgtggtcatgcggcatgacatcccagacctgggcaccatgtcggaggccaagccccacctcatcacacacggcttctcctcccgcctgggcaagcgggtctctgacatcctccgatacctatttcccgtgcccaaagatgacagccaccgggtcatcaccttcgcaaaccaggacgactacatatcattccggcaccatgtgtataagaagacagaccaccgcaacgtggagctcactgagtgtacatgatccgtctgggcacgctggagcaggaggccacagcagacgtggagtggcgctggcacccttacaccaataccgcacgcaagagagtcttcctgagcaccgagtgagcacactcaccactcagtcaggacatggacttggaactcaggatggggctg

SEQ ID NO: 142488 - DNA, 822 bp, Homo sapiens
  Payload ID: 8159
  Gene Symbol: IMP4
  Gene Name: IMP4, U3 small nucleolar ribonucleoprotein
  ENST ID: ENST00000409649
  CDS Start-End: 306-822
cccacgtggaagcggcactcaagatggtaggagaatgagctcctgtttcggagctgcgccgcgaggcccgcctgcgccgcgagtacctgtaccgcaaggcccgggaggaggcgcagcgctcagcccaggagaggaaggagcggctgcggcgcgcgctggaagaaaaccgcctgattcccactgagttacgccgagaggctctggccttacaggggtccctggagtttgatgatgctggaggtgaaggtgtgaccagccacgtggatgatgaataccgatgggcaggagtcgaggatcccaaggttatgatcactacctcccgagaccccagttcccgcctcaagatgtttgcaaaggagctgaagctggtgttcccgggcgcccagcgaatgaaccgaggtcgacatgaagtgggggcactggtgcgagcctgcaaagccaacggcgtcaccgatctgctggtcgttcacgagcatcggggcacacctgtggggctcatcgtcagccacctgccctttggtcctactgcctacttcacgctgtgcaatgtggtcatgcggcatgacatcccagacctgggcaccatgtcggaggccaagccccacctcatcacacacggcttctcctcccgcctgggcaagcgggtctctgacatcctccgatacctatttcccgtgcccaaagatgacagccaccgggtcatcaccttcgcaaaccaggacgactacatatcattccggcaccatgtgtataagaagacagaccaccgcaacgtggagctcactgaggtcgggccccgctttgagctgaagctgtacatga

SEQ ID NO: 142489 - DNA, 924 bp, Homo sapiens
  Payload ID: 8159
  Gene Symbol: IMP4
  Gene Name: IMP4, U3 small nucleolar ribonucleoprotein
  ENST ID: ENST00000428740
  CDS Start-End: 215-924
gcactcaagatggtaggagaatgagctcctgtttcggagctgcgccgcgaggcccgcctgcgccgcgagtacctgtaccgcaaggcccgggaggaggcgcagcgctcagcccaggagaggaaggagcggctgcggcgcgcgctggaagaaaaccgcctgattcccactgagttacgccgagaggctctggccttacaggggtccctggagtttgatgatgctggaggtgaaggtaactatacaaggtgtgaccagccacgtggatgatgaataccgatgggcaggagtcgaggatcccaaggttatgatcactacctcccgagaccccagttcccgcctcaagatgtttgcaaaggagctgaagctggtgttcccgggcgcccagcgaatgaaccgaggtcgacatgaagtgggggcactggtgcgagcctgcaaagccaacggcgtcaccgatctgctggtcgttcacgagcatcggggcacacctgtggggctcatcgtcagccacctgccctttggtcctactgcctacttcacgctgtgcaatgtggtcatgcggcatgacatcccagacctgggcaccatgtcggaggccaagccccacctcatcacacacggcttctcctcccgcctgggcaagcgggtctctgacatcctccgatacctatttcccgtgcccaaagatgacagccaccgggtcatcaccttcgcaaaccaggacgactacatatcattccggcaccatgtgtataagaagacagaccaccgcaacgtggagctcactgaggtcgggccccgctttgagctgaagctgtacatgatccgtctgggcacgctggagcaggaggccacagcagacgtggagtggcgctggcacccttacaccaataccgcacgcaagagagtcttcctgagcaccgagtg

SEQ ID NO: 142490 - DNA, 923 bp, Homo sapiens
  Payload ID: 8159
  Gene Symbol: IMP4
  Gene Name: IMP4, U3 small nucleolar ribonucleoprotein
  ENST ID: ENST00000452955
  CDS Start-End: 1-842
tttccaaatgcttgccggccgttttccttgcccattgggttctcctgttggttttgagagtgtttcttccgtgtgatgaaaaccgcctgattcccactgagttacgccgagaggctctggccttacaggggtccctggagtttgatgatgctggaggtgaaggtgtgaccagccacgtggatgatgaataccgatgggcaggagtcgaggatcccaaggttatgatcactacctcccgagaccccagttcccgcctcaagatgtttgcaaaggagctgaagctggtgttcccgggcgcccagcgaatgaaccgaggtcgacatgaagtgggggcactggtgcgagcctgcaaagccaacggcgtcaccgatctgctggtcgttcacgagcatcggggcacacctgtggggctcatcgtcagccacctgccctttggtcctactgcctacttcacgctgtgcaatgtggtcatgcggcatgacatcccagacctgggcaccatgtcggaggccaagccccacctcatcacacacggcttctcctcccgcctgggcaagcgggtctctgacatcctccgatacctatttcccgtgcccaaagatgacagccaccgggtcatcaccttcgcaaaccaggacgactacatatcattccggcaccatgtgtataagaagacagaccaccgcaacgtggagctcactgaggtcgggccccgctttgagctgaagctgtacatgatccgtctgggcacgctggagcaggaggccacagcagacgtggagtggcgctggcacccttacaccaataccgcacgcaagagagtcttcctgagcaccgagtgagcacactcaccactcagtcaggacatggacttggaactcaggatggggctgtcatagacagacccaccagtaggaactgtc

SEQ ID NO: 142491 - DNA, 460 bp, Homo sapiens
  Payload ID: 8159
  Gene Symbol: IMP4
  Gene Name: IMP4, U3 small nucleolar ribonucleoprotein
  ENST ID: ENST00000456713
  CDS Start-End: 22-252
cacgtggaagcggcactcaagatgctgcgccgcgaggcccgcctgcgccgcgagtacctgtaccgcaaggcccgggaggaggcgcagcgctcagcccaggagaggaaggagcggctgcggcgcgcgctggaagaaaaccgcctgattcccactgagttacgccgagaggctctggccttacaggggtccctggagtttgatgatgctggaggtgaaggtaactatacaaggtgtgaccagccacgtggatgatgaataccgatgggcaggagtcgaggatcccaaggttatgatcactacctcccgagaccccagttcccgcctcaagatgtttgcaaaggagctgaagctggtgttcccgggcgcccagcgaatgaaccgaggtcgacatgaagtgggggcactggtgcgagcctgcaaagccaacggcgtcaccgatctgctggtcgttcacgagcat

SEQ ID NO: 142492 - DNA, 3792 bp, Homo sapiens
  Payload ID: 8160
  Gene Symbol: IMPACT
  Gene Name: impact RWD domain protein
  Uniprot ID: Q9P2X3
  ENST ID: ENST00000284202
  CDS Start-End: 142-1104
agatgccggcggcgcggcgtggcagggttgtggttccgggtcgggccgcgccgcagccagctctcggctcgcagccgcagcgccccgcccccgcgctccggacctggcaggcggcggctgcagggcaggtccaggggccacatggctgagggggacgcagggagcgaccagaggcagaatgaggaaattgaagcaatggcagccatttatggcgaggagtggtgtgtcattgatgactgtgccaaaatattttgtattagaattagcgacgatatagatgaccccaaatggacactttgcttgcaggtgatgctgccgaatgaatacccaggtacagctccacctatctaccagttgaatgctccttggcttaaagggcaagaacgtgcggatttatcaaatagccttgaggaaatatatattcagaatatcggtgaaagtattctttacctgtgggtggagaaaataagagatgttcttatacaaaaatctcagatgacagaaccaggcccagatgtaaagaagaaaactgaagaggaagatgttgaatgtgaagatgatctcattttagcatgtcagccggaaagttcgcttaaagcattggattttgatatcagtgaaactcggacagaagtagaagtagaagaattacctccgattgatcatggcattcctattacagaccgaagaagtacttttcaggcacacttggctccagtggtttgtcccaaacaggtgaaaatggttctttccaaattgtatgagaataagaaaatagctagtgccacccacaacatctatgcctacagaatatattgtgaggataaacagaccttcttacaggattgtgaggatgatggggaaacagcagctggtgggcgtcttcttcatctcatggagattttgaatgtgaagaatgtcatggtggtagtatcacgctggtatggagggattctgctaggaccagatcgctttaaacatatcaacaactgtgccagaaacatactagtggaaaagaactacacaaattcacctgaggagtcatctaaggctttgggaaagaacaaaaaagtaagaaaagacaagaagaggaatgaacattaatacctgaaactataggaaaggttaatttgcctataattatatatacattccatagtcatcaaggaatatattgtgcagagagagtatccttgactgcttaagtcagccagttcagcatggataccaacattagcttttcttcttggttatatcatctgccaaaaatagagaacttatgatctattcatgtgtgtttcaggcttatttgggagaactaatttgaacttaatcaccacttcatctaattttagcaaggtaacagttgcccagggcagtacctgaattaactgtccatttcagtacatgtcaagtgcctttgttaggtggagaagaaatgtctctagaggaatataaatacctgatttcttgtcatcgagattcttgtactgttaaatgaatattgccttttactgctctttatggcttattggaataggagctcatttaagattgatcttggagagtttcttcttgtgattttagttcataagtatgtcacctttcattttatagtgttcatcattgagtaatggattaagtgaaaatccaggagtatccatctgcagttatgtgctgaggtgataattcatccaacatatttgttagcataaatattatgcttcagtttctgttgcaaattggtgattgtgaaattacagaaagtgattttctagtctgctttttttgtttaattcttgtaatgtaagcaataaatatggagtgtcagtagtctccttccaccccagaaatgtgttggtgtaacattctcgtttcttttaacaacctggaagtacctttcttgtgatcttcactgaggaattagaactatgatagaagttaggctgtggcaaatgggacattcgtagagtgggatagaggtggcagaatgaacctggtgtagggcaggagtatgttgtgtagttacatcaatttgatgcatgctttccatctgcactccagacggctttctcagttccaagattttgcagagagaaggagcaaaccttttcattggaaaaacagaaacaaccctcccccccattttttcccctctattcatcaaacctttatgtatctttcatcttccagttacctctaggcatttagatagtgaaatttacctttgagatataacaataagtgattaactgttcactttcagatgtaatggcaaacaattgttaaaagttattaactgatcacagatttgcctggacttcccttcccagggagggaacagaagttaggaggcaactttgggatggtgctagagcatggaaagcacagagaattggacaaacaggtctttttctcttttctctgatgttttacctttaaaagatccaacatccttaccgttggtatttttagtaaggttatagtaaatagctttacaccaggatggattctgaaatataaattctaaattatatttgttataactatattttatgttgtatgttatcaggagccatcagagaatgacctttttgtgtttggaacacttggttccatgaaaagtatgctttgtgttttaactgttaaaataatttaaaaattaattattttacataattaaagaagttaaaaactattaacattaaataatttcacaatttcaacatgtcaaacctatgaagggagataggaaacaatgagaaacttacttttgctcctttatacagaattattaactatattttactaactaaaaaactctagtattctttacctaaagtcaattggctggtaagagggagagatgcaaaattctccagctctgaacttggagctacttcacactctactcttaatggaaacttgaactaatgatagatagtatttttttcctctatttaaaatttttgtcttgattaggagatttttcagttctccatataataattttctacaatcagatctatgctgtggcatattttgctttatttaaaaatttttttttagagatgagttcttgctctgtcacctaggctggagtgcagtggcatgatcatggctcactgcagccttgaccttccagcctgccaagtagctgggattacagacaggcatgtgctattacacctggctaatttttaaagttttttttgtaaagatagggtctttctatgttgcccaggctcgtcttgagctcctggcctcaatcgatcttcctgccaaggttttggaattacaggtgtgagccaccatgcctggcctgctttgacatattttatagtgtgttaattacaaatagtcttcatatgccagaatataagagcaagtgttatctactttttagatgggaattgcagaagctgcatcaaaagtatgctttgaggtatatatagtgaaacagagcctttctgaagagaattatatcaaactaattacaaccaagaaataatagtatgaagcggatgctgtttggaggacaggaaaatttatcgggaaaattacataatccctctgattccactatccagagatagccattattattaatatttggtatgtacatccttatattatttttttcttatgcatgattttgtatatatggttatttttctttccataaaaatggtattaaactgtatatactgttttgtagcctacatatttcatatagaagtatattgttaacattttccatgtcaataaatattcttctatggcttaaatgtc

SEQ ID NO: 142493 - DNA, 603 bp, Homo sapiens
  Payload ID: 8160
  Gene Symbol: IMPACT
  Gene Name: impact RWD domain protein
  ENST ID: ENST00000585067
  CDS Start-End: 64-603
cccgcccccgcgctccggacctggcaggcggcggctgcagggcagaatgaggaaattgaagcaatggcagccatttatggcgaggagtggtgtgtcattgatgactgtgccaaaatattttgtattagaattagcgacgatatagatgaccccaaatggacactttgcttgcaggtgatgctgccgaatgaatacccaggtacagctccacctatctaccagttgaatgctccttggcttaaagggcaagaacgtgcggatttatcaaatagccttgaggaaatatatattcagaatatcggtgaaagtattctttacctgtgggtggagaaaataagagatgttcttatacaaaaatctcagatgacagaaccaggcccagatgtaaagaagaaaactgaagaggaagatgttgaatgtgaagatgatctcattttagcatgtcagccggaaagttcgcttaaagcattggattttgatatcagtgaaactcggacagaagtagaagtagaagaattacctccgattgatcatggcattcctattacagaccgaagaagtacttttcaggcacacttggctccagtggtttgtcccaaacag

SEQ ID NO: 142494 - DNA, 520 bp, Homo sapiens
  Payload ID: 8160
  Gene Symbol: IMPACT
  Gene Name: impact RWD domain protein
  ENST ID: ENST00000580035
  CDS Start-End: 1-55
ggctttgggaaagaacaaaaaagtaagaaaagacaagaagaggaatgaacattaatacctgaaactataggaaagtgttcatcattgagtaatggattaagtgaaaatccaggagtatccatctgcagttatgtgctgagatgggaattgcagaagctgcatcaaaagtatgctttgaggtatatatagtgaaacagagcctttctgaagagaattatatcaaactaattacaaccaagaaataatagtatgaagcggatgctgtttggaggacaggaaaatttatcgggaaaattacataatccctctgattccactatccagagatagccattattattaatatttggtatgtacatccttatattatttttttcttatgcatgattttgtatatatggttatttttctttccataaaaatggtattaaactgtatatactgttttgtagcctacatatttcatatagaagtatattgttaacattttccatgtcaataaatattcttctatggctta

SEQ ID NO: 142495 - DNA, 598 bp, Homo sapiens
  Payload ID: 8160
  Gene Symbol: IMPACT
  Gene Name: impact RWD domain protein
  ENST ID: ENST00000581278
  CDS Start-End: 1-321
gatggggaaacagcagctggtgggcgtcttcttcatctcatggagattttgaatgtgaagaatgtcatggtggtagtatcacgctggtatggagggattctgctaggaccagatcgctttaaacatatcaacaactgtgccagaaacatactagtggaaaagaactacacaaattcacctgaggagtcatctaaggctttgggaaagaacaaaaaaatgggaattgcagaagctgcatcaaaagtatgctttgaggtatatatagtgaaacagagcctttctgaagagaattatatcaaactaattacaaccaagaaataatagtatgaagcggatgctgtttggaggacaggaaaatttatcgggaaaattacataatccctctgattccactatccagagatagccattattattaatatttggtatgtacatccttatattatttttttcttatgcatgattttgtatatatggttatttttctttccataaaaatggtattaaactgtatatactgttttgtagcctacatatttcatatagaagtatattgttaacattttccatgtcaataaatattcttctatggcttaaa

SEQ ID NO: 142496 - DNA, 570 bp, Homo sapiens
  Payload ID: 8160
  Gene Symbol: IMPACT
  Gene Name: impact RWD domain protein
  ENST ID: ENST00000578221
  CDS Start-End: 16-570
aggtccaggggccacatggctgagggggacgcagggagcgaccagaggcagaatgaggaaattgaagcaatggcagccatttatggcgaggagtggtgtgtcattgatgactgtgccaaaatattttgtattagaattagcgacgatatagatgaccccaaatggacactttgcttgcaggtgatgctgccgaatgaatacccaggtacagctccacctatctaccagttgaatgctccttggcttaaagggcaagaacgtgcggatttatcaaatagccttgaggaaatatatattcagaatatcggtgaaagtattctttacctgtgggtggagaaaataagagatgttcttatacaaaaatctcagatgacagaaccaggcccagatgtaaagaagaaaactgaagaggaagatgttgaatgtgaagatgatctcattttagcatgtcagccggaaagttcgcttaaagcattggattttgatatcagtgaaactcggacagaagtagaagaattacctccgattgatcatggcattcctattacagaccgaagaagtacttttcag

SEQ ID NO: 142497 - DNA, 4356 bp, Homo sapiens
  Payload ID: 8161
  Gene Symbol: IPO11
  Gene Name: importin 11
  Uniprot ID: Q9UI26
  ENST ID: ENST00000325324
  CDS Start-End: 170-3097
tttggagctgcgacgccaaacatggcgtgttcctagaagccgctttcggcatcagtaggcggcggcgtggggtctggcagcgtggggagagggaccaaccgacgccacttcgtgttgggaagtgggagcgggagggccgggcaattcccgaccgaaccaaacggtttccatggatctcaatagtgccagcactgttgttcttcaggtgttaacacaggccaccagtcaggatactgctgtgttaaaaccagctgaggagcagttgaagcagtgggagacacagccaggtttctattcagtgttgctgaatattttcaccaaccacactttggatataaatgtaaggtggcttgctgtactgtattttaaacatggaattgatcgctactggagacgtgtagcacctcatgctctctcagaggaggagaaaactactctgcgtgcagggctcatcaccaacttcaatgaaccaataaaccagattgcaactcagattgcagtgctcattgcaaaagttgctagattggattgtcccagacagtggcctgaactaattcccactcttatagagtctgttaaagtccaggatgatcttcgacagcacagagcattacttaccttctatcatgttaccaagacactggcatctaaacgacttgctgctgatagaaaactattttatgatttagcttctggaatttataattttgcctgctctctgtggaatcaccacacagacacattcctgcaagaagtttcttctggcaatgaagctgcaattttgagttcactagaacgaacactgctatcattgaaagtgctgcgtaagttaactgttaatggatttgtggaacctcataagaatatggaggtgatgggttttttacatggaatatttgaacgtctaaaacagtttctggaatgcagtagaagtataggtacagataatgtgtgtagagatagactggaaaagaccatcattctttttactaaagtgcttttggacttcttggatcagcatcctttttcatttactcctctaattcagagatcactggaattttctgtaagctatgtttttacagaagttggtgaaggcgttacatttgaacgattcattgtccaatgtatgaatcttattaagatgattgtcaaaaattatgcttataagccatccaaaaattttgaagatagcagccctgaaactcttgaagcccataagattaagatggcattcttcacatatcctactttgacagagatatgtagaagattagtctctcattatttcctattaactgaagaagaactgacaatgtgggaagaagacccagaaggctttacagtggaagaaacaggaggagattcttggaaatatagtttgaggccatgcactgaagtattatttatagatatattccatgaatataatcagactcttactcctgtacttctagaaatgatgcaaacacttcaaggacccacaaatgtggaagatatgaatgcactgttaatcaaagatgctgtgtataatgctgttggattagctgcttatgagctctttgacagtgttgattttgatcagtggtttaaaaaccagcttcttccagaattacaagtcattcacaataggtataagccattgcgacgcagggtgatttggctcatcggtcagtggatttctgtgaaattcaagtctgacttaagacccatgctttatgaagcaatctgtaacttgcttcaagatcaagatttagtggtccgtattgaaacagctacaactttgaagttaactgttgatgattttgaatttagaacagatcagtttctaccgtatttggaaaccatgttcacactactttttcagttactgcagcaagttacagaatgtgacacaaagatgcatgttttgcatgtcctttcttgtgtgatcgaaagagtcaacatgcagatacgaccatatgtgggatgtttggtacaatatttgcccctcctttggaagcagagtgaagaacacaatatgttgagatgtgctattttgacaacacttattcatcttgttcagggattaggagcagacagcaagaacctgtaccctttcctgctcccagttattcaactgagtacagatgtttcacagcctccacatgtttatcttctggaagatggtttagaattatggttagtaactttggaaaacagtccatgtattacaccagagttgcttcgtatatttcagaatatgtcaccacttcttgaactaagttcagaaaatcttagaacttgctttaagatcatcaatggttatatctttttatcatcaacagaatttttacagacatacgcagtaggtctatgccagtccttttgtgaacttttaaaggaaattactacagaaggtcaagttcaggtgctcaaggttgtggaaaatgcccttaaagtgaacccaatactaggtccacaaatgtttcaaccgattttaccctatgttttcaagggtattatagaaggggagaggtatcctgtagtgatgtccacgtatcttggagttatgggtcgagttctactacaaaacactagttttttttcttcactacttaatgagatggcccataaatttaatcaggagatggaccagcttttgggaaatatgattgaaatgtgggttgatcgaatggacaacattacccagcctgaaagaagaaaactttcagctttggctttgctctctcttctgccatctgataatagtgttatccaagataaattctgtgggattataaacatttcagtagaaggcctgcatgatgtcatgacggaagatcctgaaacaggaacttataaagactgtatgttgatgtctcatcttgaggaaccaaaagtaacagaagatgaagaaccacccacagaacaagataagaggaaaaagatgctggccctgaaggaccctgttcatacagtgtcactgcagcagttcatctacgagaagctcaaggcacagcaggagatgctaggagaacaaggtttccagtccctcatggaaacagtggatacggagattgtcacccagctacaggagtttttgcaaggattctaagagcacatgacatgtggctgcctcccctttcagaaacaagctgagtaacccagcctgccgtttgtatgtgagagcctgctgagatgaagaaatcacttcatgaaaataagcaaagaccacacattttttactacaaaatgtaaaggataaatgtaaatcctgcataactaaaatcacaaacctattcctcaaaagaatttaattttatatttatgagggggcccttcactaaaaagtacatgtaaaagtacatttgatgacaatagctgcttagtttcctgttaagagaagaaactttatcttttaattatgtgctcttaatatttgaagatgagagttaatacctgagatgtttttctgcaaccaaaattcattaaatttggctgccttatcctttttttaagctaatgaaactacaggtttgaaaaatgacaaagctgttcagatgatgctattaaagaaatgtgtgtactaagcaaaaatatataaatagtgacaaatacacattaccaagcttatcttgcaagggagttattttcatctaacatagaaagtgtgttttatcagacaaatgcttttattttcattctaataatttgatacagaaattagtaaaggcatttttttctttttttttccagtaaatacattgggtctataaatgtgcatttgtaagggccacaaaagtgaacgtgtggtactgtagtaccacgtgggagacctctggttatggtttagtcctagttcctttgttactcctgtgagcaccgagaagaactgggcgactcccagtcccacctgtgctgtgacagtcccacgtggctatgacagactgtttagtacttacccttctcaggttcctcagtgcaggggtgcatcagggcctcaataataggggtatacctgggaggatccagcagtaatccccagggtactaggattactagtactctgatggaactagtcttccttccttattcctcgaacatgcagtacataaaaaggggaaaaggagaaaaaaaaagccttactttgttttacttgccatttattgtaaggaaactttaaagcattttttaggaaatactcaaaagcaaggttggaaaatgttttatctttctatagaaagttgggtacagtatgtaactgcgggaaacccactgcccctttgtaagctgtggaacccaaactgtatggggatatttgatgttttcagaaagaggaagaaaatatggtccaaattaaattttccaaagata

SEQ ID NO: 142498 - DNA, 3564 bp, Homo sapiens
  Payload ID: 8161
  Gene Symbol: IPO11
  Gene Name: importin 11
  Uniprot ID: Q9UI26
  ENST ID: ENST00000409296
  CDS Start-End: 131-3178
atagcaccaggtgtgaaactgctgggtcatagaagatacagtcacgagttgcttaaggctgggatacatcctgagaaatgggtcgttaggcaattttgttgttctatgaacatcatatgaacaaacctagatggtacagcctattatacacttgggctatgtggtatatagcttattgtatctaggctataagcctgtacagcatgttactgcactgaatactgtaagcagttgtcacaaaatggtttccatggatctcaatagtgccagcactgttgttcttcaggtgttaacacaggccaccagtcaggatactgctgtgttaaaaccagctgaggagcagttgaagcagtgggagacacagccaggtttctattcagtgttgctgaatattttcaccaaccacactttggatataaatgtaaggtggcttgctgtactgtattttaaacatggaattgatcgctactggagacgtgtagcacctcatgctctctcagaggaggagaaaactactctgcgtgcagggctcatcaccaacttcaatgaaccaataaaccagattgcaactcagattgcagtgctcattgcaaaagttgctagattggattgtcccagacagtggcctgaactaattcccactcttatagagtctgttaaagtccaggatgatcttcgacagcacagagcattacttaccttctatcatgttaccaagacactggcatctaaacgacttgctgctgatagaaaactattttatgatttagcttctggaatttataattttgcctgctctctgtggaatcaccacacagacacattcctgcaagaagtttcttctggcaatgaagctgcaattttgagttcactagaacgaacactgctatcattgaaagtgctgcgtaagttaactgttaatggatttgtggaacctcataagaatatggaggtgatgggttttttacatggaatatttgaacgtctaaaacagtttctggaatgcagtagaagtataggtacagataatgtgtgtagagatagactggaaaagaccatcattctttttactaaagtgcttttggacttcttggatcagcatcctttttcatttactcctctaattcagagatcactggaattttctgtaagctatgtttttacagaagttggtgaaggcgttacatttgaacgattcattgtccaatgtatgaatcttattaagatgattgtcaaaaattatgcttataagccatccaaaaattttgaagatagcagccctgaaactcttgaagcccataagattaagatggcattcttcacatatcctactttgacagagatatgtagaagattagtctctcattatttcctattaactgaagaagaactgacaatgtgggaagaagacccagaaggctttacagtggaagaaacaggaggagattcttggaaatatagtttgaggccatgcactgaagtattatttatagatatattccatgaatataatcagactcttactcctgtacttctagaaatgatgcaaacacttcaaggacccacaaatgtggaagatatgaatgcactgttaatcaaagatgctgtgtataatgctgttggattagctgcttatgagctctttgacagtgttgattttgatcagtggtttaaaaaccagcttcttccagaattacaagtcattcacaataggtataagccattgcgacgcagggtgatttggctcatcggtcagtggatttctgtgaaattcaagtctgacttaagacccatgctttatgaagcaatctgtaacttgcttcaagatcaagatttagtggtccgtattgaaacagctacaactttgaagttaactgttgatgattttgaatttagaacagatcagtttctaccgtatttggaaaccatgttcacactactttttcagttactgcagcaagttacagaatgtgacacaaagatgcatgttttgcatgtcctttcttgtgtgatcgaaagagtcaacatgcagatacgaccatatgtgggatgtttggtacaatatttgcccctcctttggaagcagagtgaagaacacaatatgttgagatgtgctattttgacaacacttattcatcttgttcagggattaggagcagacagcaagaacctgtaccctttcctgctcccagttattcaactgagtacagatgtttcacagcctccacatgtttatcttctggaagatggtttagaattatggttagtaactttggaaaacagtccatgtattacaccagagttgcttcgtatatttcagaatatgtcaccacttcttgaactaagttcagaaaatcttagaacttgctttaagatcatcaatggttatatctttttatcatcaacagaatttttacagacatacgcagtaggtctatgccagtccttttgtgaacttttaaaggaaattactacagaaggtcaagttcaggtgctcaaggttgtggaaaatgcccttaaagtgaacccaatactaggtccacaaatgtttcaaccgattttaccctatgttttcaagggtattatagaaggggagaggtatcctgtagtgatgtccacgtatcttggagttatgggtcgagttctactacaaaacactagttttttttcttcactacttaatgagatggcccataaatttaatcaggagatggaccagcttttgggaaatatgattgaaatgtgggttgatcgaatggacaacattacccagcctgaaagaagaaaactttcagctttggctttgctctctcttctgccatctgataatagtgttatccaagataaattctgtgggattataaacatttcagtagaaggcctgcatgatgtcatgacggaagatcctgaaacaggaacttataaagactgtatgttgatgtctcatcttgaggaaccaaaagtaacagaagatgaagaaccacccacagaacaagataagaggaaaaagatgctggccctgaaggaccctgttcatacagtgtcactgcagcagttcatctacgagaagctcaaggcacagcaggagatgctaggagaacaaggtttccagtccctcatggaaacagtggatacggagattgtcacccagctacaggagtttttgcaaggattctaagagcacatgacatgtggctgcctcccctttcagaaacaagctgagtaacccagcctgccgtttgtatgtgagagcctgctgagatgaagaaatcacttcatgaaaataagcaaagaccacacattttttactacaaaatgtaaaggataaatgtaaatcctgcataactaaaatcacaaacctattcctcaaaagaatttaattttatatttatgagggggcccttcactaaaaagtacatgtaaaagtacatttgatgacaatagctgcttagtttcctgttaagagaagaaactttatcttttaattatgtgctcttaatatttgaagatgagagttaatacctgagatgtttttctgcaaccaaaattcattaaatttggctg

SEQ ID NO: 142499 - DNA, 1725 bp, Homo sapiens
  Payload ID: 8161
  Gene Symbol: IPO11
  Gene Name: importin 11
  ENST ID: ENST00000409534
  CDS Start-End: 177-461
ggaggtcagcagtgccacagaacaaactggagttaagaaatgtcgttcttcagatttaaaaagaaaacctttactgaatcagctgagtgttaataatacgaatttccttttcttgtgttatccaagataaattctgtgggattataaacatttcagtagaaggcctgcatgatgtcatgacggaagatcctgaaacaggaacttataaagactgtatgttgatgtctcatcttgaggaaccaaaagtaacagaagatgaagaaccacccacagaacaagataagaggaaaaagatgctggccctgaaggaccctgttcatacagtgtcactgcagcagttcatctacgagaagctcaaggcacagcaggagatgctaggagaacaaggtttccagtccctcatggaaacagtggatacggagattgtcacccagctacaggagtttttgcaaggattctaagagcacatgacatgtggctgcctcccctttcagaaacaagctgagtaacccagcctgccgtttgtatgtgagagcctgctgagatgaagaaatcacttcatgaaaataagcaaagaccacacattttttactacaaaatgtaaaggataaatgtaaatcctgcataactaaaatcacaaacctattcctcaaaagaatttaattttatatttatgagggggcccttcactaaaaagtacatgtaaaagtacatttgatgacaatagctgcttagtttcctgttaagagaagaaactttatcttttaattatgtgctcttaatatttgaagatgagagttaatacctgagatgtttttctgcaaccaaaattcattaaatttggctgccttatcctttttttaagctaatgaaactacaggtttgaaaaatgacaaagctgttcagatgatgctattaaagaaatgtgtgtactaagcaaaaatatataaatagtgacaaatacacattaccaagcttatcttgcaagggagttattttcatctaacatagaaagtgtgttttatcagacaaatgcttttattttcattctaataatttgatacagaaattagtaaaggcatttttttctttttttttccagtaaatacattgggtctataaatgtgcatttgtaagggccacaaaagtgaacgtgtggtactgtagtaccacgtgggagacctctggttatggtttagtcctagttcctttgttactcctgtgagcaccgagaagaactgggcgactcccagtcccacctgtgctgtgacagtcccacgtggctatgacagactgtttagtacttacccttctcaggttcctcagtgcaggggtgcatcagggcctcaataataggggtatacctgggaggatccagcagtaatccccagggtactaggattactagtactctgatggaactagtcttccttccttattcctcgaacatgcagtacataaaaaggggaaaaggagaaaaaaaaagccttactttgttttacttgccatttattgtaaggaaactttaaagcattttttaggaaatactcaaaagcaaggttggaaaatgttttatctttctatagaaagttgggtacagtatgtaactgcgggaaacccactgcccctttgtaagctgtggaacccaaactgtatggggatatttgatgttttcagaaagaggaagaaaatatggtccaaattaaattttccaaagatacctca

SEQ ID NO: 142500 - DNA, 3005 bp, Homo sapiens
  Payload ID: 8161
  Gene Symbol: IPO11
  Gene Name: importin 11
  ENST ID: ENST00000424533
  CDS Start-End: 114-2705
gaggactgcagtctggagttggagcccttgtcccaaccagggctggataagaaggtgttggtgtggtgctctcggtgttgcgaaggctgtttaagttatatgatgaggtttccatggatctcaatagtgccagcactgttgttcttcaggtgttaacacaggccaccagtcaggatactgctgtgttaaaaccagctgaggagcagttgaagcagtgggagacacagccaggtttctattcagtgttgctgaatattttcaccaaccacactttggatataaatgtaaggtggcttgctgtactgtattttaaacatggaattgatcgctactggagacgtgtagcacctcatgctctctcagaggaggagaaaactactctgcgtgcagggctcatcaccaacttcaatgaaccaataaaccagattgcaactcagattgcagtgctcattgcaaaagttgctagattggattgtcccagacagtggcctgaactaattcccactcttatagagtctgttaaagtccaggatgatcttcgacagcacagagcattacttaccttctatcatgttaccaagacactggcatctaaacgacttgctgctgatagaaaactattttatgatttagcttctggaatttataattttgcctgctctctgtggaatcaccacacagacacattcctgcaagaagtttcttctggcaatgaagctgcaattttgagttcactagaacgaacactgctatcattgaaagtgctgcgtaagttaactgttaatggatttgtggaacctcataagaatatggaggtgatgggttttttacatggaatatttgaacgtctaaaacagtttctggaatgcagtagaagtataggtacagataatgtgtgtagagatagactggaaaagaccatcattctttttactaaagtgcttttggacttcttggatcagcatcctttttcatttactcctctaattcagagatcactggaattttctgtaagctatgtttttacagaagttggtgaaggcgttacatttgaacgattcattgtccaatgtatgaatcttattaagatgattgtcaaaaattatgcttataagccatccaaaaattttgaagatagcagccctgaaactcttgaagcccataagattaagatggcattcttcacatatcctactttgacagagatatgtagaagattagtctctcattatttcctattaactgaagaagaactgacaatgtgggaagaagacccagaaggctttacagtggaagaaacaggaggagattcttggaaatatagtttgaggccatgcactgaagtattatttatagatatattccatgaatataatcagactcttactcctgtacttctagaaatgatgcaaacacttcaaggacccacaaatgtggaagatatgaatgcactgttaatcaaagatgctgtgtataatgctgttggattagctgcttatgagctctttgacagtgttgattttgatcagtggtttaaaaaccagcttcttccagaattacaagtcattcacaataggtataagccattgcgacgcagggtgatttggctcatcggtcagtggatttctgtgaaattcaagtctgacttaagacccatgctttatgaagcaatctgtaacttgcttcaagatcaagatttagtggtccgtattgaaacagctacaactttgaagttaactgttgatgattttgaatttagaacagatcagtttctaccgtatttggaaaccatgttcacactactttttcagttactgcagcaagttacagaatgtgacacaaagatgcatgttttgcatgtcctttcttgtgtgatcgaaagagtcaacatgcagatacgaccatatgtgggatgtttggtacaatatttgcccctcctttggaagcagagtgaagaacacaatatgttgagatgtgctattttgacaacacttattcatcttgttcagggattaggagcagacagcaagaacctgtaccctttcctgctcccagttattcaactgagtacagatgtttcacagcctccacatgtttatcttctggaagatggtttagaattatggttagtaactttggaaaacagtccatgtattacaccagagttgcttcgtatatttcagaatatgtcaccacttcttgaactaagttcagaaaatcttagaacttgctttaagatcatcaatggttatatctttttatcatcaacagaatttttacagacatacgcagtaggtctatgccagtccttttgtgaacttttaaaggaaattactacagaaggtcaagttcaggtgctcaaggttgtggaaaatgcccttaaagtgaacccaatactaggtccacaaatgtttcaaccgattttaccctatgttttcaagggtattatagaaggggagaggtatcctgtagtgatgtccacgtatcttggagttatgggtcgagttctactacaaaacactagttttttttcttcactacttaatgagatggcccataaatttaatcaggagatggaccagcttttgggaaatatgattgaaatgtgggttgatcgaatggacaacattacccagcctgaaagaagaaaactttcagctttggctttgctctctcttctgccatctgataatagccaattctgatctgaacagaaaatccaagaacagggatatgtgtggattacagttttctctgccttgcctacgactgtttctgccttgcatccaagggtccttaagccgttgtcttcattgattcatcttcaggcaaattctaatccttgggaatgtaactgcaaacttttgggccttcgagactggctagcatcttcagccattactctaaacatctattgtcagaatcccccatccatgcgtggcagagcattacgttatattaacattacaaattgtgttacatcttcaataaatgtatccagagct

SEQ ID NO: 142501 - DNA, 1368 bp, Homo sapiens
  Payload ID: 8161
  Gene Symbol: IPO11
  Gene Name: importin 11
  ENST ID: ENST00000413749
  CDS Start-End: 1-180
atggaccagcttttgggaaatatgattgaaatgtgggttgatcgaatggacaacattacccagcctgaaagaagaaaactttcagctttggctttgctctctcttctgccatctgataatagcttcctgtatccatggcaacctctgttttacacattgactgtaaaggaaccaatgtgaagagtggtgtttcctgagcaaacggtgacttaaaaaaaaaaaaaaaaaagtggtggggtggaggtcagcagtgccacagaacaaactggagttaagaaatgtcgttcttcagatttaaaaagaaaacctttactgaatcagctgagtgttaataatacgaatttccttttcttgccttgcatccaagggtccttaagccgttgtcttcattgattcatcttcaggcaaattctaatccttgggaatgtaactgcaaacttttgggccttcgagactggctagcatcttcagccattactctaaacatctattgtcagaatcccccatccatgcgtggcagagcattacgttatattaacattacaaattgtgttacatcttcaataaatgtatccagagcttgggctgttgtaaaatctcctcatattcatcacaagactactgcgctaatgatggcctggcataaagtaaccacaaatggcagtcctctggaaaatactgagactgagaacattactttctgggaacgaattcctacttcacctgctggtagattttttcaagagaatgcctttggtaatccattagagactacagcagtgttacctgtgcaaatacaacttactacttctgttaccttgaacttggaaaaaaacagtgctctaccgaatgatgctgcttcaatgtcagggaaaacatctctaatttgtacacaagaagttgagaagttgaatgaggcttttgacattttgctagcttttttcatcttagcttgtgttttaatcatttttttgatctacaaagttgttcagtttaaacaaaaactaaaggcatcagaaaactcaagggaaaatagacttgaatactacagcttttatcagtcagcaaggtataatgtaactgcctcaatttgtaacacttccccaaattctctagaaagtcctggcttggagcagattcgacttcataaacaaattgttcctgaaaatgaggcacaggtcattctttttgaacattctgctttataactcaactaaatattgtctataagaaacttcagtgccatggacatgatttaaactgaaacctccttatataattatatactttagttggaaatataatgaattatatgaggttagcattattaaaatatgtttttaataatttgtgaacagtgtattcatt

SEQ ID NO: 142502 - DNA, 1865 bp, Homo sapiens
  Payload ID: 8161
  Gene Symbol: IPO11
  Gene Name: importin 11
  ENST ID: ENST00000511713
  CDS Start-End: 1-482
tgttgagatgtgctattttgacaacacttattcatcttgttcaggttgtggaaaatgcccttaaagtgaacccaatactaggtccacaaatgtttcaaccgattttaccctatgttttcaagggtattatagaaggggagaggtatcctgtagtgatgtccacgtatcttggagttatgggtcgagttctactacaaaacactagttttttttcttcactacttaatgagatggcccataaatttaatcaggagatggaccagcttttgggaaatatgattgaaatgtgggttgatcgaatggacaacattacccagcctgaaagaagaaaactttcagctttggctttgctctctcttctgccatctgataatagtgttatccaagataaattctgtgggattataaacatttcagtagaaggcctgcatgatgtcatgacggaagatcctgaaacaggaacttataaagactggccctgaaggaccctgttcatacagtgtcactgcagcagttcatctacgagaagctcaaggcacagcaggagatgctaggagaacaaggtttccagtccctcatggaaacagtggatacggagattgtcacccagctacaggagtttttgcaaggattctaagagcacatgacatgtggctgcctcccctttcagaaacaagctgagtaacccagcctgccgtttgtatgtgagagcctgctgagatgaagaaatcacttcatgaaaataagcaaagaccacacattttttactacaaaatgtaaaggataaatgtaaatcctgcataactaaaatcacaaacctattcctcaaaagaatttaattttatatttatgagggggcccttcactaaaaagtacatgtaaaagtacatttgatgacaatagctgcttagtttcctgttaagagaagaaactttatcttttaattatgtgctcttaatatttgaagatgagagttaatacctgagatgtttttctgcaaccaaaattcattaaatttggctgccttatcctttttttaagctaatgaaactacaggtttgaaaaatgacaaagctgttcagatgatgctattaaagaaatgtgtgtactaagcaaaaatatataaatagtgacaaatacacattaccaagcttatcttgcaagggagttattttcatctaacatagaaagtgtgttttatcagacaaatgcttttattttcattctaataatttgatacagaaattagtaaaggcatttttttctttttttttccagtaaatacattgggtctataaatgtgcatttgtaagggccacaaaagtgaacgtgtggtactgtagtaccacgtgggagacctctggttatggtttagtcctagttcctttgttactcctgtgagcaccgagaagaactgggcgactcccagtcccacctgtgctgtgacagtcccacgtggctatgacagactgtttagtacttacccttctcaggttcctcagtgcaggggtgcatcagggcctcaataataggggtatacctgggaggatccagcagtaatccccagggtactaggattactagtactctgatggaactagtcttccttccttattcctcgaacatgcagtacataaaaaggggaaaaggagaaaaaaaaagccttactttgttttacttgccatttattgtaaggaaactttaaagcattttttaggaaatactcaaaagcaaggttggaaaatgttttatctttctatagaaagttgggtacagtatgtaactgcgggaaacccactgcccctttgtaagctgtggaacccaaactgtatggggatatttgatgttttcagaaagaggaagaa

SEQ ID NO: 142503 - DNA, 530 bp, Homo sapiens
  Payload ID: 8161
  Gene Symbol: IPO11
  Gene Name: importin 11
  ENST ID: ENST00000505902
  CDS Start-End: 340-530
gacaaagcccctccttccccttcccgccgttcgcctatcgccttctctctctgccggtcgcatgcgcgctggtctcctgtgacgtagttttcgcgcgtccgcgtcgtttggagctgcgacgccaaacatggcgtgttcctagaagccgctttcggcatcagtaggcggcggcgtggggtctggcagcgtggggagagggaccaaccgacgccacttcgtgttgggaagtgggagcgggagggccgggcaattcccgaccgaaccaaacgctaaggagacaccagagggtgatggttgacagtagttggtacctcacagctgggcactgatcaggtttccatggatctcaatagtgccagcactgttgttcttcaggtgttaacacaggccaccagtcaggatactgctgtgttaaaaccagctgaggagcagttgaagcagtgggagacacagccaggtttctattcagtgttgctgaatattttcaccaaccacactttggatataaatgtaaggtggcttgctgtact

SEQ ID NO: 142504 - DNA, 584 bp, Homo sapiens
  Payload ID: 8161
  Gene Symbol: IPO11
  Gene Name: importin 11
  ENST ID: ENST00000514647
  CDS Start-End: 139-584
actgccgggaattggagtcacagagggaggaaggccgaaccgcgggagcctacagatcccagaagacaccgcgctaccgaggactgcagtctggagttggagcccttgtcccaaccagggctggataagaaggtttccatggatctcaatagtgccagcactgttgttcttcaggtgttaacacaggccaccagtcaggatactgctgtgttaaaaccagctgaggagcagttgaagcagtgggagacacagccaggtttctattcagtgttgctgaatattttcaccaaccacactttggatataaatgtaaggtggcttgctgtactgtattttaaacatggaattgatcgctactggagacgtgtagcacctcatgctctctcagaggaggagaaaactactctgcgtgcagggctcatcaccaacttcaatgaaccaataaaccagattgcaactcagattgcagtgctcattgcaaaagttgctagattggattgtcccagacagtggcctgaactaattcccactcttatagagtctgttaaagtccaggatgatcttcgacagcacagagcattact

SEQ ID NO: 142505 - DNA, 554 bp, Homo sapiens
  Payload ID: 8161
  Gene Symbol: IPO11
  Gene Name: importin 11
  ENST ID: ENST00000506200
  CDS Start-End: 69-554
acatgcttttaatgaaaaagtgaaggtagttgtccgtttatagagaggagcttcatggagaggtttccatggatctcaatagtgccagcactgttgttcttcaggtgttaacacaggccaccagtcaggatactgctgtgttaaaaccagctgaggagcagttgaagcagtgggagacacagccaggtttctattcagtgttgctgaatattttcaccaaccacactttggatataaatgtaaggtggcttgctgtactgtattttaaacatggaattgatcgctactggagacgtgtagcacctcatgctctctcagaggaggagaaaactactctgcgtgcagggctcatcaccaacttcaatgaaccaataaaccagattgcaactcagattgcagtgctcattgcaaaagttgctagattggattgtcccagacagtggcctgaactaattcccactcttatagagtctgttaaagtccaggatgatcttcgacagcacagagcattacttaccttctatcatgttaccaagacactggcatctaaacga

SEQ ID NO: 142506 - DNA, 1201 bp, Homo sapiens
  Payload ID: 8162
  Gene Symbol: IPO13
  Gene Name: importin 13
  ENST ID: ENST00000372339
  CDS Start-End: 586-1131
cttcacttcatctcttccccctcacccacagcagcactggctccttggtgtgtgtatggccgaagagggcctggacacagggtaccctgggtgaaagatggggctgaggctccaaggctcctgctgtacttttcttctttttgagcaggagctggagggtgcctcaggaatacaggagggacatgggaggagggctgttgggctgagggctccctgtctggctgccatctcttcttcctgctaccctgttcacaaactgggggtgcttaactccctctgtgaatcaacatgaagtcactgctggcaacctagagcctgcgagacatctggccctgatggagggggagggaaaggtgtctggaacccaaactttctgcattatgatccccacccccaacctctctcacgtacacctgcgtgttcatgtacacatacatgtacatagcatcccttgagctgtcctcacctgacctactgaactctgaggtggtccgggtcccccagagatggctgggtagctggttttggcagcctctacctgtgaggtgtgaagttgggggctggggtggcaggtgagtgggggggatggtccttggagctggctggggctgggcttaccagctccacctcctgcaggctctgaagcggaagccagatttgttcctgtgtgaacgattggatgtcaaagctgtgttccagtgtgctgtgctggccctcaagttccctgaggcacctactgtcaaggcctcctgtggcttctttacagagctgctgcctcggtgtggggaagtagagtctgtgggaaaggtggtacaggaagacggtcgtatgctgctcatagcagtgctggaggccattgggggccaggcctcccgcagcctcatggactgctttgccgatatcctgttcgccctgaacaagcactgcttcagcctcctgagcatgtggatcaaggaggccctgcagccacctggtttcccctctgcccgcctcagccctgaacagaaggataccttcagccagcagatccttcgcgagcgagtgaacaagaggcgggtgaaggagatggtgaaggagttcacactgctgtgccggggtctccatggcacagattacacagctgactactgaggggtgcccccatcccatccaccccttctcttcatccttccctattcccaaagagtaaacctggaccctc

SEQ ID NO: 142507 - DNA, 3894 bp, Homo sapiens
  Payload ID: 8162
  Gene Symbol: IPO13
  Gene Name: importin 13
  Uniprot ID: O94829
  ENST ID: ENST00000372343
  CDS Start-End: 663-3554
cggccggcctggcttgtcttgtcagtcactggggcggaggcagcggctgtagcggggctgtagccgggcgttgagcacagcgcgggccaggccgaacggaagggacctgccacagcccctcaactccacggactcttcgccctagactagcggagctgcatctccgcgcttcgttggacgcctccgtaaccacgaagggctctctctctcccgtgaccctccagccccatgacctgttcatagcagccgagagctcacccaggcgggggtgttgtgggtacaggccatcgaccctgtgacccctcaagagccagggactcggtttcccccgcaggcctccctcccctgtgactccctccacacagattctggggacagagctgttacctgccactaggatccccgcctgagagctcctcactgacggctccctcctcggagtccccttcattgggtctcctaagagcaccaattttggtctctggcaagcctcccacccccaaacgaggtggggaggcctcggcagccatgcccgccctgggccccccctcaccccaccactccctgggcacccaagccggggtctagcagggggccagcagccaaggggctggggcaggagacagatcagggcccacctccctgccagggagggagcaaagatggagcggcgggaggagcagccgggggctgcaggggctggagcagcaccagccttggacttcactgtggagaacgtggagaaggcgctgcaccagctctactatgatcccaacattgagaataagaacctggctcagaagtggctgatgcaggcccaggtctccccacaggcctggcacttcagctggcagctactgcagcccgacaaggtaccagagatccagtactttggggccagtgctcttcacatcaagatctctcgctactggagtgacatccccactgaccagtatgaaagcctaaaggcacagctcttcacccagatcacccgctttgccagtggctccaagattgtactgactcggctgtgcgtggcactggcctcactggctctcagcatgatgcctgacgcttggccatgtgctgtggcagatatggtacgactcttccaggctgaggactcaccagtggatgggcagggccgctgcctagccctgttagagctgctgacagtgctgcctgaggagttccagaccagtcgcctaccccagtaccgcaaaggcctggtgcggaccagcctggcggtggaatgtggggctgtcttcccgctgctggagcagctgctacagcagcccagctcacccagctgtgtgcgtcagaaggtgctcaagtgtttctccagctgggtgcagctggaggtgccgctgcaggactgtgaggcgctcattcaggctgcctttgctgctctgcaggactcggagctcttcgacagcagtgtggaggccattgtgaatgccatctcacagcctgatgcccagaggtacgtgaacacactcctgaaactcatcccgctggtgctgggtctgcaggaacaactgcggcaggcagtgcagaatggggacatggagacctcccatggcatctgtcgcatcgctgtggccctgggcgagaaccactcccgggccttgctggaccaagtagagcactggcagagtttcctggcactcgtcaacatgattatgttctgcacaggcatccctggccactatcctgtcaatgagaccaccagctccctaaccctcaccttctggtacacactgcaggatgatattctatcctttgaggcagagaagcaggctgtataccagcaggtgtaccggccagtctacttccagctggtggatgtgcttctgcacaaggcccagttcccttctgatgaggaatatggattctggtcctcagacgagaaggagcagttccgaatttacagggtggacatctcagacacgctcatgtatgtctatgagatgttgggggccgagctgctcagcaacctctatgacaagctgggtcgtttgctcaccagctcagaggagccctactcctggcagcacacagaggccctcctctacggcttccaatccatcgcagagaccattgacgtcaactattctgatgtggtgcctgggctcattggcctcatcccacggatcagcatcagcaacgtgcagctggcagacactgtcatgttcaccattggagctctgtctgaatggctggctgaccaccccgtcatgatcaacagtgttctgcccttggtactgcatgccctaggcaatcctgagctgtctgtctcttctgtgtccaccctcaagaagatctgccgagagtgcaagtatgacctgcctccctatgctgccaacattgtggctgtgtcccaggatgtgctgatgaaacagatccacaagacaagccagtgcatgtggctgatgcaggcgctgggcttcctgctgtcagctcttcaagtggaggagatccttaagaacctgcactcgcttatctcaccctatatccagcaactggagaagctggcagaggagatacccaatccctccaacaagctggccattgttcacatcttggggcttctctccaacctcttcaccacactggacatcagtcatcatgaggatgatcatgaaggccctgagcttcggaagctgccagtgccacagggacccaaccccgtggtggtggtgctgcagcaggtcttccagcttatccagaaggtgctgagcaaatggttgaatgatgcccaggttgtggaggcggtgtgcgctatctttgagaagtctgttaagacgctgctggatgactttgcccccatggtgccacagctgtgtgagatgctgggtcggatgtacagcaccatcccccaggcctctgctcttgacctcactcgacagctggtccacatctttgctcatgagcctgcccactttcccccaattgaggccctcttcctgctcgtcacctccgtcacactcactctcttccagcaagggcccagggatcatcctgatattgttgattcatttatgcaactcctggcacaggctctgaagcggaagccagatttgttcctgtgtgaacgattggatgtcaaagctgtgttccagtgtgctgtgctggccctcaagttccctgaggcacctactgtcaaggcctcctgtggcttctttacagagctgctgcctcggtgtggggaagtagagtctgtgggaaaggtggtacaggaagacggtcgtatgctgctcatagcagtgctggaggccattgggggccaggcctcccgcagcctcatggactgctttgccgatatcctgttcgccctgaacaagcactgcttcagcctcctgagcatgtggatcaaggaggccctgcagccacctggtttcccctctgcccgcctcagccctgaacagaaggataccttcagccagcagatccttcgcgagcgagtgaacaagaggcgggtgaaggagatggtgaaggagttcacactgctgtgccggggtctccatggcacagattacacagctgactactgaggggtgcccccatcccatccaccccttctcttcatccttccctattcccaaagagtaaacctggaccctcactgctgtctctgcctcctttctgctgtcaccaccacctaactgaaagcctgggtccagaaggcctgggggaaggatgggaggatgcttggacccaggccttgggagggaatggtgggaacatcctctagctcccaggttggaagagatactactgtagccaagccacctaggctggagcccttcagaatactgtcattgtccttggggcggggtggttgcagtagtgtcatcaacccccccatccccattaaattaatcccaacatgca

SEQ ID NO: 142508 - DNA, 3646 bp, Homo sapiens
  Payload ID: 8163
  Gene Symbol: IPO4
  Gene Name: importin 4
  Uniprot ID: Q8TEX9
  ENST ID: ENST00000354464
  CDS Start-End: 178-3423
gctcagcctaacggaagtggaggagccggacctctttgtgggaagcgaattgaatcaccttggcaacccgcggggcgtgcagcaacgccctttcctccggaagtgggtgtcagaacctccacgtgctgtccctccccctccccttttcggcccagtagcggcggctcagttgctgccatggagtcagccgggctagagcagctcctacgggagctgctgctaccggacaccgagcgcatccgtcgggccacggaacagctccagatcgttcttcgggcccccgccgctttgccggctctctgcgacctgctagcctcggcggccgacccccagatccgccagtttgcggccgtgctgacccgcagacgactgaacacccgctggcgacggctggcggcggagcaacgggagagcctcaagtccctgatcctgacggccctgcagagagaaacagagcactgtgtgagcctcagcctggcccagctctcagccaccatttttcgaaaggaaggcttggaggcctggccacagcttttgcagctgcttcagcacagtacccacagcccccacagcccagagagagagatggggcttttgctgctaagtgtggtggtgacctcccggcccgaggccttccaaccccaccaccgggagcttcttcggcttctgaatgagactcttggtgaggtgggctctcctgggctgctcttctactccctgcgcactctgaccaccatggctccctacctcagcactgaagatgtgcctctcgctcggatgttggtgcccaagctgatcatggccatgcagactctgatccccatagatgaggcaaaggcctgtgaggcccttgaggctttggatgaactgttggagtcagaggtgccggtcatcaccccctacctctctgaagtcctcacattctgcctggaggtagctagaaatgtggccctgggcaatgcgatacgcatacgtattctctgctgcctcactttcttggtcaaagtcaagagcaaggccttactgaagaatcgtctcctgccacccttgctgcacacccttttccccattgtggctgctgagcccccaccaggccagttggatcccgaggaccaggattcagaagaggaagagttggagattgagctgatgggggagactcccaagcatttcgctgtacaagttgtggacatgctggcactacacctgccccccgagaagctctgtccccagctgatgcccatgttggaagaggctttgcggagcgagagcccataccagcgcaaagctggactcctggtgctggccgtgctgtctgacggagctggcgaccacatcaggcagagactgctgcccccactgctgcagattgtgtgcaagggcctggaggacccctcgcaagttgtacgcaatgctgcgctgtttgccctgggccagttctcagaaaacctacagccccatatcagcagctattcaagggaggtaatgccactgctcctcgcctacttgaagtcggtgcctcttggacacacacaccacctagccaaggcctgctatgccctggagaattttgtggagaacctagggcccaaggtgcagccctaccttccggagcttatggaatgcatgctgcagcttctgaggaaccccagcagtccccgggccaaggagctggctgtgagcgccctgggagccattgctacggctgcccaggcctcgctgctgccctacttccctgccatcatggagcacctgcgggaattcctgttaacaggccgtgaggaccttcagcctgtgcagatccagagcctggagacactgggggtgctggcacgagcagtgggggagcccatgaggccgctggctgaggaatgctgccagctgggtctgggcctctgcgaccaggtagacgaccctgacttgcggcgctgcacgtacagcctatttgcagccttatcgggtctgatgggtgagggcctggcgccccacttggaacagatcaccacgctcatgctgctgtcactgcgttccaccgagggcattgtgcctcagtatgacgggagcagctccttccttctgtttgacgatgagagtgatggggaagaagaggaggagctcatggatgaggatgtggaagaagaggatgactcagagatctcagggtacagcgtggagaatgccttcttcgatgagaaggaagacacctgtgctgccgtgggggagatctctgtgaacaccagtgtggccttccttccatacatggaaagtgtctttgaagaagtatttaaactgctggagtgccctcacctgaatgtgcggaaggcagcccatgaggctctgggtcagttttgctgtgcactgcacaaggcctgtcaaagctgcccctcggaacccaacactgctgctttgcaggctgccctggcccgagtcgtgccatcctacatgcaggcagtgaacagggagcgggaacgccaggtggtgatggccgtgctggaggccctgacaggggtgctccgcagctgtgggaccctcacactgaagccccctgggcgcctcgctgagctctgtggcgtgctcaaggctgtgctgcagaggaagacagcctgtcaggatactgacgaggaggaggaagaggaagatgatgatcaggctgaatacgacgccatgttgctggagcacgctggagaggccatccctgccctggcagccgcggctgggggagactcctttgccccattctttgccggtttcctgccattattggtgtgcaagacaaaacagggctgcacagtggcagagaagtcctttgcagtggggaccttggcagagactattcagggcctgggtgctgcctcagcccagtttgtgtctcggctgctccctgtgctgttgagcaccgcccaagaggcagaccccgaggtgcgaagcaatgccatcttcgggatgggcgtgctggcagagcatgggggccaccctgcccaggaacacttccccaagctgctggggctcctttttcccctcctggcgcgggagcgacatgatcgtgtccgtgacaacatctgtggggcacttgcccgcctgttgatggccagtcccaccaggaaaccagagccccaggtgctggctgccctactgcatgccctgccactgaaggaggacttggaggagtgggtcaccattgggcgcctcttcagcttcctgtaccagagcagccctgaccaggttatagatgtggctcccgagcttctgcgtatctgcagcctcattctggctgacaacaagatcccaccagacaccaaggccgcactgttgctgctcctgacgttcctggccaaacagcacaccgacagctttcaagcagctctgggctcactgcctgttgacaaggctcaggagctccaggctgtactgggcctctcctagactgcaggctgcagccagtccagagagaatagagcctgcccaggccttaagaccacctctcagcccagttcagttctgccttaccaaagattctgagactcatacccatttggagccagccccacttgctgccttacagggctgtccctgaggctggatctgttacaaatgagtcatgacatcatactgtaataaaagcagcttgttttctgcttgaacaata

SEQ ID NO: 142509 - DNA, 535 bp, Homo sapiens
  Payload ID: 8163
  Gene Symbol: IPO4
  Gene Name: importin 4
  ENST ID: ENST00000561034
  CDS Start-End: 36-182
cttttcggcccagtagcggcggctcagttgctgccatggagtcagccgggctagagcagctcctacgggagctgctgctaccggacaccgagcgcatccgtcggcttccccccaggccacggaacagctccagatcgttcttcgggcccccgccgctttgccggctctctgcgacctgctagcctcggcggccgacccccagatccgccagtttgcggccgtgctgacccgcagacgactgaacacccgctggcgacggctggcggcggagcaacgggagagcctcaagtccctgatcctgacggccctgcagagagaaacagagtaagtacctacccacttctctcgggatcttgacgactttgtctaggtttctgccttccttttcggctccaggctgggacttgtggggcagggacttcagttctagacgcaaggtggagtgaggattttaaggctgttttgaagactaaagttcttgaggaagggtgatgatgatctgccaaacccaagtcagaagaataagactgaaatt

SEQ ID NO: 142510 - DNA, 3440 bp, Homo sapiens
  Payload ID: 8163
  Gene Symbol: IPO4
  Gene Name: importin 4
  ENST ID: ENST00000558046
  CDS Start-End: 11-475
agttgctgccatggagtcagccgggctagagcagctcctacgggagctgctgctaccggacaccgagcgcatccgtcgggccacggaacagctccagatcgttcttcgggcccccgccgctttgccggctctctgcgacctgctagcctcggcggccgacccccagacgactgaacacccgctggcgacggctggcggcggagcaacgggagagcctcaagtccctgatcctgacggccctgcagagagaaacagagcactgtgtgagcctcagcctggcccagctctcagccaccatttttcgaaaggaaggcttggaggcctggccacagcttttgcagctgcttcagcacagtacccacagcccccacagcccagagagagagatggggcttttgctgctaagtgtggtggtgacctcccggcccgaggccttccaaccccaccaccgggagcttcttcggcttctgaatgagactcttggtgaggtgggctctcctgggctgctcttctactccctgcgcactctgaccaccatggctccctacctcagcactgaagatgtgcctctcgctcggatgttggtgcccaagctgatcatggccatgcagactctgatccccatagatgaggcaaaggcctgtgaggcccttgaggctttggatgaactgttggagtcagaggtgccggtcatcaccccctacctctctgaagtcctcacattctgcctggaggtagctagaaatgtggccctgggcaatgcgatacgcatacgtattctctgctgcctcactttcttggtcaaagtcaagagcaaggccttactgaagaatcgtctcctgccacccttgctgcacacccttttccccattgtggctgctgagcccccaccaggccagttggatcccgaggaccaggattcagaagaggaagagttggagattgagctgatgggggagactcccaagcatttcgctgtacaagttgtggacatgctggcactacacctgccccccgagaagctctgtccccagctgatgcccatgttggaagaggctttgcggagcgagagcccataccagcgcaaagctggactcctggtgctggccgtgctgtctgacggagctggcgaccacatcaggcagagactgctgcccccactgctgcagattgtgtgcaagggcctggaggacccctcgcaagttgtacgcaatgctgcgctgtttgccctgggccagttctcagaaaacctacagccccatatcagcagctattcaagggaggtaatgccactgctcctcgcctacttgaagtcggtgcctcttggacacacacaccacctagccaaggcctgctatgccctggagaattttgtggagaacctagggcccaaggtgcagccctaccttccggagcttatggaatgcatgctgcagcttctgaggaaccccagcagtccccgggccaaggagctggctgtgagcgccctgggagccattgctacggctgcccaggcctcgctgctgccctacttccctgccatcatggagcacctgcgggaattcctgttaacaggccgtgaggaccttcagcctgtgcagatccagagcctggagacactgggggtgctggcacgagcagtgggggagcccatgaggccgctggctgaggaatgctgccagctgggtctgggcctctgcgaccaggtagacgaccctgacttgcggcgctgcacgtacagcctatttgcagccttatcgggtctgatgggtgagggcctggcgccccacttggaacagatcaccacgctcatgctgctgtcactgcgttccaccgagggcattgtgcctcagtatgacgggagcagctccttccttctgtttgacgatgagagtgatggggaagaagaggaggagctcatggatgaggatgtggaagaagaggatgactcagagatctcagggtacagcgtggagaatgccttcttcgatgagaaggaagacacctgtgctgccgtgggggagatctctgtgaacaccagtgtggccttccttccatacatggaaagtgtctttgaagaagtatttaaactgctggagtgccctcacctgaatgtgcggaaggcagcccatgaggctctgggtcagttttgctgtgcactgcacaaggcctgtcaaagctgcccctcggaacccaacactgctgctttgcaggctgccctggcccgagtcgtgccatcctacatgcaggcagtgaacagggagcgggaacgccaggtggtgatggccgtgctggaggccctgacaggggtgctccgcagctgtgggaccctcacactgaagccccctgggcgcctcgctgagctctgtggcgtgctcaaggctgtgctgcagaggaagacagcctgtcaggatactgacgaggaggaggaagaggaagatgatgatcaggctgaatacgacgccatgttgctggagcacgctggagaggccatccctgccctggcagccgcggctgggggagactcctttgccccattctttgccggtttcctgccattattggtgtgcaagacaaaacagggctgcacagtggcagagaagtcctttgcagtggggaccttggcagagactattcagggcctgggtgctgcctcagcccagtttgtgtctcggctgctccctgtgctgttgagcaccgcccaagaggcagaccccgaggtgcgaagcaatgccatcttcgggatgggcgtgctggcagagcatgggggccaccctgcccaggaacacttccccaagctgctggggctcctttttcccctcctggcgcgggagcgacatgatcgtgtccgtgacaacatctgtggggcacttgcccgcctgttgatggccagtcccaccaggaaaccagagccccaggtgctggctgccctactgcatgccctgccactgaaggaggacttggaggagtgggtcaccattgggcgcctcttcagcttcctgtaccagagcagccctgaccaggttatagatgtggctcccgagcttctgcgtatctgcagcctcattctggctgacaacaagatcccaccagacaccaaggccgcactgttgctgctcctgacgttcctggccaaacagcacaccgacagctttcaagcagctctgggctcactgcctgttgacaaggctcaggagctccaggctgtactgggcctctcctagactgcaggctgcagccagtccagagagaatagagcctgcccaggccttaagaccacctctcagcccagttcagttctgccttaccaaagattctgagactcatacccatttggagccagccccacttgctgccttacagggctgtccctgaggctggatctgttacaaatgagtcatgacatcatactgtaataaaagcagcttgttttctgcttg

SEQ ID NO: 142511 - DNA, 3540 bp, Homo sapiens
  Payload ID: 8163
  Gene Symbol: IPO4
  Gene Name: importin 4
  ENST ID: ENST00000558780
  CDS Start-End: 36-341
cttttcggcccagtagcggcggctcagttgctgccatggagtcagccgggctagagcagctcctacgggagctgctgctaccggacaccgagcgcatccgtcgggccacggaacagctccagatcgttcttcgggcccccgccgctttgccggctctctgcgacctgctagcctcggcggccgacccccagatccgccagtttgcggccgtgctgacccgcagacgactgaacacccgctggcgacggctggcggcggagcaacgggagagcctcaagtccctgatcctgacggccctgcagagagaaacagaatctctcctgtttgcaggcactgtgtgagcctcagcctggcccagctctcagccaccatttttcgaaaggaaggcttggaggcctggccacagcttttgcagctgcttcagcacagtacccacagcccccacagcccagagagagagatggggcttttgctgctaagtgtggtggtgacctcccggcccgaggccttccaaccccaccaccgggagcttcttcggcttctgaatgagactcttggtgaggtgggctctcctgggctgctcttctactccctgcgcactctgaccaccatggctccctacctcagcactgaagatgtgcctctcgctcggatgttggtgcccaagctgatcatggccatgcagactctgatccccatagatgaggcaaaggcctgtgaggcccttgaggctttggatgaactgttggagtcagaggtgccggtcatcaccccctacctctctgaagtcctcacattctgcctggaggtagctagaaatgtggccctgggcaatgcgatacgcatacgtattctctgctgcctcactttcttggtcaaagtcaagagcaaggccttactgaagaatcgtctcctgccacccttgctgcacacccttttccccattgtggctgctgagcccccaccaggccagttggatcccgaggaccaggattcagaagaggaagagttggagattgagctgatgggggagactcccaagcatttcgctgtacaagttgtggacatgctggcactacacctgccccccgagaagctctgtccccagctgatgcccatgttggaagaggctttgcggagcgagagcccataccagcgcaaagctggactcctggtgctggccgtgctgtctgacggagctggcgaccacatcaggcagagactgctgcccccactgctgcagattgtgtgcaagggcctggaggacccctcgcaagttgtacgcaatgctgcgctgtttgccctgggccagttctcagaaaacctacagccccatatcagcagctattcaagggaggtaatgccactgctcctcgcctacttgaagtcggtgcctcttggacacacacaccacctagccaaggcctgctatgccctggagaattttgtggagaacctagggcccaaggtgcagccctaccttccggagcttatggaatgcatgctgcagcttctgaggaaccccagcagtccccgggccaaggagctggctgtgagcgccctgggagccattgctacggctgcccaggcctcgctgctgccctacttccctgccatcatggagcacctgcgggaattcctgttaacaggccgtgaggaccttcagcctgtgcagatccagagcctggagacactgggggtgctggcacgagcagtgggggagcccatgaggccgctggctgaggaatgctgccagctgggtctgggcctctgcgaccaggtagacgaccctgacttgcggcgctgcacgtacagcctatttgcagccttatcgggtctgatgggtgagggcctggcgccccacttggaacagatcaccacgctcatgctgctgtcactgcgttccaccgagggcattgtgcctcagtatgacgggagcagctccttccttctgtttgacgatgagagtgatggggaagaagaggaggagctcatggatgaggatgtggaagaagaggatgactcagagatctcagggtacagcgtggagaatgccttcttcgatgagaaggaagacacctgtgctgccgtgggggagatctctgtgaacaccagtgtggccttccttccatacatggaaagtgtctttgaagaagtatttaaactgctggagtgccctcacctgaatgtgcggaaggcagcccatgaggctctgggtcagttttgctgtgcactgcacaaggcctgtcaaagctgcccctcggaacccaacactgctgctttgcaggctgccctggcccgagtcgtgccatcctacatgcaggcagtgaacagggagcgggaacgccaggtggtgatggccgtgctggaggccctgacaggggtgctccgcagctgtgggaccctcacactgaagccccctgggcgcctcgctgagctctgtggcgtgctcaaggctgtgctgcagaggaagacagcctgtcaggatactgacgaggaggaggaagaggaagatgatgatcagcccctgacctggctccacaggctgaatacgacgccatgttgctggagcacgctggagaggccatccctgccctggcagccgcggctgggggagactcctttgccccattctttgccggtttcctgccattattggtgtgcaagacaaaacagggctgcacagtggcagagaagtcctttgcagtggggaccttggcagagactattcagggcctgggtgctgcctcagcccagtttgtgtctcggctgctccctgtgctgttgagcaccgcccaagaggcagaccccgaggtgcgaagcaatgccatcttcgggatgggcgtgctggcagagcatgggggccaccctgcccaggaacacttccccaagctgctggggctcctttttcccctcctggcgcgggagcgacatgatcgtgtccgtgacaacatctgtggggcacttgcccgcctgttgatggccagtcccaccaggaaaccagagccccaggtgctggctgccctactgcatgccctgccactgaaggaggacttggaggagtgggtcaccattgggcgcctcttcagcttcctgtaccagagcagccctgaccaggttatagatgtggctcccgagcttctgcgtatctgcagcctcattctggctgacaacaagatcccaccagacaccaaggccgcactgttgctgctcctgacgttcctggccaaacagcacaccgacagctttcaagcagctctgggctcactgcctgttgacaaggctcaggagctccaggctgtactgggcctctcctagactgcaggctgcagccagtccagagagaatagagcctgcccaggccttaagaccacctctcagcccagttcagttctgccttaccaaagattctgagactcatacccatttggagccagccccacttgctgccttacagggctgtccctgaggctggatctgttacaaatgagtcatgacatcatactgtaataaaagcagcttgttttctgcttgaacaat

SEQ ID NO: 142512 - DNA, 579 bp, Homo sapiens
  Payload ID: 8163
  Gene Symbol: IPO4
  Gene Name: importin 4
  ENST ID: ENST00000559253
  CDS Start-End: 58-354
acgtgctgtccctccccctccccttttcggcccagtagcggcggctcagttgctgccatggagtcagccgggctagagcagctcctacgggagctgctgctaccggacaccgagcgcatccgtcgggccacggaacagctccagatcgttcttcgggcccccgccgctttgccggctctctgcgacctgctagcctcggcggccgacccccagatccgccagtttgcggccgtgctgacccgcagacgactgaacacccgctggcgacggctggcggcggagcaacgggagagcctcaagtccctgatcctgacggccctgcagagagaaacagaatggggcttttgctgctaagtgtggtggtgacctcccggcccgaggccttccaaccccaccaccgggagcttcttcggcttctgaatgagactcttggtgaggtgggctctcctgggctgctcttctactccctgcgcactctgaccaccatggctccctacctcagcactgaagatgtgcctctcgctcggatgttggtgcccaagctgatcatggccatgcagactctgatccccatagatg

SEQ ID NO: 142513 - DNA, 1864 bp, Homo sapiens
  Payload ID: 8163
  Gene Symbol: IPO4
  Gene Name: importin 4
  ENST ID: ENST00000561462
  CDS Start-End: 1-1642
tcagcctgtgcagatccagagcctggagacactgggggtgctggcacgagcagtgggggagcccatgaggccgctggctgaggaatgctgccagctgggtctgggcctctgcgaccaggtagacgaccctgacttgcggcgctgcacgtacagcctatttgcagccttatcgggtctgatgggtgagggcctggcgccccacttggaacagatcaccacgctcatgctgctgtcactgcgttccaccgagggcattgtgcctcagtatgacgggagcagctccttccttctgtttgacgatgagagtgatggggaagaagaggaggagctcatggatgaggatgtggaagaagaggatgactcagagatctcagggtacagcgtggagaatgccttcttcgatgagaaggaagacacctgtgctgccgtgggggagatctctgtgaacaccagtgtggccttccttccatacatggaaagtgtctttgaagaagtatttaaactgctggagtgccctcacctgaatgtgcggaaggcagcccatgaggctctgggtcagttttgctgtgcactgcacaaggcctgtcaaagctgcccctcggaacccaacactgctgctttgcaggctgccctggcccgagtcgtgccatcctacatgcaggcagtgaacagggagcgggaacgccaggtggtgatggccgtgctggaggccctgacaggggtgctccgcagctgtgggaccctcacactgaagccccctgggcgcctcgctgagctctgtggcgtgctcaaggctgtgctgcagaggaagacagcctgtcaggatactgacgaggaggaggaagaggaagatgatgatcaggctgaatacgacgccatgttgctggagcacgctggagaggccatccctgccctggcagccgcggctgggggagactcctttgccccattctttgccggtttcctgccattattggtgtgcaagacaaaacagggctgcacagtggcagagaagtcctttgcagtggggaccttggcagagactattcagggcctgggtgctgcctcagcccagtttgtgtctcggctgctccctgtgctgttgagcaccgcccaagaggcagaccccgaggtgcgaagcaatgccatcttcgggatgggcgtgctggcagagcatgggggccaccctgcccaggaacacttccccaagctgctggggctcctttttcccctcctggcgcgggagcgacatgatcgtgtccgtgacaacatctgtggggcacttgcccgcctgttgatggccagtcccaccaggaaaccagagccccaggtgctggctgccctactgcatgccctgccactgaaggaggacttggaggagtgggtcaccattgggcgcctcttcagcttcctgtaccagagcagccctgaccaggttatagatgtggctcccgagcttctgcgtatctgcagcctcattctggctgacaacaagatcccaccaggtgaggacaccaaggccgcactgttgctgctcctgacgttcctggccaaacagcacaccgacagctttcaagcagctctgggctcactgcctgttgacaaggctcaggagctccaggctgtactgggcctctcctagactgcaggctgcagccagtccagagagaatagagcctgcccaggccttaagaccacctctcagcccagttcagttctgccttaccaaagattctgagactcatacccatttggagccagccccacttgctgccttacagggctgtccctgaggctggatctgttacaaatgagtcatgacatcatactgtaataaaagcagcttgttttctgcttgaacaat

SEQ ID NO: 142514 - DNA, 1015 bp, Homo sapiens
  Payload ID: 8163
  Gene Symbol: IPO4
  Gene Name: importin 4
  ENST ID: ENST00000558233
  CDS Start-End: 1-937
cccctcggaacccaacactgctgctttgcaggctgccctggcccgagtcgtgccatcctacatgcaggcagtgaacagggagcgggaacgccaggtggtgatggccgtgctggaggccctgacaggggtgctccgcagctgtgggaccctcacactgaagccccctgggcgcctcgctgagctctgtggcgtgctcaaggctgtgctgcagaggaagacagcctgtcaggatactgacgaggaggaggaagaggaagatgatgatcaggctgaatacgacgccatgttgctggagcacgctggagaggccatccctgccctggcagccgcggctgggggagactcctttgccccattctttgccggtttcctgccattattggtgtgcaagacaaaacagggctgcacagtggcagagaagtcctttgcagtggggaccttggcagagactattcagggcctgggtgctgcctcagcccagtttgtgtctcggctgctccctgtgctgttgagcaccgcccaagaggcagaccccgaggtgcgaagcaatgccatcttcgggatgggcgtgctggcagagcatgggggccaccctgcccaggaacacttccccaagctgctggggctcctttttcccctcctggcgcgggagcgacatgatcgtgtccgtgacaacatctgtggggcacttgcccgcctgttgatggccagtcccaccaggaaaccagagccccaggttatagatgtggctcccgagcttctgcgtatctgcagcctcattctggctgacaacaagatcccaccagacaccaaggccgcactgttgctgctcctgacgttcctggccaaacagcacaccgacagctttcaagcagctctgggctcactgcctgttgacaaggctcaggagctccaggctgtactgggcctctcctagactgcaggctgcagccagtccagagagaatagagcctgcccaggccttaagaccacctctcagcccagttcagttctg

SEQ ID NO: 142515 - DNA, 3485 bp, Homo sapiens
  Payload ID: 8163
  Gene Symbol: IPO4
  Gene Name: importin 4
  ENST ID: ENST00000560155
  CDS Start-End: 83-2818
tccggaagtgggtgtcagaacctccacgtgctgtccctccccctccccttttcggcccagtagcggcggctcagttgctgccatggagtcagccgggctagagcagctcctacgggagctgctgctaccggacaccgagcgcatccgtcgggccacggaacagctccagatcgttcttcgggcccccgccgctttgccggctctctgcgacctgctagcctcggcggccgacccccagatccgccagtttgcggccgtgctgacccgcagacgactgaacacccgctggcgacggctggcggcggagcaacgggagagcctcaagtccctgatcctgacggccctgcagagagaaacagagcactgtgtgagcctcagcctggcccagctctcagccaccatttttcgaaaggaaggcttggaggcctggccacagcttttgcagctgcttcagcacagtacccacagcccccacagcccagagagagagatggggcttttgctgctaagtgtggtggtgacctcccggcccgaggccttccaaccccaccaccgggagcttcttcggcttctgaatgagactcttggtgaggtgggctctcctgggctgctcttctactccctgcgcactctgaccaccatggctccctacctcagcactgaagatgtgcctctcgctcggatgttggtgcccaagctgatcatggccatgcagactctgatccccatagatgaggcaaaggcctgtgaggcccttgaggctttggatgaactgttggagtcagaggtgccggtcatcaccccctacctctctgaagtcctcacattctgcctggaggtagctagaaatgtggccctgggcaatgcgatacgcatacgtattctctgctgcctcactttcttggtcaaagtcaagagcaaggccttactgaagaatcgtctcctgccacccttgctgcacacccttttccccattgtggctgctgagcccccaccaggccagttggatcccgaggaccaggattcagaagaggaagagttggagattgagctgatgggggagactcccaagcatttcgctgtacaagttgtggacatgctggcactacacctgccccccgagaagctctgtccccagctgatgcccatgttggaagaggctttgcggagcgagagcccataccagcgcaaagctggactcctggtgctggccgtgctgtctgacggagctggcgaccacatcaggcagagactgctgcccccactgctgcagattgtgtgcaagggcctggaggacccctcgcaagttgtacgcaatgctgcgctgtttgccctgggccagttctcagaaaacctacagccccatatcagcagctattcaagggaggtaatgccactgctcctcgcctacttgaagtcggtgcctcttggacacacacaccacctagccaaggcctgctatgccctggagaattttgtggagaacctagggcccaaggtgcagccctaccttccggagcttatggaatgcatgctgcagcttctgaggaaccccagcagtccccgggccaaggagctggctgtgagcgccctgggagccattgctacggctgcccaggcctcgctgctgccctacttccctgccatcatggagcacctgcgggaattcctgttaacaggccgtgaggaccttcagcctgtgcagatccagagcctggagacactgggggtgctggcacgagcagtgggggagcccatgaggccgctggctgaggaatgctgccagctgggtctgggcctctgcgaccaggtagacgaccctgacttgcggcgctgcacgtacagcctatttgcagccttatcgggtctgatgggtgagggcctggcgccccacttggaacagatcaccacgctcatgctgctgtcactgcgttccaccgagggcattgtgcctcagtatgacgggagcagctccttccttctgtttgacgatgagagtgatggggaagaagaggaggagctcatggatgaggatgtggaagaagaggatgactcagagatctcagggtacagcgtggagaatgccttcttcgatgagaaggaagacacctgtgctgccgtgggggagatctctgtgaacaccagtgtggccttccttccatacatggaaagtgtctttgaagaagtatttaaactgctggagtgccctcacctgaatgtgcggaaggcagcccatgaggctctgggtcagttttgctgtgcactgcacaaggcctgtcaaagctgcccctcggaacccaacactgctgctttgcaggctgccctggcccgagtcgtgccatcctacatgcaggcagtgaacagggagcgggaacgccaggtggtgatggccgtgctggaggccctgacaggggtgctccgcagctgtgggaccctcacactgaagccccctgggcgcctcgctgagctctgtggcgtgctcaaggctgtgctgcagaggaagacagcctgtcaggatactgacgaggaggaggaagaggaagatgatgatcagcccctgacctggctccacaggctgaatacgacgccatgttgctggagcacgctggagaggccatccctgccctggcagccgcggctgggggagactcctttgccccattctttgccggtttcctgccattattggtgtgcaagacaaaacagggctgcacagtggcagagaagtcctttgcagtggggaccttggcagagactattcagggcctgggtgctgcctcagcccagtttgtgtctcggctgctccctgtgctgttgagcaccgcccaagaggcagaccccgaggtgcgaagcaatgccatcttcgggatgggcgtgctggcagagcatgggggccaccctgcccaggaacacttccccaagctgctggggctcctttttcccctcctggcgcgggagcgacatgatcgtgtccgtgacaacatctgtggggcacttgcccgcctgttgatggccagtcccaccaggaaaccagagccccaggtgctggctgccctactgcatgccctgccactgaaggaggacttggaggagtgggtcaccattgggcgcctcttcagcttcctgtaccagagcagccctgaccaggttatagatgtggctcccgagcttctgcgtatctgcagcctcattctggctgacaacaagatcccaccagacaccaaggccgcactgttgctgctcctgacgttcctggccaaacagcacaccgacagctttcaagcagctctgggctcactgcctgttgacaaggctcaggagctccaggctgtactgggcctctcctagactgcaggctgcagccagtccagagagaatagagcctgcccaggccttaagaccacctctcagcccagttcagttctgccttaccaaagattctgagactcatacccatttggagccagccccacttgctgccttac

SEQ ID NO: 142516 - DNA, 6003 bp, Homo sapiens
  Payload ID: 8164
  Gene Symbol: IPO5
  Gene Name: importin 5
  Uniprot ID: O00410
  ENST ID: ENST00000261574
  CDS Start-End: 181-3528
gacctcccacaactggagcagccgggaacagctctgaccacagtggttccggggagaagcctttccaggacccatgtgtaggcacaactgttttccctgatcaggatacttgcggcactcaacagaggaaagaaattcctaagggaacactgctcagaaagtactgcagcatgtcttcaaatgcctgaggatcaagttggaaaactagaagcaacagaaaacacaataagcgcaatggcggcggccgcggcggagcagcaacagttctacctgctcctgggaaacctgctcagccccgacaatgtggtccggaaacaggcagaggaaacctatgagaatatcccaggccagtcaaagatcacattcctcttacaagccatcagaaatacaacagctgctgaagaggctagacaaatggccgccgttctcctaagacgtctcttgtcctctgcatttgatgaagtctatccagcacttccctctgatgttcagactgccatcaagagtgagctactcatgattattcagatggaaacacaatctagcatgaggaaaaaagtttgtgatattgcggcagaactggccaggaatttaatagatgaggatggcaataaccagtggcccgaaggtttgaagttcctttttgattcagtcagctctcaaaatgtgggactgcgggaagctgcccttcacattttctggaactttcctggaatttttgggaaccagcaacaacactatttagatgtcatcaaacgaatgttagttcagtgtatgcaagatcaggaacacccgtcgatcaggacgttatctgctagagctacagctgcatttatacttgcaaatgagcataatgttgctctgttcaaacattttgcagacttgctaccgggattcctacaggcggtaaatgactcgtgctaccagaatgatgattctgtcctaaaatccctcgttgagattgcagatactgttccaaagtatttgcgtcctcacttggaagcaactctacagctaagtctaaagttgtgtggagacactagcctcaacaatatgcaacgccagcttgcccttgaagtgatcgtcaccctctctgagactgcagctgctatgttaagaaaacataccaatattgttgcacagactattcctcagatgttagcaatgatggttgatttggaagaagatgaggactgggcaaatgcagatgaactagaagatgatgattttgacagcaatgcagttgcaggcgagagtgctctagatcgaatggcttgcggacttggtggaaagctcgttctgccgatgatcaaggaacacattatgcaaatgcttcaaaatcctgactggaaataccggcatgcaggattgatggccttatctgccattggtgaagggtgccaccagcaaatggaaggaattctaaatgagatcgtaaattttgttttactttttctccaggatcctcatccaagagtaaggtatgcagcctgtaatgccgtgggacagatggctacagattttgcacctggtttccaaaagaaatttcatgagaaggtgattgcagctctgctgcagaccatggaagaccaaggcaatcaacgtgtgcaggcccatgcagctgctgccctcattaactttactgaagactgtcccaagtcactacttattccatacttggataatttggtgaaacatctgcattccattatggtactgaagcttcaagagctgattcagaaaggcaccaagttagttttggaacaagttgtgacatccattgcatcagttgccgatactgcagaagaaaaatttgtcccctactatgatttatttatgccatcactgaagcacatcgttgagaatgcggttcaaaaagaactgagacttctgagaggaaaaactattgaatgcattagcctcattggtctggctgttgggaaggaaaaattcatgcaggatgcatcagatgtgatgcagcttttgttaaagacccagacagacttcaatgatatggaagatgatgatcctcagatctcttacatgatctcagcatgggccagaatgtgcaaaatccttggaaaagaatttcagcaataccttccagtggttatggggcctttaatgaagacggcttcaattaagcccgaagtagcccttttagatacccaagacatggagaatatgagtgatgatgatggttgggaatttgtgaaccttggagatcagcaaagctttggtattaaaactgcaggactagaagaaaaatcaactgcttgccagatgttggtttgctatgctaaggagttaaaggaaggctttgtggagtacaccgaacaggttgtcaaactgatggtccctttactgaaattttatttccacgatggtgttcgagtggcagcagcggaatccatgcctcttctcctggagtgtgcaagagtccgtggtcctgagtatctcacacagatgtggcattttatgtgtgatgctctaattaaggccattggtacagaaccagattcagacgtcctctcagaaataatgcattcttttgcaaagtgcattgaagtaatgggagatggatgccttaataatgaacactttgaagaactgggaggtatattgaaagcaaagcttgaagaacattttaaaaatcaagaattacgacaagttaaaagacaagatgaagactatgatgaacaggtcgaagagtcactacaagatgaggatgataatgatgtttatattctgaccaaagtgtcagatattttacactcaatattcagtagctacaaagaaaaggtgttaccatggtttgaacagctgcttccattaattgtcaacctcatttgtccacatagaccatggccagacagacaatggggattatgcatctttgatgatgtcatagaacactgtagtccagcctcatttaaatacgcagaatatttcttaagaccaatgctccaatatgtatgtgacaacagcccagaagtcaggcaagcagctgcatatggcctgggagtcatggcacagtacggtggagataattatcgccctttttgtacagaagcacttcccctgctggtaagagttattcagtctgcggattctaagaccaaagaaaatgtcaatgctacagagaactgcatctcagcagtagggaaaatcatgaagttcaagcctgactgtgtaaacgttgaagaggtccttccacactggttgtcttggcttccactacatgaagataaagaagaagctgttcagactttcaattatctgtgtgacctgattgaaagtaatcatccaattgttcttggcccaaacaataccaatctgcccaaaatatttagtataattgcggaaggagaaatgcacgaggcaattaaacatgaagatccttgtgccaaacgtctggccaatgtcgttcgccaagtacagacttctggaggactgtggactgagtgcatagcacagctcagtcctgagcagcaggccgccattcaggagctcctgaactctgcgtgaagggccttaatgtcacccaccagaaaactaactccaaataaacgcttaccctttcctttaggtttctttgttttgtttttgagcaaaagagatcggtagtgttgtgtgtaggccattcttctggagagccacaagcaggaagagcagcgctgtgttgcagaatggagtttccatggatttctaccagaccactgaaggagttcctggaagccctgcggtagctagcactgaagactatttttctattggtataacccgcccacctgaaggggaaagggaaatcaaattaatttttctcgttagacataaggaaatttaaggaaaaacagctttaagaacagttactcagcgtagatgtgtgttcacacaaattgctctgcattcagtgttcattgtgaattgggagtgtgagtctttctgtagggtagaaagaagcctcctacccagcaaaccagtagacccaaaagttgaaaaaaactgatgacagacaacaagcatgaagatggcatatttgatgtcactttggttctttttcccagaaggcttatacagtgactcagtcgggaagctttccagcttccagcccttgaatgtgaagtgtcattggcatgtctggcagtagtctctcattcactcctcaataaacaacattgaatacaaaagaggcttgtgtaaaaactcagtactgtctggcttggattcatttcatgtttttaatataagaatgatctaatatttttttaaagtaatagctatcagtaatagctgagtgttttttcccctaatattttccttgtgcaattcagacttaagcatcgagtttttaccatcttccactttaagctaagttatgatacctattccattcacaattggtgttctttttaaggtttgcaaatttcagccaattttgtagctaagattgttctgatcagctcaaaaagatttggcttagtgttttcattgcaaattataattgctgtagagccacacacaacttttgaacttttaattataagtgttatggctaaagttatttactgaaaatttcagtaaaatgtgtgaatgtttctttatgtattaacctcatagcagtaaatgacttgctgttgtttaatttttctaaggcatcttaatagacttctgttgaaaacttcagtgttaacatttttatagtttgtactaaatttaaccgtgatataaaaatgaattttatgcatagatcagaattttaaattaaaggttttttctttaaatgatttgtattactttattaaaactaaatctgaaatggaatagaaaatagaatggattacatacagatggtttccttgttagcagatgcccttcaaatatattttacgtttgcagcacaacaccattgcccggaggcttccgaatctagcaaagcagcatattaaatgactccacctgcgcagtccttgtgttcagtggatgaatacctgtgggctcttgtaatgtgtggtaatatttggagctttatagcctgtattccttgggagaaaaaaatgggaattggagtaaaaagtgtgtcaagacaacccctttctgctttcttatgtagcatctgcaaagccgattcatgtactgatgccaatcagctagagcaatgtaggctttttttaatttaaattattactacactttattactacacttgcagaaaagaaacatgttaaaatcatggcacacctgcagaatttcagatgacagtgtggtcagaagatgttttttgggagaacctagtgtttgctgggcactatgctaagcactttgggagcaagaacctcctaccttccagtttaaacactagtggtattgtcagatgccgttagtatctgagatgtacttacagcagggttctaagagctctgaaagaagcgctctgttagatgcagactggcagcatcctccttgataaaagcagaaaagcaaagaggtaattggagttgaatcaagttaatagggaaggttggtagtaaatgctgttagtgtgacatgattctgaaacccagagctcagaactaactgtgagatgtaccatgaactaacaattctttgaaaggacctgcagaagcatttttaatacctcattctgtctatgcaagatgaaaatccatggagttttttcttggcttttgtaccaaatttaggggtcttgcatgtcagcaagtgatatatattgtttataaatgcaagctatttctggaggggaaaaatgtgtgtggctcttacgttttctgggaattttgtaacaagttacacgcacaagtgttagaaactttggcataactcaatttggagtattttttaaatgctgtatctttaaagaaaagtaaaattgtcttaaatctaattgacacttctgtaatgagaggcaaccttataactctggagttgtagtttgacagaaccatcagtaaagacataagcaaataaatggtcttggtgcac

SEQ ID NO: 142517 - DNA, 4335 bp, Homo sapiens
  Payload ID: 8164
  Gene Symbol: IPO5
  Gene Name: importin 5
  Uniprot ID: O00410
  ENST ID: ENST00000357602
  CDS Start-End: 375-3668
gatacttgctgtaagtagcaaaaagatgggaaggaaagtctacagaccaaatcatatctgaatctccccattctccctctccacaaatattggtttaggaattctccgaagtttgaaggttatgaatggttatcactcaaggattcagaactaagcagaggaaagaaattcctaagggaacactgctcagaaagtactgcagcatgtcttcaaatgcctgaggatcaagttggaaaactagaagcaacagaaaacacaataagccccaggcgtgagtcactggagagcgcgacgggaggaaggggcgccctgagtccacagccctgggggaggtcggagggtctgaaagcgagaagtccgtgagtagaagcgcaatggcggcggccgcggcggagcagcaacagttctacctgctcctgggaaacctgctcagccccgacaatgtggtccggaaacaggcagaggaaacctatgagaatatcccaggccagtcaaagatcacattcctcttacaagccatcagaaatacaacagctgctgaagaggctagacaaatggccgccgttctcctaagacgtctcttgtcctctgcatttgatgaagtctatccagcacttccctctgatgttcagactgccatcaagagtgagctactcatgattattcagatggaaacacaatctagcatgaggaaaaaagtttgtgatattgcggcagaactggccaggaatttaatagatgaggatggcaataaccagtggcccgaaggtttgaagttcctttttgattcagtcagctctcaaaatgtgggactgcgggaagctgcccttcacattttctggaactttcctggaatttttgggaaccagcaacaacactatttagatgtcatcaaacgaatgttagttcagtgtatgcaagatcaggaacacccgtcgatcaggacgttatctgctagagctacagctgcatttatacttgcaaatgagcataatgttgctctgttcaaacattttgcagacttgctaccgggattcctacaggcggtaaatgactcgtgctaccagaatgatgattctgtcctaaaatccctcgttgagattgcagatactgttccaaagtatttgcgtcctcacttggaagcaactctacagctaagtctaaagttgtgtggagacactagcctcaacaatatgcaacgccagcttgcccttgaagtgatcgtcaccctctctgagactgcagctgctatgttaagaaaacataccaatattgttgcacagactattcctcagatgttagcaatgatggttgatttggaagaagatgaggactgggcaaatgcagatgaactagaagatgatgattttgacagcaatgcagttgcaggcgagagtgctctagatcgaatggcttgcggacttggtggaaagctcgttctgccgatgatcaaggaacacattatgcaaatgcttcaaaatcctgactggaaataccggcatgcaggattgatggccttatctgccattggtgaagggtgccaccagcaaatggaaggaattctaaatgagatcgtaaattttgttttactttttctccaggatcctcatccaagagtaaggtatgcagcctgtaatgccgtgggacagatggctacagattttgcacctggtttccaaaagaaatttcatgagaaggtgattgcagctctgctgcagaccatggaagaccaaggcaatcaacgtgtgcaggcccatgcagctgctgccctcattaactttactgaagactgtcccaagtcactacttattccatacttggataatttggtgaaacatctgcattccattatggtactgaagcttcaagagctgattcagaaaggcaccaagttagttttggaacaagttgtgacatccattgcatcagttgccgatactgcagaagaaaaatttgtcccctactatgatttatttatgccatcactgaagcacatcgttgagaatgcggttcaaaaagaactgagacttctgagaggaaaaactattgaatgcattagcctcattggtctggctgttgggaaggaaaaattcatgcaggatgcatcagatgtgatgcagcttttgttaaagacccagacagacttcaatgatatggaagatgatgatcctcagatctcttacatgatctcagcatgggccagaatgtgcaaaatccttggaaaagaatttcagcaataccttccagtggttatggggcctttaatgaagacggcttcaattaagcccgaagtagcccttttagatacccaagacatggagaatatgagtgatgatgatggttgggaatttgtgaaccttggagatcagcaaagctttggtattaaaactgcaggactagaagaaaaatcaactgcttgccagatgttggtttgctatgctaaggagttaaaggaaggctttgtggagtacaccgaacaggttgtcaaactgatggtccctttactgaaattttatttccacgatggtgttcgagtggcagcagcggaatccatgcctcttctcctggagtgtgcaagagtccgtggtcctgagtatctcacacagatgtggcattttatgtgtgatgctctaattaaggccattggtacagaaccagattcagacgtcctctcagaaataatgcattcttttgcaaagtgcattgaagtaatgggagatggatgccttaataatgaacactttgaagaactgggaggtatattgaaagcaaagcttgaagaacattttaaaaatcaagaattacgacaagttaaaagacaagatgaagactatgatgaacaggtcgaagagtcactacaagatgaggatgataatgatgtttatattctgaccaaagtgtcagatattttacactcaatattcagtagctacaaagaaaaggtgttaccatggtttgaacagctgcttccattaattgtcaacctcatttgtccacatagaccatggccagacagacaatggggattatgcatctttgatgatgtcatagaacactgtagtccagcctcatttaaatacgcagaatatttcttaagaccaatgctccaatatgtatgtgacaacagcccagaagtcaggcaagcagctgcatatggcctgggagtcatggcacagtacggtggagataattatcgccctttttgtacagaagcacttcccctgctggtaagagttattcagtctgcggattctaagaccaaagaaaatgtcaatgctacagagaactgcatctcagcagtagggaaaatcatgaagttcaagcctgactgtgtaaacgttgaagaggtccttccacactggttgtcttggcttccactacatgaagataaagaagaagctgttcagactttcaattatctgtgtgacctgattgaaagtaatcatccaattgttcttggcccaaacaataccaatctgcccaaaatatttagtataattgcggaaggagaaatgcacgaggcaattaaacatgaagatccttgtgccaaacgtctggccaatgtcgttcgccaagtacagacttctggaggactgtggactgagtgcatagcacagctcagtcctgagcagcaggccgccattcaggagctcctgaactctgcgtgaagggccttaatgtcacccaccagaaaactaactccaaataaacgcttaccctttcctttaggtttctttgttttgtttttgagcaaaagagatcggtagtgttgtgtgtaggccattcttctggagagccacaagcaggaagagcagcgctgtgttgcagaatggagtttccatggatttctaccagaccactgaaggagttcctggaagccctgcggtagctagcactgaagactatttttctattggtataacccgcccacctgaaggggaaagggaaatcaaattaatttttctcgttagacataaggaaatttaaggaaaaacagctttaagaacagttactcagcgtagatgtgtgttcacacaaattgctctgcattcagtgttcattgtgaattgggagtgtgagtctttctgtagggtagaaagaagcctcctacccagcaaaccagtagacccaaaagttgaaaaaaactgatgacagacaacaagcatgaagatggcatatttgatgtcactttggttctttttcccagaaggcttatacagtgactcagtcgggaagctttccagcttccagcccttgaatgtgaagtgtcattggcatgtctggcagtagtctctcattcactcctcaataaacaacattgaatacaaaagaggc

SEQ ID NO: 142518 - DNA, 547 bp, Homo sapiens
  Payload ID: 8164
  Gene Symbol: IPO5
  Gene Name: importin 5
  ENST ID: ENST00000403772
  CDS Start-End: 1-547
gcggccgcggcggagcagcaacagttctacctgctcctgggaaacctgctcagccccgacaatgtggtccggaaacaggcagaggctagacaaatggccgccgttctcctaagacgtctcttgtcctctgcatttgatgaagtctatccagcacttccctctgatgttcagactgccatcaagagtgagctactcatgattattcagatggaaacacaatctagcatgaggaaaaaagtttgtgatattgcggcagaactggccaggaatttaatagatgaggatggcaataaccagtggcccgaaggtttgaagttcctttttgattcagtcagctctcaaaatgtgggactgcgggaagctgcccttcacattttctggaactttcctggaatttttgggaaccagcaacaacactatttagatgtcatcaaacgaatgttagttcagtgtatgcaagatcaggaacacccgtcgatcaggacgttatctgctagagctacagctgcatttatacttgcaaatgagcataatgttgctctgttca

SEQ ID NO: 142519 - DNA, 564 bp, Homo sapiens
  Payload ID: 8164
  Gene Symbol: IPO5
  Gene Name: importin 5
  ENST ID: ENST00000421861
  CDS Start-End: 245-564
gaaatgtgtatgtcatgtgtccaaattgtaagatacttgctgtaagtagcaaaaagatgggaaggaaagtctacagaccaaatcatatctgaatctccccattctccctctccacaaatattggtttaggaattctccgaagtttgaaggttatgaatggttatcactcaaggattcagaactaagcagaggaaagaaattcctaagggaacactgctcagaaagtactgcagcatgtcttcaaatgcctgaggatcaagttggaaaactagaagcaacagaaaacacaataagcgcaatggcggcggccgcggcggagcagcaacagttctacctgctcctgggaaacctgctcagccccgacaatgtggtccggaaacaggcagaggaaacctatgagaatatcccaggccagtcaaagatcacattcctcttacaagccatcagaaatacaacagctgctgaagaggctagacaaatggccgccgttctcctaagacgtctcttgtcctctgcatttgatgaagtctatccagcacttccctctgatgttcagactgccat

SEQ ID NO: 142520 - DNA, 542 bp, Homo sapiens
  Payload ID: 8164
  Gene Symbol: IPO5
  Gene Name: importin 5
  ENST ID: ENST00000496368
  CDS Start-End: 249-542
atgtatgtcctcacaatgcaggaggtgaaatgtgtatgtcatgtgtccaaattgtaagatacttgctatactttcccagcaacatctagactgctgtttgaccaaacaacggggctccaacagcctagccaagtgaaacataaaactaaccatcacagtatccttgtcaaaaatcagtctgacaacacatcagaggaaagaaattcctaagggaacactgctcagaaagtactgcagcatgtcttcaaatgcctgaggatcaagttggaaaactagaagcaacagaaaacacaataagcgcaatggcggcggccgcggcggagcagcaacagttctacctgctcctgggaaacctgctcagccccgacaatgtggtccggaaacaggcagaggaaacctatgagaatatcccaggccagtcaaagatcacattcctcttacaagccatcagaaatacaacagctgctgaagaggctagacaaatggccgccgttctcctaagacgtctcttgtcctctgcatttgatgaagtctatccagca

SEQ ID NO: 142521 - DNA, 536 bp, Homo sapiens
  Payload ID: 8164
  Gene Symbol: IPO5
  Gene Name: importin 5
  ENST ID: ENST00000497270
  CDS Start-End: 23-403
cttctctctcacgcctagcgcaatggcggcggccgcggcggagcagcaacagttctacctgctcctgggaaacctgctcagccccgacaatgtggtccggaaacaggcagaggaaacctatgagaatatcccaggccagtcaaagatcacattcctcttacaagccatcagaaatacaacagctgctgaagaggctagacaaatggccgccgttctcctaagacgtctcttgtcctctgcatttgatgaagtctatccagcacttccctctgatgttcagactgccatcaagagtgagctactcatgattattcagatggaaacacaatctagcatgaggaaaaaagtttgtgatattgcggcagaactggccaggaatttaatagcatcatctttaggttgaagaaacatttaatgtcagcttagcagcacaattgtcatttcacaaaagttcaaatatcgggggacgtttaaaaagaaaacatctgtaattcatctatgaggatggcaataaccagtggcccgaaggtttgaag

SEQ ID NO: 142522 - DNA, 524 bp, Homo sapiens
  Payload ID: 8164
  Gene Symbol: IPO5
  Gene Name: importin 5
  ENST ID: ENST00000485433
  CDS Start-End: 299-524
attgttctttggtattgtgccttacgtgagctggggactaactctgtatccttaaggaggcatcacttgattagagttgcccaaaagaatgtgggttattatcctaaaggtctgtgttgccatcctgaaacagtcagaaatcagtttttatttcacttaggtggttccggggagaagcctttccaggacccatgtgtaggcacaactgttttccctgatcaggatacttgcggcactcaacagaggaaagaaattcctaagggaacactgctcagaaagtactgcagcatgtcttcaaatgcctgaggatcaagttggaaaactagaagcaacagaaaacacaataagcgcaatggcggcggccgcggcggagcagcaacagttctacctgctcctgggaaacctgctcagccccgacaatgtggtccggaaacaggcagaggaaacctatgagaatatcccaggccagtcaaagatcacattcctcttacaagccatcagaaatacaacagctgctgaagagg

SEQ ID NO: 142523 - DNA, 522 bp, Homo sapiens
  Payload ID: 8164
  Gene Symbol: IPO5
  Gene Name: importin 5
  ENST ID: ENST00000489058
  CDS Start-End: 373-522
agccgggaacagctctgaccacagtaagtcatcccaaaacctcacattcagatgaaaccatttaagaatttcatctgcactgaggaacaatttagcgtgatactggagggaaagagtttccctgtgagatccaggaggtccctttagctcgtctcctgacgtcaccacagtcatacccaagaggaaggaaacgtcagagacaatgatttggagaacattctacacaaaaaccaagtggttccggggagaagcctttccaggacccatgtgtaggcacaactgttttccctgatcaggatacttgcggcactcaacagaggaaagaaattcctaagggaacactgctcagaaagtactgcagcatgtcttcaaatgcctgaggatcaagttggaaaactagaagcaacagaaaacacaataagcgcaatggcggcggccgcggcggagcagcaacagttctacctgctcctgggaaacctgctcagccccgacaatgtggtccggaaacaggcagaggtaacc

SEQ ID NO: 142524 - DNA, 3419 bp, Homo sapiens
  Payload ID: 8164
  Gene Symbol: IPO5
  Gene Name: importin 5
  Uniprot ID: O00410
  ENST ID: ENST00000490680
  CDS Start-End: 66-3359
gcggcccgcgagcgcgcctcacggctcctgtctcccctccctccttctctctcacgcctagcgcaatggcggcggccgcggcggagcagcaacagttctacctgctcctgggaaacctgctcagccccgacaatgtggtccggaaacaggcagaggaaacctatgagaatatcccaggccagtcaaagatcacattcctcttacaagccatcagaaatacaacagctgctgaagaggctagacaaatggccgccgttctcctaagacgtctcttgtcctctgcatttgatgaagtctatccagcacttccctctgatgttcagactgccatcaagagtgagctactcatgattattcagatggaaacacaatctagcatgaggaaaaaagtttgtgatattgcggcagaactggccaggaatttaatagatgaggatggcaataaccagtggcccgaaggtttgaagttcctttttgattcagtcagctctcaaaatgtgggactgcgggaagctgcccttcacattttctggaactttcctggaatttttgggaaccagcaacaacactatttagatgtcatcaaacgaatgttagttcagtgtatgcaagatcaggaacacccgtcgatcaggacgttatctgctagagctacagctgcatttatacttgcaaatgagcataatgttgctctgttcaaacattttgcagacttgctaccgggattcctacaggcggtaaatgactcgtgctaccagaatgatgattctgtcctaaaatccctcgttgagattgcagatactgttccaaagtatttgcgtcctcacttggaagcaactctacagctaagtctaaagttgtgtggagacactagcctcaacaatatgcaacgccagcttgcccttgaagtgatcgtcaccctctctgagactgcagctgctatgttaagaaaacataccaatattgttgcacagactattcctcagatgttagcaatgatggttgatttggaagaagatgaggactgggcaaatgcagatgaactagaagatgatgattttgacagcaatgcagttgcaggcgagagtgctctagatcgaatggcttgcggacttggtggaaagctcgttctgccgatgatcaaggaacacattatgcaaatgcttcaaaatcctgactggaaataccggcatgcaggattgatggccttatctgccattggtgaagggtgccaccagcaaatggaaggaattctaaatgagatcgtaaattttgttttactttttctccaggatcctcatccaagagtaaggtatgcagcctgtaatgccgtgggacagatggctacagattttgcacctggtttccaaaagaaatttcatgagaaggtgattgcagctctgctgcagaccatggaagaccaaggcaatcaacgtgtgcaggcccatgcagctgctgccctcattaactttactgaagactgtcccaagtcactacttattccatacttggataatttggtgaaacatctgcattccattatggtactgaagcttcaagagctgattcagaaaggcaccaagttagttttggaacaagttgtgacatccattgcatcagttgccgatactgcagaagaaaaatttgtcccctactatgatttatttatgccatcactgaagcacatcgttgagaatgcggttcaaaaagaactgagacttctgagaggaaaaactattgaatgcattagcctcattggtctggctgttgggaaggaaaaattcatgcaggatgcatcagatgtgatgcagcttttgttaaagacccagacagacttcaatgatatggaagatgatgatcctcagatctcttacatgatctcagcatgggccagaatgtgcaaaatccttggaaaagaatttcagcaataccttccagtggttatggggcctttaatgaagacggcttcaattaagcccgaagtagcccttttagatacccaagacatggagaatatgagtgatgatgatggttgggaatttgtgaaccttggagatcagcaaagctttggtattaaaactgcaggactagaagaaaaatcaactgcttgccagatgttggtttgctatgctaaggagttaaaggaaggctttgtggagtacaccgaacaggttgtcaaactgatggtccctttactgaaattttatttccacgatggtgttcgagtggcagcagcggaatccatgcctcttctcctggagtgtgcaagagtccgtggtcctgagtatctcacacagatgtggcattttatgtgtgatgctctaattaaggccattggtacagaaccagattcagacgtcctctcagaaataatgcattcttttgcaaagtgcattgaagtaatgggagatggatgccttaataatgaacactttgaagaactgggaggtatattgaaagcaaagcttgaagaacattttaaaaatcaagaattacgacaagttaaaagacaagatgaagactatgatgaacaggtcgaagagtcactacaagatgaggatgataatgatgtttatattctgaccaaagtgtcagatattttacactcaatattcagtagctacaaagaaaaggtgttaccatggtttgaacagctgcttccattaattgtcaacctcatttgtccacatagaccatggccagacagacaatggggattatgcatctttgatgatgtcatagaacactgtagtccagcctcatttaaatacgcagaatatttcttaagaccaatgctccaatatgtatgtgacaacagcccagaagtcaggcaagcagctgcatatggcctgggagtcatggcacagtacggtggagataattatcgccctttttgtacagaagcacttcccctgctggtaagagttattcagtctgcggattctaagaccaaagaaaatgtcaatgctacagagaactgcatctcagcagtagggaaaatcatgaagttcaagcctgactgtgtaaacgttgaagaggtccttccacactggttgtcttggcttccactacatgaagataaagaagaagctgttcagactttcaattatctgtgtgacctgattgaaagtaatcatccaattgttcttggcccaaacaataccaatctgcccaaaatatttagtataattgcggaaggagaaatgcacgaggcaattaaacatgaagatccttgtgccaaacgtctggccaatgtcgttcgccaagtacagacttctggaggactgtggactgagtgcatagcacagctcagtcctgagcagcaggccgccattcaggagctcctgaactctgcgtgaagggccttaatgtcacccaccagaaaactaactccaaataaacgcttaccctttccttta

SEQ ID NO: 142525 - DNA, 543 bp, Homo sapiens
  Payload ID: 8164
  Gene Symbol: IPO5
  Gene Name: importin 5
  ENST ID: ENST00000480641
  CDS Start-End: 312-543
aaggccagtgaggcgccggcgccggcggccgcggcgggcgcaatggcggcggccgcggcggagcagcaacagttctacctgctcctgggaaacctgctcagccccgacaatgtggtccggaaacaggcagaggtgtgtgtctggtggttctaagcagtggtaatttgaaccagttgtacatcatccagtctaaaaatgttaacgaaacagtttctcatgatgaaacctatgagaatatcccaggccagtcaaagatcacattcctcttacaagccatcagaaatacaacagctgctgaagaggctagacaaatggccgccgttctcctaagacgtctcttgtcctctgcatttgatgaagtctatccagcacttccctctgatgttcagactgccatcaagagtgagctactcatgattattcagatggaaacacaatctagcatgaggaaaaaagtttgtgatattgcggcagaactggccaggaatttaatagatgaggatggcaataaccagtggcccgaaggtttgaagttcctttttg

SEQ ID NO: 142526 - DNA, 544 bp, Homo sapiens
  Payload ID: 8164
  Gene Symbol: IPO5
  Gene Name: importin 5
  ENST ID: ENST00000493281
  CDS Start-End: 353-544
acaactggagcagccgggaacagctctgaccacagtggttccggggagaagcctttccaggacccatgtgtaggcacaactgttttccctgatcaggatacttgcggcactcaagaattctccgaagtttgaaggttatgaatggttatcactcaaggattcagaactaagatactttcccagcaacatctagactgctgtttgaccaaacaacggggctccaacagcctagccaagtgaaacataaaactaaccatcacagtatccttgtcaaaaatcagtctgacaacacatcagaggaaagaaattcctaagggaacactgctcagaaagtactgcagcatgtcttcaaatgcctgaggatcaagttggaaaactagaagcaacagaaaacacaataagcgcaatggcggcggccgcggcggagcagcaacagttctacctgctcctgggaaacctgctcagccccgacaatgtggtccggaaacaggcagaggaaacctatgagaatatcccaggccagtcaaagatcacattcctctta

SEQ ID NO: 142527 - DNA, 542 bp, Homo sapiens
  Payload ID: 8164
  Gene Symbol: IPO5
  Gene Name: importin 5
  ENST ID: ENST00000490369
  CDS Start-End: 173-364
acaactggagcagccgggaacagctctgaccacagtggttccggggagaagcctttccaggacccatgtgtaggcacaactgttttccctgatcaggatacttgcggcactcaacagaggaaagaaattcctaagggaacactgctcagaaagtactgcagcatgtcttcaaatgcctgaggatcaagttggaaaactagaagcaacagaaaacacaataagcgcaatggcggcggccgcggcggagcagcaacagttctacctgctcctgggaaacctgctcagccccgacaatgtggtccggaaacaggcagagacagatatgtttgaaaagtttgaaacctgtgtagcactgcataaatagaactggttgtttaatgaagtgaaacagagctttcagtaccagagagattttgaatatggttggccttagaggaccagagttctgtctgctattcattgtctatgatcttaggaaacctatgagaatatcccaggccagtcaaagatcacattcctcttacaagccatcagaaatacaa

SEQ ID NO: 142528 - DNA, 3505 bp, Homo sapiens
  Payload ID: 8164
  Gene Symbol: IPO5
  Gene Name: importin 5
  ENST ID: ENST00000469360
  CDS Start-End: 1-3299
ttttccggccattgctgccgcggcgcctggcaccagttacctccccgccgccgctcgcacccacgtgcggccgctcccgacgcgcccccgtccaggaaacctatgagaatatcccaggccagtcaaagatcacattcctcttacaagccatcagaaatacaacagctgctgaagaggctagacaaatggccgccgttctcctaagacgtctcttgtcctctgcatttgatgaagtctatccagcacttccctctgatgttcagactgccatcaagagtgagctactcatgattattcagatggaaacacaatctagcatgaggaaaaaagtttgtgatattgcggcagaactggccaggaatttaatagatgaggatggcaataaccagtggcccgaaggtttgaagttcctttttgattcagtcagctctcaaaatgtgggactgcgggaagctgcccttcacattttctggaactttcctggaatttttgggaaccagcaacaacactatttagatgtcatcaaacgaatgttagttcagtgtatgcaagatcaggaacacccgtcgatcaggacgttatctgctagagctacagctgcatttatacttgcaaatgagcataatgttgctctgttcaaacattttgcagacttgctaccgggattcctacaggcggtaaatgactcgtgctaccagaatgatgattctgtcctaaaatccctcgttgagattgcagatactgttccaaagtatttgcgtcctcacttggaagcaactctacagctaagtctaaagttgtgtggagacactagcctcaacaatatgcaacgccagcttgcccttgaagtgatcgtcaccctctctgagactgcagctgctatgttaagaaaacataccaatattgttgcacagactattcctcagatgttagcaatgatggttgatttggaagaagatgaggactgggcaaatgcagatgaactagaagatgatgattttgacagcaatgcagttgcaggcgagagtgctctagatcgaatggcttgcggacttggtggaaagctcgttctgccgatgatcaaggaacacattatgcaaatgcttcaaaatcctgactggaaataccggcatgcaggattgatggccttatctgccattggtgaagggtgccaccagcaaatggaaggaattctaaatgagatcgtaaattttgttttactttttctccaggatcctcatccaagagtaaggtatgcagcctgtaatgccgtgggacagatggctacagattttgcacctggtttccaaaagaaatttcatgagaaggtgattgcagctctgctgcagaccatggaagaccaaggcaatcaacgtgtgcaggcccatgcagctgctgccctcattaactttactgaagactgtcccaagtcactacttattccatacttggataatttggtgaaacatctgcattccattatggtactgaagcttcaagagctgattcagaaaggcaccaagttagttttggaacaagttgtgacatccattgcatcagttgccgatactgcagaagaaaaatttgtcccctactatgatttatttatgccatcactgaagcacatcgttgagaatgcggttcaaaaagaactgagacttctgagaggaaaaactattgaatgcattagcctcattggtctggctgttgggaaggaaaaattcatgcaggatgcatcagatgtgatgcagcttttgttaaagacccagacagacttcaatgatatggaagatgatgatcctcagatctcttacatgatctcagcatgggccagaatgtgcaaaatccttggaaaagaatttcagcaataccttccagtggttatggggcctttaatgaagacggcttcaattaagcccgaagtagcccttttagatacccaagacatggagaatatgagtgatgatgatggttgggaatttgtgaaccttggagatcagcaaagctttggtattaaaactgcaggactagaagaaaaatcaactgcttgccagatgttggtttgctatgctaaggagttaaaggaaggctttgtggagtacaccgaacaggttgtcaaactgatggtccctttactgaaattttatttccacgatggtgttcgagtggcagcagcggaatccatgcctcttctcctggagtgtgcaagagtccgtggtcctgagtatctcacacagatgtggcattttatgtgtgatgctctaattaaggccattggtacagaaccagattcagacgtcctctcagaaataatgcattcttttgcaaagtgcattgaagtaatgggagatggatgccttaataatgaacactttgaagaactgggaggtatattgaaagcaaagcttgaagaacattttaaaaatcaagaattacgacaagttaaaagacaagatgaagactatgatgaacaggtcgaagagtcactacaagatgaggatgataatgatgtttatattctgaccaaagtgtcagatattttacactcaatattcagtagctacaaagaaaaggtgttaccatggtttgaacagctgcttccattaattgtcaacctcatttgtccacatagaccatggccagacagacaatggggattatgcatctttgatgatgtcatagaacactgtagtccagcctcatttaaatacgcagaatatttcttaagaccaatgctccaatatgtatgtgacaacagcccagaagtcaggcaagcagctgcatatggcctgggagtcatggcacagtacggtggagataattatcgccctttttgtacagaagcacttcccctgctggtaagagttattcagtctgcggattctaagaccaaagaaaatgtcaatgctacagagaactgcatctcagcagtagggaaaatcatgaagttcaagcctgactgtgtaaacgttgaagaggtccttccacactggttgtcttggcttccactacatgaagataaagaagaagctgttcagactttcaattatctgtgtgacctgattgaaagtaatcatccaattgttcttggcccaaacaataccaatctgcccaaaatatttagtataattgcggaaggagaaatgcacgaggcaattaaacatgaagatccttgtgccaaacgtctggccaatgtcgttcgccaagtacagacttctggaggactgtggactgagtgcatagcacagctcagtcctgagcagcaggccgccattcaggagctcctgaactctgcgtgaagggccttaatgtcacccaccagaaaactaactccaaataaacgcttaccctttcctttaggtttctttgttttgtttttgagcaaaagagatcggtagtgttgtgtgtaggccattcttctggagagccacaagcaggaagagcagcgctgtgttgcagaatggagtttccatggatttctaccagaccactgaaggagttcctg

SEQ ID NO: 142529 - DNA, 555 bp, Homo sapiens
  Payload ID: 8164
  Gene Symbol: IPO5
  Gene Name: importin 5
  ENST ID: ENST00000481455
  CDS Start-End: 197-555
gacctcccacaactggagcagccgggaacagctctgaccacatttttatttcacttaggtggttccggggagaagcctttccaggacccatgtgtaggcacaactgttttccctgatcaggatacttgcggcactcaacagaggaaagaaattcctaagggaacactgctcagaaagtactgcagcatgtcttcaaatgcctgaggatcaagttggaaaactagaagcaacagaaaacacaataagcgcaatggcggcggccgcggcggagcagcaacagttctacctgctcctgggaaacctgctcagccccgacaatgtggtccggaaacaggcagaggaaacctatgagaatatcccaggccagtcaaagatcacattcctcttacaagccatcagaaatacaacagctgctgaagaggctagacaaatggccgccgttctcctaagacgtctcttgtcctctgcatttgatgaagtctatccagcacttccctctgatgttcagactgccatcaagagtgagctactcatgattattcagatggaaacaca

SEQ ID NO: 142530 - DNA, 556 bp, Homo sapiens
  Payload ID: 8164
  Gene Symbol: IPO5
  Gene Name: importin 5
  ENST ID: ENST00000471898
  CDS Start-End: 334-556
acaactggagcagccgggaacagctctgaccacagtggttccggggagaagcctttccaggacccatgtgtaggcacaactgttttccctgatcaggatacttgcggcactcaacagaggaaagaaattcctaagggaacactgctcagaaagtactgcagcatgtcttcaaatgcctgaggatcaagttggaaaactagaagcaacagaaaacacaataagccccaggcgtgagtcactggagagcgcgacgggaggaaggggcgccctgagtccacagccctgggggaggtcggagggtctgaaagcgagaagtccgtgagtagaagcgcaatggcggcggccgcggcggagcagcaacagttctacctgctcctgggaaacctgctcagccccgacaatgtggtccggaaacaggcagaggaaacctatgagaatatcccaggccagtcaaagatcacattcctcttacaagccatcagaaatacaacagctgctgaagaggctagacaaatggccgccgttctcctaagacgtctcttgtcctctgcatttg

SEQ ID NO: 142531 - DNA, 591 bp, Homo sapiens
  Payload ID: 8164
  Gene Symbol: IPO5
  Gene Name: importin 5
  ENST ID: ENST00000480611
  CDS Start-End: 240-591
aagtatgaaacaatgacgatttcatgatggctcattgttctttggtattgtgccttacgtgagctggggactaactctaaatcagtttttatttcacttaggtggttccggggagaagcctttccaggacccatgtgtaggcacaactgttttccctgatcaggatacttgcggcactcaacagaggaaagaaattcctaagggaacactgctcagaaagtactgcagcatgtcttcaaatgcctgaggatcaagttggaaaactagaagcaacagaaaacacaataagcgcaatggcggcggccgcggcggagcagcaacagttctacctgctcctgggaaacctgctcagccccgacaatgtggtccggaaacaggcagaggaaacctatgagaatatcccaggccagtcaaagatcacattcctcttacaagccatcagaaatacaacagctgctgaagaggctagacaaatggccgccgttctcctaagacgtctcttgtcctctgcatttgatgaagtctatccagcacttccctctgatgttcagactgccatcaagagtgagctactcatgattattcagatgg

SEQ ID NO: 142532 - DNA, 568 bp, Homo sapiens
  Payload ID: 8164
  Gene Symbol: IPO5
  Gene Name: importin 5
  ENST ID: ENST00000481689
  CDS Start-End: 183-568
acagtaagtcatcccaaaacctcacattcagatgaaaccatttaagaatttcatctgcactgaggaacaatttagcgtgatactggagggaaagagtttccctgtgagatccaggaggtccctttagctcgtctcctgacgtcaccacagtcatacccaagaggaaggaaacgtcagagacaatgatttggagaacattctacacaaaaaccaacagaggaaagaaattcctaagggaacactgctcagaaagtactgcagcatgtcttcaaatgcctgaggatcaagttggaaaactagaagcaacagaaaacacaataagcgcaatggcggcggccgcggcggagcagcaacagttctacctgctcctgggaaacctgctcagccccgacaatgtggtccggaaacaggcagaggaaacctatgagaatatcccaggccagtcaaagatcacattcctcttacaagccatcagaaatacaacagctgctgaagaggctagacaaatggccgccgttctcctaagacgtctcttgtcctctgcatttgatgaagtctatccagcact

SEQ ID NO: 142533 - DNA, 883 bp, Homo sapiens
  Payload ID: 8164
  Gene Symbol: IPO5
  Gene Name: importin 5
  ENST ID: ENST00000475420
  CDS Start-End: 372-883
aaattacgcctctaggttcctagactgagattgagataatcagccctgtaaaccagggctcctttaggaagaaaggtgtctctcttgacgttccccaatcattgcgagaacagaatccctaaacaagggattcaagggaacagtcacagatcctggggtgggggcatgtttgctacgtgtacatccgaagacgaccgcgggctggggacgggcggcctggcgggacagccccgggctgagtaacccctcttccgggcaagccccaggcgtgagtcactggagagcgcgacgggaggaaggggcgccctgagtccacagccctgggggaggtcggagggtctgaaagcgagaagtccgtgagtagaagcgcaatggcggcggccgcggcggagcagcaacagttctacctgctcctgggaaacctgctcagccccgacaatgtggtccggaaacaggcagaggaaacctatgagaatatcccaggccagtcaaagatcacattcctcttacaagccatcagaaatacaacagctgctgaagaggctagacaaatggccgccgttctcctaagacgtctcttgtcctctgcatttgatgaagtctatccagcacttccctctgatgttcagactgccatcaagagtgagctactcatgattattcagatggaaacacaatctagcatgaggaaaaaagtttgtgatattgcggcagaactggccaggaatttaatagatgaggatggcaataaccagtggcccgaaggtttgaagttcctttttgattcagtcagctctcaaaatgtgggactgcgggaagctgcccttcacattttctggaactttcctggaatttttgggaaccagcaacaacactatttaga

SEQ ID NO: 142534 - DNA, 493 bp, Homo sapiens
  Payload ID: 8164
  Gene Symbol: IPO5
  Gene Name: importin 5
  ENST ID: ENST00000463157
  CDS Start-End: 230-493
acaactggagcagccgggaacagctctgaccacagtggttccggggagaagcctttccaggacccatgtgtaggcacaactgttttccctgatcaggatacttgcggcactcaagaattctccgaagtttgaaggttatgaatggttatcactcaaggattcagaactaagcagaggaaagaaattcctaagggaacactgctcagaaagtactgcagcatgtcttcaaatgcctgaggatcaagttggaaaactagaagcaacagaaaacacaataagcgcaatggcggcggccgcggcggagcagcaacagttctacctgctcctgggaaacctgctcagccccgacaatgtggtccggaaacaggcagaggaaacctatgagaatatcccaggccagtcaaagatcacattcctcttacaagccatcagaaatacaacagctgctgaagaggctagacaaatggccgccgttctcctaagacgtctcttg

SEQ ID NO: 142535 - DNA, 544 bp, Homo sapiens
  Payload ID: 8164
  Gene Symbol: IPO5
  Gene Name: importin 5
  ENST ID: ENST00000460070
  CDS Start-End: 118-544
agaactgtgggattgatgacctcccacaactggagcagccgggaacagctctgaccacacagaggaaagaaattcctaagggaacactgctcagaaagtactgcagcatgtcttcaaatgcctgaggatcaagttggaaaactagaagcaacagaaaacacaataagcgcaatggcggcggccgcggcggagcagcaacagttctacctgctcctgggaaacctgctcagccccgacaatgtggtccggaaacaggcagaggaaacctatgagaatatcccaggccagtcaaagatcacattcctcttacaagccatcagaaatacaacagctgctgaagaggctagacaaatggccgccgttctcctaagacgtctcttgtcctctgcatttgatgaagtctatccagcacttccctctgatgttcagactgccatcaagagtgagctactcatgattattcagatggaaacacaatctagcatgaggaaaaaagtttgtgatattgcggcagaactggccaggaatttaataggtgtgtatg

SEQ ID NO: 142536 - DNA, 536 bp, Homo sapiens
  Payload ID: 8164
  Gene Symbol: IPO5
  Gene Name: importin 5
  ENST ID: ENST00000473582
  CDS Start-End: 42-536
acctgattgttgaggaaccagggtgttaatagataaaagtcatgtgtcccctcttttacttttcctcatacaaggaaacctatgagaatatcccaggccagtcaaagatcacattcctcttacaagccatcagaaatacaacagctgctgaagaggctagacaaatggccgccgttctcctaagacgtctcttgtcctctgcatttgatgaagtctatccagcacttccctctgatgttcagactgccatcaagagtgagctactcatgattattcagatggaaacacaatctagcatgaggaaaaaagtttgtgatattgcggcagaactggccaggaatttaatagatgaggatggcaataaccagtggcccgaaggtttgaagttcctttttgattcagtcagctctcaaaatgtgggactgcgggaagctgcccttcacattttctggaactttcctggaatttttgggaaccagcaacaacactatttagatgtcatcaaacgaatgttagttcagtgtatgcaagatcag

SEQ ID NO: 142537 - DNA, 192 bp, Homo sapiens
  Payload ID: 8164
  Gene Symbol: IPO5
  Gene Name: importin 5
  ENST ID: ENST00000631030
  CDS Start-End: 1-192
atgcctgaggatcaagttggaaaactagaagcaacagaaaacacaataagcgcaatggcggcggccgcggcggagcagcaacagttctacctgctcctgggaaacctgctcagccccgacaatgtggtccggaaacaggcagagacagatatgtttgaaaagtttgaaacctgtgtagcactgcataaatag

SEQ ID NO: 142538 - DNA, 6191 bp, Homo sapiens
  Payload ID: 8165
  Gene Symbol: IPO7
  Gene Name: importin 7
  Uniprot ID: O95373
  ENST ID: ENST00000379719
  CDS Start-End: 143-3259
gttctatccggggccttggcgcttctctttcctttcgcgccggttgccgctgcggagcgcggcgggtccatgtgcgcagtgagtggcgctattcctggcccagtagcacccgagccccgggtttgaccgagtccgcgctgcgatggaccccaacaccattatcgaggccctgcggggcactatggacccagccctgcgtgaggccgcggagcgccagctcaatgaagcacacaagtctctgaattttgtctcaacactgctccagattactatgtcggaacagctggatttacctgtgagacaggcaggtgttatctatctgaaaaatatgataacacagtattggcctgatcgagaaacagcaccaggggatatatccccttatactattccagaagaagatcgccattgtattcgagaaaatattgtagaagccattatccattctcctgagctcatcagggtacagcttactacatgcattcatcacatcatcaaacatgattatccaagccgctggactgccattgtggacaaaattggcttttatcttcagtccgataacagtgcttgttggctaggaattcttctttgcctttatcagcttgtgaaaaattatgagtataaaaaaccagaggagcggagtccattggtagcagcaatgcagcattttctgccagttctaaaggatcgttttatccagcttctttctgaccagtctgatcagtctgtcctcatccagaaacagatattcaagatcttctatgctcttgttcagtatacactaccactggaactgataaaccaacagaacctgacagaatggatagaaattttaaagactgttgtgaacagggatgtacctaatgaaacacttcaagttgaagaagatgatcgacctgagttaccatggtggaaatgcaagaagtgggccttacatattttagcaagactttttgaaagatatggaagccctggcaatgtttccaaggagtataatgaatttgctgaagtatttctgaaggcatttgctgttggtgtccagcaagttttattgaaggtgttatatcagtacaaggagaagcaatatatggctcctcgagttttacaacagacattaaattatattaatcaaggagtttctcatgctctcacctggaagaatctgaagccccatatacaaggcattatccaagatgttatttttccattgatgtgctatacagatgctgatgaggaactttggcaagaagacccttacgaatatatacgcatgaagtttgatgtgtttgaagatttcatttctcctaccactgctgcccagacacttttgtttacagcctgtagtaagaggaaagaggtactgcaaaagactatgggattttgttaccagattcttacagaaccaaatgctgaccctcgaaaaaaagatggagccctgcatatgattggctctttagctgaaatacttctgaagaaaaagatctataaagatcagatggaatacatgttgcagaatcatgtattccctctcttcagcagtgaactaggctacatgagagcaagggcttgctgggtacttcactatttttgtgaagtgaagttcaaaagtgatcagaaccttcaaacagccttagagctaacaagaagatgtctgattgatgatagagaaatgcctgtgaaagtggaagctgccattgcccttcaagtattgatcagcaatcaagaaaaagctaaagaatatatcacaccattcatcagacctgtaatgcaggctcttcttcacattataagagaaacagaaaatgatgaccttaccaatgtaattcagaaaatgatctgtgaatatagtgaagaagttactcctattgcagtagaaatgacacaacatttggcaatgacatttaaccaagtaatccagacggggccagatgaagaaggtagtgatgacaaagcagttactgctatgggaattctgaatacaattgatacacttcttagtgtagttgaagatcataaagagataacccaacagcttgagggaatctgcttacaggtcattggtactgttttacaacagcatgtcttagaattctatgaggagatcttctctttagcgcacagtttgacatgtcaacaagtgtctccacagatgtggcagctactaccccttgtatttgaagtctttcagcaagatggctttgattactttacagatatgatgcccctccttcataattatgtaacagttgatacagacacacttctgtctgacaccaagtatcttgaaatgatatacagtatgtgcaaaaaggttcttacaggagttgcaggagaagatgcagagtgtcatgcagcaaaattgttagaggtcatcattctgcagtgcaaagggcgtggcattgaccagtgcattcccttattcgtggaagcagccttagaaagactgacaagagaggttaagacaagtgaacttcgaactatgtgtctgcaagttgcaattgcagctttgtattataatccacacctactactcaataccttagaaaatcttcgcttccctaataatgttgaaccagttacaaatcattttattacacagtggcttaatgatgttgactgtttcttggggcttcatgacagaaagatgtgtgttctcggactctgtgctcttattgatatggaacagataccccaagttttaaatcaggtttctggacagattttgccggcttttatccttttatttaacggattgaaaagagcatatgcctgccatgcagaacatgagaatgacagtgatgatgatgatgaagctgaagatgatgatgaaaccgaggaactggggagtgatgaagatgatattgatgaagatgggcaagaatatttggagattctggctaagcaggctggtgaagatggagatgatgaagattgggaagaagatgatgctgaagagactgctctggaaggctattccacaatcattgatgatgaagataaccctgttgatgagtatcagatatttaaagctatctttcaaactattcaaaatcgtaatcctgtgtggtatcaggcactgactcacggtcttaatgaagaacaaagaaaacagttacaggacatagcaactctggctgatcaaagaagagcagcccatgaatccaaaatgattgagaagcatggaggatacaaattcagtgctccagttgtgccaagttctttcaattttggaggcccagcaccagggatgaattgagttatctctttctttcctgctgtgtgcttgtagtgaagagcttgtgttcctcctagtagtggttccagaactggttcatgttatctattctaaactaataatcaatagatggacaaaagaaacaacaaccccaggagatgggacctgatcatgcaacctggcactggaaaagaaatcagcgggattttgggggtggggggggatgggaggtaccttagagggagtattttctttattttttgaagaaagtaagatcctgactctgaagcttcaaagtgacactgtggaaatctgaaacgaggggatgtcatgaaggcagcttttctttttctgaggaaaaaataggcatgggctacaggactatttaaaatgtctcatttacagtataaaactcaaaggtagatgtaatttttacacctatgagtatttgtccaatttctgtctcttcctcaccattgggtatctattctttatatgtaaataagataaggtcatctgatagccttattcagtcttcatcattttcatcattgttcctatgtagattattggacatttattgtagcactacataactgattataaaaatctgtaaatgaattagcactttcatattgaaacaagcctgctagcctatgtataaaatagcaaaatgtttgctgtttataaaaagatgtaatggggtggggggcaggggtaatttcaagttattaatttaaaaatgaactagcaattttgtacctggtgactttgtggtgcactcacctctgatagtgacttgaattcggtatgtaaaaaggggttagtggtatttcattgctgctaaaaatgacaactccctctgtgtcctgtttttcttaaagctgtcagtgtacaagtgggtatttgaataccagaccttactgtaaaaaataaaaaaggtggtatctagagcatgtaaattggatataaagttctgctcttaaagagttgatctaagagtatggctaaacatctatatatgcaatctattaaaagaacttaattcggctattatgtcttgatttgattgcagttttttcctaattataacaaatttttcctcattggcctgtttttaatcctgtgcctagaaggagtacaaaatgcacactttacaaaattgatatttaacacttacccactcccctttccccatctcttctaccgctcttgttgatcgtggtatctgatcttgactagataggctgaaggcacatggttccctccaaaaaccactattgataccactacaaaaacaagccagcaaaaagatactgtagagaggttggcttgcttccctctcttcctaactgcatgttgaaaaataagccgttattgatcttaaacatcggtcagatgagtcatacattgggttattttttatatacatgtatacacaaaatatttcaaattgaaagcaacatcttaatggattcaaaactattacaagctgttgtctaaaacaggtgagaaaaaaatttataactgtaaaaacaaatgcacatattgatatttaaaatgcgtaattaagaaaacccattgttgttgtgtttttcttgtataccaataattaagccactactgttggcactgtttggttttctattttaacactgaaggagtgaaagtatttcctatatttatgaatttactactaaaatcttggcaaaaaaagaaaaaaattgtctaacgtgtgtgggtgaaaactgttaatcaagtgtttctactcccccccgaaaatcccctgaaagttggacaccaactgtataccctaggttgcttaaagggatttcactattatataaagtcaataaaaatgaagtagttgtatatatgcaacattgtgtacagaggggaaataatgaatagtattaaagaaacattctcgtcttcctttacctttaatcccctaatacctagtctactttttaaattttcagacttcactgctttttgaattcataattctaattttcacattattgttaatggaaaatcatatctaataaaggttttagttattcccatgcacagtatgaaaattctcatttgctgaggttttgtttcaagaaaatgtattggcatgtctttgagaacatgttttattgtctcctgtgtcatataatccaaactaatctccgtttacagactttaacttgaaattagaccttataattaaactatttaaatagtgttcaaatgatagtttctaatgcatcaaatatatacctcagttttcatgatttcctttaacattataatttggtatagatcaagaatcttaacatgtatcagtttctagatgaggctgcaggatttttggaaaactttttgaatgtatttacaatattctcttgtaattagctacatagggacttgtctttttttctttttacatacagcttttcctacagttttattaccctgtaatttttttttagttgtagaagttaattctgattttgtgtggatttcagtatttgtctttgttaatggcacatattagcataaatcacttttgtaaatgtaagctttctttttttttcttgaaaaagcctttctatttatcagtattaaataaaggaagttaatctgtttctctgcaggtaataaaatagtgacacactgtattaagatagtgactgctatactcaactctggaagagactagagtatagagcatgagtggcaaaaccacagcccttgggccatatgctgctattcagtcccagatgtagcccctgaagcaagcataaagaaaaatgaattaaaaattaaattaatatggaaagttaaaaaatggattacattagtatgactaaaccatgtctttggcaaagatctaacacaatgtcttaagtataataggtagtctctgtttgtaaaataaatgacttaaatttaaaacatc

SEQ ID NO: 142539 - DNA, 578 bp, Homo sapiens
  Payload ID: 8165
  Gene Symbol: IPO7
  Gene Name: importin 7
  ENST ID: ENST00000533233
  CDS Start-End: 113-307
cctttcgcgccggttgccgctgcggagcgcggcgggtccatgtgcgcagtgagtggcgctattcctggcccagtagcacccgagccccgggtttgaccgagtccgcgctgcgatggaccccaacaccattatcgaggccctgcggggcactatggacccagccctgcgtgaggccgcggagcgccagctcaatgaaacggagtttcgctcttgttgcccagactggagtgcaatggcacaatctcggctcgccacaacctccgcctcccggattcgggcaattctcctgcctcagcctcttgagtagctgggattacaggtgttatctatctgaaaaatatgataacacagtattggcctgatcgagaaacagcaccaggggatatatccccttatactattccagaagaagatcgccattgtattcgagaaaatattgtagaagccattatccattctcctgagctcatcagggtacagcttactacatgcattcatcacatcatcaaacatgattatccaagccgctggactgccattgtggacaaaattggcttttatcttcagtccgataacag

SEQ ID NO: 142540 - DNA, 607 bp, Homo sapiens
  Payload ID: 8165
  Gene Symbol: IPO7
  Gene Name: importin 7
  ENST ID: ENST00000527431
  CDS Start-End: 216-607
ctttcgcgccggttgccgctgcggagcgcggcgggtccatgtgcgcagtgagtggcgctattcctggcccagtagcacccgagccccgggtttgaccgagtccgcgctgcgatggaccccaacaccattatcgaggccctgcggggcactatggacccagccctgcgtgaggccgcggagcgccagctcaatgaagtgttatctatctgaaaaatatgataacacagtattggcctgatcgagaaacagcaccaggggatatatccccttatactattccagaagaagatcgccattgtattcgagaaaatattgtagaagccattatccattctcctgagctcatcagggtacagcttactacatgcattcatcacatcatcaaacatgattatccaagccgctggactgccattgtggacaaaattggcttttatcttcagtccgataacagtgcttgttggctaggaattcttctttgcctttatcagcttgtgaaaaattatgagtataaaaaaccagaggagcggagtccattggtagcagcaatgcagcattttctgccagttctaaaggatcgttttatccagcttctttctgaccagtc

SEQ ID NO: 142541 - DNA, 195 bp, Homo sapiens
  Payload ID: 8165
  Gene Symbol: IPO7
  Gene Name: importin 7
  ENST ID: ENST00000630083
  CDS Start-End: 1-195
atggaccccaacaccattatcgaggccctgcggggcactatggacccagccctgcgtgaggccgcggagcgccagctcaatgaaacggagtttcgctcttgttgcccagactggagtgcaatggcacaatctcggctcgccacaacctccgcctcccggattcgggcaattctcctgcctcagcctcttgagtag

SEQ ID NO: 142542 - DNA, 5325 bp, Homo sapiens
  Payload ID: 8166
  Gene Symbol: IPO8
  Gene Name: importin 8
  Uniprot ID: O15397
  ENST ID: ENST00000256079
  CDS Start-End: 340-3453
acagcagcatggcggccgccgacgggaggcggtcatagcatcacgcccgggggaagaggccgccgtaaaggaagctctgcttcctcttcttccttctcccgcctcccaccggctgtcgtaaaacggtgaatggagagcgagttgtgggggggaaaaagggaggacagggggcgcggagtcagagtggcgcagcaagtggccgcaggtggcgacggtggcggggggtggggtgtgaggtaatccaggggtcgcggaagaggaggctgagagggtcaaaagaaaactaaagctgcagtccggcctactgttccgggggccgcggagcccccacccggggagatggacctcaaccggatcatccaggcgctgaagggcaccatcgacccgaagttgcggattgcagccgagaacgagctcaaccagtcctacaagattatcaattttgcccccagtttacttcggattatagtctctgaccatgtggaattcccagtacgacaggcagctgccatttacctgaagaacatggtgacacaatactggccagatcgagaacctccaccaggagaagcaatatttccattcaacattcacgaaaacgatcgccagcaaatacgtgataacattgtggaaggaataattcggtctccagatttagtgagagtccaattaacaatgtgtctccgtgccatcataaaacatgattttcctggtcactggccaggagtggtcgacaagatagactattacttgcaatcacagagcagtgcaagctggcttggcagtttattatgcctgtatcaactggtgaagacatatgaatataagaaagcagaagagagagaacctcttataatagcaatgcagatattcctgcctcgtattcagcaacaaattgttcagctccttcctgattcctcctattattctgtattactgcagaaacaaattctgaaaatcttttatgcacttgttcagtatgcattgcctcttcagctagtgaataaccaaaccatgacaacatggatggagatcttccgaactattatcgacaggaccgttcctcctgagactctgcacattgatgaggatgatagaccagaactggtatggtggaagtgtaagaagtgggcactgcatattgtagctcggctctttgaacgatatggaagcccaggaaatgtcacaaaagaatactttgaattttctgaattctttttgaaaacctatgcagtgggcattcagcaggtgctactaaaaattttagatcaatatagacagaaagaatatgtagctccccgtgttcttcagcaagcattcaactatctcaaccaaggggtggttcattctataacctggaagcagatgaagccacacatacagaatatctctgaagatgtgattttttctgtgatgtgttataaagatgaggatgaagagctgtggcaagaagatccatatgagtatataaggatgaaatttgatatttttgaagattatgcttctcccaccacagcagcccagactctcttatatactgctgcaaagaaaagaaaagaggtgttgccaaaaatgatggcattctgttatcaaatcctgacagacccgaactttgaccctaggaagaaagatggagccctgcatgtgattggttccctagctgagattttactgaagaagagtttattcaaggaccaaatggagctgtttctacaaaatcatgtatttccattattattgtctaacctgggatatcttcgagctagatcttgctgggtacttcatgcatttagttctttgaagttccataatgagctcaatctaagaaatgccgttgaattagcgaagaagagcctgattgaagataaagagatgcctgtcaaagttgaagctgcccttgctcttcagtctttaatttctaaccagatacaagctaaggaatatatgaagccacatgtgaggcctattatgcaggaactgttgcacattgttagagagacagaaaatgatgatgttactaatgtcatccagaagatgatatgtgaatacagtcaagaggtagcctcaattgctgttgatatgacccaacacttggctgagatatttggcaaagttcttcaaagtgatgaatatgaagaagttgaagacaaaacagtaatggctatgggaattttacataccattgatactatcttaacagttgtagaagatcataaagagattacccagcagttagagaatatctgtctacggatcattgatcttgttctgcagaaacatgtaattgaattctatgaagaaattctttccctggcatacagtttaacctgccacagtatttcccctcaaatgtggcagcttctaggtatactatatgaagtgtttcagcaggattgctttgaatactttacagacatgatgcctctcctgcataattatgtgacaatagatacagataccttactatcaaatgcaaaacatttagaaattctttttacaatgtgtaggaaggtactatgtggagatgcaggagaagatgcagagtgtcatgcagctaaacttctggaagtcatcattcttcagtgcaaaggaaggggaattgatcagtgcattccactcttcgttcaacttgttttggagagattaactcgaggggtcaaaactagtgagcttcgtactatgtgtcttcaggttgcaattgctgccttgtactacaaccctgatttgctgctacatactttagaacgaattcagttgcctcacaaccctggacctatcactgtacagtttataaatcaatggatgaatgatacagattgttttcttgggcatcatgaccggaagatgtgtataataggactgagtatccttttggaattgcaaaatcgacctcctgcagtagatgctgtggtgggacagattgttccctcaattcttttccttttccttggcctaaagcaggtctgtgctactagacaactggtaaaccgggaagatcgttcaaaagcagagaaagctgatatggaagaaaatgaggagatttcaagtgatgaagaggagacaaatgtaactgctcaagcaatgcagtcaaataatggaagaggtgaagatgaggaggaggaagatgatgactgggatgaagaagtattggaagaaaccgcgcttgaggggttcagtactccacttgaccttgacaatagtgtggatgaatatcagttttttacacaagctctgataactgtgcagagtcgagatgcagcctggtaccagctgctgatggcaccactcagcgaggatcagaggacagcactgcaggaggtgtacacactggcagagcaccgacggacggtggcagaggcaaagaagaagattgaacaacagggaggcttcacctttgaaaacaaaggagtcctctccgcatttaattttgggactgtgcccagcaacaactgaaggaaagaacatcagctgaccaaatgtcatcgctgcattttatttcacaagaggagtgtgagggtcaaggggatgaaatgaggggctgcttttagggccctcctgctgtgccagttaccatctggcattaggcagcacttttatctactctttcccctttgacctttgtcaccctgaaatatatattttaaacagctactgtaagtatgaaatgaaagaaaaacaatcattggacggaaaaggacaacccatatgttccaaaggctgaatgcccaaggttgttttagaggattggatagacttgcacgtctcaggtttttgccatgcagaatcaatggatttatgcggataacagtgccttctgttgtacatgaattatcagaaaaaaatttttggagtgcattgcaattttttttaaagcataaaacatatttctagatacaacataaaccttggttatatgtcaactattctgcattttactctgtgaatttattgttaggcagttactgcaagtcactctggtttcaaaatcttcacggctccctctgctcaccctgctgctggggggcttttttcaggggttgtattataaaatatgcactggctgtggtttttcataagatgttttgtggctttttaaagaagtgtcttactccctcttctctcatttttttctgccttgaaaaggggtggtatttcttttggggtcaacaaatacacatatcagtttcactcctaaccttgtaagttcaggactcattttcttggcagcaagtggcaggggctctttagtcactggagttaacagtaagtctgagtatattctgaataatgtaattatgcaattaattgataatcatacctaaagcacattgaacttctaagagacaggtgctacgtaagcacactgtctttctggatggggacttgtattttaaataacttatcattccagctatgttggactagggtccaaagcattttataatatttttttttaatctaggaaaaagacccaaacaaatctaacttcttgctttctcacctatttgaattttctcctacctaatttgtttgtgtctttattatagctcagtttgacttctcaaacttttcaagggttggggcagctgcacttttaggttgcctataggaaatattgcatatggagattacagtgtttttctgacctagttcaagaccagaacatgggtcatagggtttttattcagcaaaatgaaaacgtatcttcagaacttaacatattactggatgtgatacagattttgctttctgtggaattgaaaattcacaaaaattcacagcttaaatttcccatcagtgactggaggaatttttttcaggtgcttcctatattaccatccctcatgcatattaactctttagaattttaggttaagtgatgtctatagaagtagcctggaaaaccatgagttttggagttcagtgaccccctgctttcctctgctcctcccttcccaaggcattgaagctgaatgtgccaactggcagttagaagcgaaagatggcattgggagaaattttagagagctttcaaactctttattctcatgttccacatggtctaattttaacataaataatatgccttcacactggattgtaaaaggcatgtgatttttgagattttattttgtgatgtattgtcttctgcagtattaaagggaaagagatattaatgtgcattaccctatcttgtttttgaagccagggtagttgtatgattttgttaccagcagtgctaacctgaatgtgacctggttaccttggaaatgcaggaacttatatgaatgtactataaaataaaatgcggactgattcccagga

SEQ ID NO: 142543 - DNA, 544 bp, Homo sapiens
  Payload ID: 8166
  Gene Symbol: IPO8
  Gene Name: importin 8
  ENST ID: ENST00000543446
  CDS Start-End: 291-544
gttccccaaatcctcaccaactctgtacaacttaatgaagttttgatgtaaaatgtaaacagcattgaaaggcatttttttcttcataatttgttttttcataatttagatttcaaatcctaaatttaagtggtatttataaattttctgttctgtttaatctattattaaaatacaaggatgctccaagacacctagaaagataatttatctttagcatgacacttaaaaaagaatgttgtgatttttgctttaaaagaaagcctgtataaagctgtaaaaaaaaagttatgctaatgttaagtggaaatacatctgcaaaatactttttctcttttgcttgtgggcaatctaaagtgttcttgctaccatcaagcgtgctcactgctgccatttacctgaagaacatggtgacacaatactggccagatcgagaacctccaccaggagaagcaatatttccattcaacattcacgaaaacgatcgccagcaaatacgtgataacattgtggaaggaataattcggtctccagatttagtgag

SEQ ID NO: 142544 - DNA, 535 bp, Homo sapiens
  Payload ID: 8166
  Gene Symbol: IPO8
  Gene Name: importin 8
  ENST ID: ENST00000542464
  CDS Start-End: 35-535
aagcttcgtgagggcaaagattgtctatcttattatgtctgtagcatgtagcatgttttgtactgaatggatgtggaggcaatatccgtcttctgcaactcacagtacagcagagtatgcattgcctcttcagctagtgaataaccaaaccatgacaacatggatggagatcttccgaactattatcgacaggaccgttcctcctgagactctgcacattgatgaggatgatagaccagaactggtatggtggaagtgtaagaagtgggcactgcatattgtagctcggctctttgaacgatatggaagcccaggaaatgtcacaaaagaatactttgaattttctgaattctttttgaaaacctatgcagtgggcattcagcaggtgctactaaaaattttagatcaatatagacagaaagaatatgtagctccccgtgttcttcagcaagcattcaactatctcaaccaaggggtggttcattctataacctggaagcagatgaagccacacatacagaatatctctgaagat

SEQ ID NO: 142545 - DNA, 537 bp, Homo sapiens
  Payload ID: 8166
  Gene Symbol: IPO8
  Gene Name: importin 8
  ENST ID: ENST00000535989
  CDS Start-End: 85-537
agaatgctaggttccccaaatcctcaccaactctgtacaacttaatgaagttttgatgtaaaatctgccatttacctgaagaacatggtgacacaatactggccagatcgagaacctccaccaggagaagcaatatttccattcaacattcacgaaaacgatcgccagcaaatacgtgataacattgtggaaggaataattcggtctccagatttagtgagagtccaattaacaatgtgtctccgtgccatcataaaacatgattttcctggtcactggccaggagtggtcgacaagatagactattacttgcaatcacagagcagtgcaagctggcttggcagtttattatgcctgtatcaactggtgaagacatatgaatataagaaagcagaagagagagaacctcttataatagcaatgcagatattcctgcctcgtattcagcaacaaattgttcagctccttcctgattcctcctattattctgtattactgcagaaacaaattctgaaaatcttttatgcacttgttcag

SEQ ID NO: 142546 - DNA, 792 bp, Homo sapiens
  Payload ID: 8166
  Gene Symbol: IPO8
  Gene Name: importin 8
  ENST ID: ENST00000540979
  CDS Start-End: 223-330
gtaaaacggtgaatggagagcgagttgtgggggggaaaaagggaggacagggggcgcggagtcagagtggcgcagcaagtggccgcaggtggcgacggtggcggggggtggggtgtgaggtaatccaggggtcgcggaagaggaggctgagagggtcaaaagaaaactaaagctgcagtccggcctactgttccgggggccgcggagcccccacccggggagatggacctcaaccggatcatccaggcgctgaagggcaccatcgacccgaagttgcggattgcagccgagaacgagctcaaccagtttacttcggattatagtctctgaccatgtggaattcccagtacgacaggcagctgccatttacctgaagaacatggtgacacaatactggccagatcgagaacctccaccaggagaagcaatatttccattcaacattcacgaaaacgatcgccagcaaatacgtgataacattgtggaaggaataattcggtctccagatttagtgagagtccaattaacaatgtgtctccgtgccatcataaaacatgattttcctggtcactggccaggagtggtcgacaagatagactattacttgcaatcacagagcagtgcaagctggcttggcagtttattatgcctgtatcaactggtgaagacatatgaatataagaaagcagaagagagagaacctcttataatagcaatgcagatattcctgcctcgtattcagcaacaaattgttcagctccttcctgattcctcctattattctgtattact

SEQ ID NO: 142547 - DNA, 526 bp, Homo sapiens
  Payload ID: 8166
  Gene Symbol: IPO8
  Gene Name: importin 8
  ENST ID: ENST00000358724
  CDS Start-End: 426-526
ttagaatgctaggttccccaaatcctcaccaactctgtacaacttaatgaagttttgatgtaaaatattgatcctgtgaaatcaggctgggtgttcatgcctgtaatcccagcactttgggaggctgaggtgggtggatcacttgagcccaggagttcaagaccagcctgggcagtatggcgaaaccctgtctctacaaaaatacaaaaaaattaactggcgtggtggtgcacgcctgtattcccaactacttgagagactgaggtgggaggatcacctaagccctggaggtggaggctgcagtgagctgtgattgtgcccctggactccagcctgggcgatagagtgagaccctgtctcaaaaaaacccctaaatcctgtgaaatcagtctgaactgctgacagctgccatttacctgaagaacatggtgacacaatactggccagatcgagaacctccaccaggagaagcaatatttccattcaacattcacgaaaacgatcgccagcaaatacgtgataacat

SEQ ID NO: 142548 - DNA, 3212 bp, Homo sapiens
  Payload ID: 8166
  Gene Symbol: IPO8
  Gene Name: importin 8
  Uniprot ID: O15397
  ENST ID: ENST00000544829
  CDS Start-End: 326-2824
attgttgtatatgcagtctgtcactgaccgaaacatttgttatgtggtgcatgactttatatacattttttccagttagagtgtaagcttcgtgagggcaaagattgtctatcttattatgtctgtagcatgtagcatgttttgtactgaatggatgtggaggcaatatccgtcttctgcaactcacagtacagcagaggtgagccatatatctgtttagtacaaagtggactgtagttattatgctacagtgtagaggaaagtaatttaaaaaaatgtttcatgagtgtttaatgaaataaatattttcatcaaggtggttaaaatggaaagtttgaccctcaaagggtatgcattgcctcttcagctagtgaataaccaaaccatgacaacatggatggagatcttccgaactattatcgacaggaccgttcctcctgagactctgcacattgatgaggatgatagaccagaactggtatggtggaagtgtaagaagtgggcactgcatattgtagctcggctctttgaacgatatggaagcccaggaaatgtcacaaaagaatactttgaattttctgaattctttttgaaaacctatgcagtgggcattcagcaggtgctactaaaaattttagatcaatatagacagaaagaatatgtagctccccgtgttcttcagcaagcattcaactatctcaaccaaggggtggttcattctataacctggaagcagatgaagccacacatacagaatatctctgaagatgtgattttttctgtgatgtgttataaagatgaggatgaagagctgtggcaagaagatccatatgagtatataaggatgaaatttgatatttttgaagattatgcttctcccaccacagcagcccagactctcttatatactgctgcaaagaaaagaaaagaggtgttgccaaaaatgatggcattctgttatcaaatcctgacagacccgaactttgaccctaggaagaaagatggagccctgcatgtgattggttccctagctgagattttactgaagaagagtttattcaaggaccaaatggagctgtttctacaaaatcatgtatttccattattattgtctaacctgggatatcttcgagctagatcttgctgggtacttcatgcatttagttctttgaagttccataatgagctcaatctaagaaatgccgttgaattagcgaagaagagcctgattgaagataaagagatgcctgtcaaagttgaagctgcccttgctcttcagtctttaatttctaaccagatacaagctaaggaatatatgaagccacatgtgaggcctattatgcaggaactgttgcacattgttagagagacagaaaatgatgatgttactaatgtcatccagaagatgatatgtgaatacagtcaagaggtagcctcaattgctgttgatatgacccaacacttggctgagatatttggcaaagttcttcaaagtgatgaatatgaagaagttgaagacaaaacagtaatggctatgggaattttacataccattgatactatcttaacagttgtagaagatcataaagagattacccagcagttagagaatatctgtctacggatcattgatcttgttctgcagaaacatgtaattgaattctatgaagaaattctttccctggcatacagtttaacctgccacagtatttcccctcaaatgtggcagcttctaggtatactatatgaagtgtttcagcaggattgctttgaatactttacagacatgatgcctctcctgcataattatgtgacaatagatacagataccttactatcaaatgcaaaacatttagaaattctttttacaatgtgtaggaaggtactatgtggagatgcaggagaagatgcagagtgtcatgcagctaaacttctggaagtcatcattcttcagtgcaaaggaaggggaattgatcagtgcattccactcttcgttcaacttgttttggagagattaactcgaggggtcaaaactagtgagcttcgtactatgtgtcttcaggttgcaattgctgccttgtactacaaccctgatttgctgctacatactttagaacgaattcagttgcctcacaaccctggacctatcactgtacagtttataaatcaatggatgaatgatacagattgttttcttgggcatcatgaccggaagatgtgtataataggactgagtatccttttggaattgcaaaatcgacctcctgcagtagatgctgtggtgggacagattgttccctcaattcttttccttttccttggcctaaagcaggtctgtgctactagacaactggtaaaccgggaagatcgttcaaaagcagagaaagctgatatggaagaaaatgaggagatttcaagtgatgaagaggagacaaatgtaactgctcaagcaatgcagtcaaataatggaagaggtgaagatgaggaggaggaagatgatgactgggatgaagaagtattggaagaaaccgcgcttgaggggttcagtactccacttgaccttgacaatagtgtggatgaatatcagttttttacacaagctctgataactgtgcagagtcgagatgcagcctggtaccagctgctgatggcaccactcagcgaggatcagaggacagcactgcaggaggtgtacacactggcagagcaccgacggacggtggcagaggcaaagaagaagattgaacaacagggaggcttcacctttgaaaacaaaggagtcctctccgcatttaattttgggactgtgcccagcaacaactgaaggaaagaacatcagctgaccaaatgtcatcgctgcattttatttcacaagaggagtgtgagggtcaaggggatgaaatgaggggctgcttttagggccctcctgctgtgccagttaccatctggcattaggcagcacttttatctactctttcccctttgacctttgtcaccctgaaatatatattttaaacagctactgtaagtatgaaatgaaagaaaaacaatcattggacggaaaaggacaacccatatgttccaaaggctgaatgcccaaggttgttttagaggattggatagacttgcacgtctcaggtttttgccatgcagaatcaatggatttatgcggataacagtgccttctgttgtacatgaattatcagaaaaaa

SEQ ID NO: 142549 - DNA, 758 bp, Homo sapiens
  Payload ID: 8166
  Gene Symbol: IPO8
  Gene Name: importin 8
  ENST ID: ENST00000535598
  CDS Start-End: 1-503
tccttttggaattgcaaaatcgacctcctgcagtagatgctgtggtgggacagattgttccctcaattcttttccttttccttggcctaaagcaggtctgtgctactagacaactggtaaaccgggaagatcgttcaaaagcagagaaagctgatatggaagaaaatgaggagatttcaagtgatgaagaggagacaaatgtaactgctcaagcaatgcagtcaaataatggaagaggtgaagatgaggaggaggaagatgatgactgggatgaagaagtattggaagaaaccgcgcttgaggggttcagtactccacttgaccttgacaatagtgtggatgaatatcagttttttacacaagctctgataactgtgcagagtcgagatgcagcctggtaccagctgctgatggcaccactcagcgaggatcagaggacagcactgcaggaggtgtacacactggcagagcaccgacggacggtggcaggtcagccagagtaacctccagagtggagtgcatgtgtcagagtgccaacagacagccttatttgatgagccaggtggcacctaaacactgtttttgaaattgttagagacttaccctttaagataataaggaattgtcattattgtatgattgttttaatcactcatgatgtcttagctttgcaaaaacctgcacattaatatgtatttcctagtggtgttctcattcacattcttatcctatgttggaggcaaaggtacaaagtaagg

SEQ ID NO: 142550 - DNA, 239 bp, Homo sapiens
  Payload ID: 8166
  Gene Symbol: IPO8
  Gene Name: importin 8
  ENST ID: ENST00000545077
  CDS Start-End: 102-239
ctgtcgggttggcaggactgttttgacaccgattggccgagttttgcggagcgctgggcagtgctgttgggagagtgctctgggaagaataggcagttttcatggtgatactgctttatctaagacacatcaaatcctacaagattatcaattttgcccccagtttacttcggattatagtctctgaccatgtggaattcccagtacgacaggcagctgccatttacctgaagaacatg

SEQ ID NO: 142551 - DNA, 426 bp, Homo sapiens
  Payload ID: 8166
  Gene Symbol: IPO8
  Gene Name: importin 8
  ENST ID: ENST00000611458
  CDS Start-End: 1-426
agtccaattaacaatgtgtctccgtgccatcataaaacatgattttcctggtcactggccaggagtggtcgacaagatagactattacttgcaatcacagagcagtgcaagctggcttggcagtttattatgcctgtatcaactggtgaagacatatgaatataagaaagcagaagagagagaacctcttataatagcaatgcagatattcctgcctcgtattcagcaacaaattgttcagctccttcctgattcctcctattattctgtattactgcagaaacaaattctgaaaatcttttatgcacttgttcaggtaggtttctattgcagaaaacaaacatggagtcctgtatttctgcctgacacatggaaagtgctcaataagtgtcacttattattaaaaattattttgtattatcccat

SEQ ID NO: 142552 - DNA, 11435 bp, Homo sapiens
  Payload ID: 8167
  Gene Symbol: IPO9
  Gene Name: importin 9
  Uniprot ID: Q96P70
  ENST ID: ENST00000361565
  CDS Start-End: 70-3195
gccgcgcgcgggggccgtcattcggtggcgggtcccggccgcggggctggcgggctgaggggagaaaagatggcggcggcggcggcagctggtgcggcctccgggctgccgggtccagtggcacaaggattaaaggaagcgttagtggatacgctcaccgggatcctatccccagtacaggaggtgcgggcggctgctgaagaacagattaaggtgctggaggtgacggaggaatttggtgttcacttggcagaactgactgtagatccccagggggcactggcaatccgtcagctggcatcagtcatcttgaaacaatatgtggagactcactggtgtgcccaatcagagaaatttaggcctcctgaaactacagaaagggcaaaaattgttatccgggagctattgcctaatgggttgagagaatcgataagcaaagtgcgctccagtgtggcctatgcagtgtcagccattgcccactgggactggcctgaagcttggccccaactcttcaacctgctcatggagatgttggtgagcggagacttaaatgccgtccatggagccatgcgtgtgctgacagaattcactcgtgaagtaacagacacacagatgccacttgttgctcctgtcattctcccagagatgtataagatcttcaccatggctgaggtgtatggtattcgaacccgttcccgagccgtggagatttttaccacttgtgcccatatgatctgtaacatggaggagctggaaaagggtgcagccaaagtcctgatctttcccgtggtacagcagttcacagaggcctttgttcaggccctccagataccagatggccccacatctgacagtgggtttaagatggaggtcctaaaggcagtgacagccctagtgaaaaacttcccaaagcacatggtgtcctccatgcagcagattctgcctattgtttggaacaccctaaccgagagtgcagctttttatgtgaggacagaagtaaattacacagaagaagtagaagatcctgtggattctgatggtgaagtcctgggctttgaaaatctcgtctttagcatttttgaatttgtccatgctctactagaaaatagcaaattcaaaagcactgttaagaaagccttgcctgaattgatttattatattatcctgtacatgcaaatcactgaggagcagattaaagtatggacagccaacccccaacaatttgtagaagatgaagatgatgatacattctcctatactgttagaatagcagctcaagacttgttgctggctgtggccacagatttccagaatgaaagtgcagcagccctggctgctgcagccactcgacatttacaagaagctgagcaaaccaaaaacagtggcactgagcactggtggaagatccatgaggcatgcatgcttgccctaggctcagtgaaggccatcatcactgacagtgtgaaaaatggcaggattcattttgacatgcatgggttcctgaccaatgtcatccttgcagacctcaacctctcagtgtctcctttcctcttgggccgggcactttgggctgccagtcggttcactgttgctatgtcccctgaactgatccagcagttcctacaggcaacagttagtggtcttcacgagacacagcccccatcagttcgaatttctgcagtgagagccatctggggttattgtgaccaactgaaagtctcagagagtacccacgtgctccagcccttcctccccagcatccttgatggcttaattcacctagcagcccagttcagctcagaggtcctcaacctggtgatggagaccctgtgcatcgtttgtacagtagaccccgaattcacagcaagcatggaaagcaaaatctgccccttcaccatcgccattttcctaaagtacagtaatgatcccgtcgtcgcctcactggctcaggacatcttcaaggagctgtcccagattgaagcctgtcagggcccaatgcaaatgaggctgattcccactctggtcagcataatgcaggccccagcagacaagattcctgcagggctttgtgcgacagccattgatatcctgacaacagtagtacgaaatacaaagcctcccctttcccagcttctcatctgccaagctttccctgctgtggcacagtgtacccttcacacagatgacaatgccaccatgcagaatggcggagagtgcttgcgggcctatgtgtcagtgaccctggaacaagtagcccagtggcatgatgagcagggccacaatggactgtggtatgtgatgcaagtggtgagccagctcctggacccccgcacctcagagttcactgcggcctttgtgggccgccttgtttccaccctcatctccaaggcagggcgggaactcggggagaatctagaccagattcttcgtgccatcctcagtaagatgcagcaggcagagacgctcagtgtcatgcagtccctgatcatggtgttcgctcatctggtgcacactcagctagaacctctcttggagttcctgtgtagcctcccaggacctactggcaaacctgctctagagtttgtgatggctgagtggacaagccgacagcacctgttctatggacagtatgaaggcaaagtcagctctgtggcactctgtaagctgctccagcatggcatcaatgcagatgacaaacggctacaggatatccgtgtgaagggagaggagatctacagcatggatgagggcatccgcacccgctctaagtcagccaaaaacccagaacgctggacaaacattcctttgctggtcaagatcctaaagctgatcatcaacgagctctccaacgtcatggaggctaatgccgctcgccaggccactcctgcagagtggagtcaagatgactccaatgatatgtgggaggaccaggaggaggaagaggaggaggaggaggatggtttagctggccaacttttatctgacattcttgctacaagtaaatatgaggaggattactacgaggatgatgaggaagatgaccctgatgccctgaaggatcctctctatcagattgatctgcaggcatatctcacagatttcctctgccagtttgctcagcagccctgctacataatgttttcaggccaccttaatgacaatgagaggcgagttctacagaccatcggcatctaaaaaggggagcctttctacatttgctccttctgggccagccgcaaaccattttgcagccctcactggccttgagatgcactttcttctcaacctaaagtggcatcttgacccttggcccttggcctcggcagtgacactgatgacaattcagaccaggctcaccggtgccgtcacttaggaatgctggaacaaaggacatttctcaaagttcccctgaagacatgccatctctagaaccttttttctccccgactctacccccacctctgttcctagagccctctgctggcgagtccagaaacattattgcccagaaggattatgtgtttatggattattttgccccgcctcaggagcgcaggaagtcactaccatttatattctaaaacagacctatctatgttcataggacttctgatgtgttcagataggaatcctcatgagagatcattatgctttgtgccctggaccactgctgctctgggttctcaggaggaacaggcaagagcagcttcattctaagcctttccagtgacctcagccttgcttctcttctacaacactaaggctcctctgtcagaggaggtcgtcttgtttttgcttcattgcatgacataacccttcccctcaagctgttcctatatatacatgcacacacaaaataagccagacagatggcaatttgatcttccttttttagaaaaaaaaaaaaaaatggggaaaagggattttttttaaatccacctgacccaactatatttaatatgcctctcccacacattaccacagagtctgatattcaaaggttatcccctttccctcaggaagcctctaaagtgcttaagttgtagccctcaaatttgcaacatgtatttttctaggacagtaaagtaatctttacaaatgaatttagttgcatggtataaggtgtctcagcacctgtttgccttctattccctttagaaggtaagtaaaagtaatgggggaaaggattaggtggagcctgtctaaacattctagtgtgtcttggcaaacatagcctgaaatgattcttaaagaactggcattgtttaatcaaatatttttaagggagattccttaattgggaagtttagtctgtttggggttcaaagagtaaatgaggattagaaaatcatggagagaggctgggcgcggtggctaacgcctgtaatcctagcactttgggaggctgagatgggcggatcacttgagatcaggagtttgaggctagcctggccaacacagtgaaacctgcatttctactaaaaatacaaaaattagctgggcatggtggtgcatgcctgtaatcccagttaacttgagatgctgaggcaggagaatcgcttgaacttgggaagcagaggttgcagtgaaccgatatcacaccgttgcattccaaggcaagactcaatcacacacacacacacacacacacacaaatcatggggagaaagatgaaacctgtgttcccctttttttggtagtgcccacatctggtgccccatttttaataaccacaggatatttctttagattgatattctcacaaagaagaaatagaatataggctgggcgtggtgtgtcacacctgtaatcccagcacttacggaggccgaagccagcggatcaccagaggtcaggagttcgagaccagcctgaccaacatgatgaaaccctgtctctactaaaaatacaaaaattagccaggcatggtggcatgcacttgtaatcccagctactcgggaggctgagacaggagaatcgcttgaacctgggaggcagaggttgcagtaagccaagatcgcaccattgcactacagcctgggcaacaagaggagcgaaactctgtctcaaaaaaaaaaaagagaaagaatataaagtgaatctgaatctccactcaaggggatggccccaaggatattgtagctggtaatttcttcatgccactaggtgtccccagtgttcaacctccatgactgagattggaagaagtagagttaaaagtttttactacctttgagaagcctgcgggcatgttcacagtcgtcccatgccagccaggttctgaggctaactgcttgtgcccctgctgcttcacatggcattgtgggagttgctgatactggggaaatgatggcagatctgaccaagtggtgctgagaaaaccaccctcggccttgcagactccatagtttatctcaaggcagtgccagtcggatttggtgctaaaggcataaggccaagtcagcctctgatattggcacaaaagaatggtctcatgccagtagcattgaactgctgagcttgggaaggcttaaggctcccacacacagactgagaatgatgggggtccctctgcgtctgctaattagacaaacattctatatctagtgccaaaagtggtcctaaatcctttggcaagggtcctttctgctctcatgctgatttgggggaggactgggcatcctgcctcaggagaacttgagtcctgaggaaagggccctagtaacacttaagggctacccctggctaacagatactcggctgtgggtgagagcagaaggtcttggacccctcgatgtgcaggtacttaattgtgtttccagtgcattttcatatacattatcccatttaacctttataacaggttcacagagtggatattcccattctgttgatgagaaaaagagtggagagactgtgtccagtgtcagcaggaagaaaaaagatctgttggaggccagtacatgttgacagaaactctagaccatattttgtctcctgtctttggccaaagagaactagcttcagtctgaaaagggcagggctaagtggttacaaggaactaaaaagttcaaggtaagacaaatgaggtaaaaataaaaaagagcacttagctgctctgagacattttagtctcctgactggtaaacagcagctggggcaccaaggggctcccaggagtttgtcgagcttttattggagtgaactgaaaggaaaatggaaggaatgctataagactgaaaagaagttaaagccctaggaaggaagctgataacacaagttacagacgtatatgtgacattgatttgggagaatgaacctacaacaaatgacccaaaagcacctaaataagagtgacgagagtttaacagacattcattatggacttcagagaaaatgatgctaaactggtcttagaatcttctttaattttgttaactaggtaaataatctggacattttagtcaaagcattagacagacagagaagttggtaactgaccactaactaacaaactataaattcacccattgtgggttgacctggtaagttcccccagggctgtgtccttggcccctcctttgatattagtgacagatgactttttttatgccttacccattccacaaaagaatttgaagccatttacacaagagatagtactagtaaattaggagtgctgatcaaatttttagataataagaaacccttaggaaggatgacaatttagaatccaaatttaggatccaaacaaataccattacaaactataaaaatgagcagaatctaaatgtaacatttcaataaatgcagattgataataacatctgtgcagagttgaggactatagagtactgtgctgtcactaacagtattgtgtgctactaagagtttaatggctgggtgtggtggctcacacctgtaatcccaacactttgggaggcctaggtgggtaaatcagctgagatcaggagttcgagaccagcctggccaatgtggtgaaaccccgcctctactaaaaataaaaaaattagctgggcatggtggcacgtgcctgtaatcccagctactcgggaggctgaggcgggagaatcacttgaacctgggagacagaggttgcagtgagtcgagatcacaccattgcactccagcctgggcaacagagcaagattctgtctcaaaaaataaagtttattatgccaggagggccaggtgtggtgccacacccatgtaatcccagcactttaggaggctgaggagggcagatcacttaagcccaagagtttgagaccagtctgggcaatgtggcaataccttgtctcttaaaatttaaaataaaaaaaaagtttattatgccaggaactgttaatgtgtccaaaaaaactccagtgtggttctaggatgagataataaaaacaggttgtctagggtagtgtggaaggtcctttcagtcttcctgtgcctatcagtgatcctcattgccatgttcccttctggtgctcaaccggaggctccctgacagatgagtcctctgccagaggaaggctaagatgtagaggacaaatcgtgtcaaggaaaagaagcttgaaggagctaagaatgcttagcttagagaagacaagaggaaacaggacatggctttgggaagttcaaggatggtccagtgaaatacatactatacttttgcaccccagctaagctgacccatgatcagtaagtaggaaataaaaggccaatttctggctactcttgcccccaaccccatttcagtgaactatgaacctctattagatatgcaaggccggtgctaaatgctggagggctttggccctttccctcaaggagctagtctagtagggggtcagaaatacagatgggcctgaacataatgatggtttgacttccagtttttcaactttaggattgtgcaaaagctatacacattcggtagaaacagtacttcaagtatccatacaatcagtacagtattcaataaattacatgagacattcaacactttattataaaataggctttgtgttagatgagtttgcccaactgtaagctaatgtaagtgatctgagtaggtttaaggtagcctaggtgtattaaatgcatttttcacttaacggtattttcaacttttgttgggtttattgggatgtagccccattataagctgaaaagcatctgtagtataataaatgtggggagtgctgtgagagaaataagtgtactgggtttagttcccactgcccaaaaaaggaactggctaatggtaacctgggggaggaagtcgggtaagttgcatggagaaggcaacccttgaacacttgcaaggagctaacaatacctgcttctggagtatttaaacgccagtgggtatgctaaatacttttacctcagaccacctactaaccttacaaagtagtccactttgctcacccagttttacagattgatgaaactgaagcagacagatattgttaacctatcaaaggtcaccctgcaagtgtgtgattatagtccaagcagcttgtacttgttgcctatttgttttgcctttcctgtgcatttgccaggcagatgagagtggggtaagacattgcagagaaaaagtaagaaaaggccgtcatgaaacaatttcattttcagaccttataagcacgttacaagtactgatatttatgcttaagttcacgggagtcctggccagaaataaagctggaaggacaagtggggggcagattgtgaaggatccttcaagacctgcttcctctagagaatgggagactacccaagataactaaacagggaagtgatcaggttttgtgtcttagaaaagtgttgcagtgttgatgcaaatgtgactagaagggtgacttggaacctggattgaaggggtgggagatgggagaaaggaatgcagtctggcagcagctacagcagtccaggtgggaaaacccagagcctgaactaaggttgtaactagaggggatagggtggaagagctggattagagatgttgacaagataaagtcagtaggacttaaagactgacaagtaaggattttccaaaagtgagagctgtggaatgaattgtcttaaaatgttgcagtgagttcctcctcatcaatccaagtgctcgatcagaggctagacctttagttagcagtcacgggaaaattccccattctcacggggatttagactaggtcttaaccatactttaccaagattccagtagcaaagcacccaaaagtaatcgcaataaaattccaatttttgtaggccgggcatagtggctcacacctgtaatcccagcactttgggaggccgaggcaggcggaccacgacatcaagagttcaagagcagcctggccagcatggtgaaaccccgtctctactaaaaatacaaaaaaattagctgggcatggtggcgcatgcctataatcctagctactcaggcagctgaagcaggagaattgcttgaacccgggaggcagaggttgcagtgagccaagatcatgccactacactccagcctgggcgacagagcgacactctgcctcaaaaaaaaaaaaaaacaaaaaaaaaaacaagttttgtgaatttaagtttccctaatggatggtacaggtcaacatttgccatctaatgacacttacattccagttttttccttttttgagtaactgggaaaagggtggcattactgctggcttcctaaaattgaaaagtatactagggtttttaaacctgtgtagaatacatgatatggtagcaaatgtgctgtaggaagaaaagcaatgaggaactactggcctgactaggaggcctagaagtccctcccaggcttgagttgttctgacttggcatgattacatagctgcggcaagtgacgtttccttcaagccttggttccctcatctgtaaaatagggaactaatacctacctcacaggattgtagttagaattaaggatgacttcattaaagcacctctagtggtggaagatgtcccatcctatcccccacccatagctgggagctatgtttggctcattcttcctgactcactggattacactgtgactcagttcaatttcacacatgctgctgctaaattagggtcttggtgagcctttgggaggacagctctgaggaatgaattgtagcactgcagccctgcctgaggaacatgatagaaacaggtggtaggcccagctcttgccttccacctactaagcagtttttctgtggttagctgtgtgacataaactatcggtgtattaatttgctttcactagattcccccccccccaacaacttagtccaagaacatacctgaattctttgcatttccttgccttagttgcttttgtagggtggacagcaggactgcatgagaatagctgtgcttctggaccctatggtgaaagctctagtgaactgcaattaggcccagggtcccggaggaagaaggggagagaaaaaggggggtagttttccaaaagataagtaggggacaaaaaagtccacggggcctatgagcggtgagactcctgccctgattgtggcaaagcacctggagatgatagaacttcctagggaaaaggctgcatggagtccccagggatgctgggccctggtcaccaaggctccctgggaaggtctcttgtacctggggcacacagaccaacacttctgaatttgcaagcttaagagcatgtatgagcagaacctgtgcagaccaaggcttagagggctcacctcaatgttttgcactgtgtgagaccccaggaccttttcgtgattctggagaggggaacaaaccataataacaacaaaccaggtagcaggatagagactcattctcatctattttggttaaaagaaaataaatgtatttcttccacacctgattttgtgattgcaaattcataactaatatccctcgtcagctccgctgactcatccctgccacagggaggttcacagcaagagcacagaaactagggccagtgcccggttgtgtgaccttgagtaagttctttttcccttgaacagggagagagacacaatggatcagagtgtctctgccagttctaacttggggattctagtgggttgaaccgaacggtagtccgtttccaaaagaggaagccaagaccagagggggagtggttccttcaagtttgcagaaccagtaagtggcagagcaggactcatatctagttagtggttcagagcatgggctccggagctagactgcctggatttgaaccctggctttgccacttgcctgttgggtgactttggacaagctgcttaaattatgtctccatttcctaatccacagaacaagtgtaatactagttatctgtttcatggagtgattgtgaggattaaataaagttaatataacacaaagca

SEQ ID NO: 142553 - DNA, 609 bp, Homo sapiens
  Payload ID: 8167
  Gene Symbol: IPO9
  Gene Name: importin 9
  ENST ID: ENST00000456707
  CDS Start-End: 1-468
tccaacgtcatggaggctaatgccgctcgccaggccactcctgcagagtggagtcaagatgactccaatgatatgtgggaggaccaggaggaggaagaggaggaggaggaggatggtttagctggccaacttttatctgacattcttgctacaagtaaatatgaggaggattactacgaggatgatgaggaagatgaccctgatgccctgaaggatcctctctatcagattgatctgcaggccaccttaatgacaatgagaggcgagttctacagaccatcggcatctaaaaaggggagcctttctacatttgctccttctgggccagccgcaaaccattttgcagccctcactggccttgagatgcactttcttctcaacctaaagtggcatcttgacccttggcccttggcctcggcagtgacactgatgacaattcagaccaggctcaccggtgccgtcacttaggaatgctggaacaaaggacatttctcaaagttcccctgaagacatgccatctctagaaccttttttctccccgactctacccccacctctgttcctagagccctctgctggcgagtccagaaacattattgcccagaagga

SEQ ID NO: 142554 - DNA, 1585 bp, Homo sapiens
  Payload ID: 8168
  Gene Symbol: INADL
  Gene Name: InaD-like (Drosophila)
  ENST ID: ENST00000307297
  CDS Start-End: 79-1437
agtctgtggtgaggatttgagctgcgtccagcattggatatttgtcaggaatgcagataccctgaagggaacacaacaatggtccaagggggtttcccagaaaaaatcagacaaagatatgcagatctgcctggagaactgcacattattgaacttgaaaaagataagaatggacttggactcagccttgctggtaataaagaccgatcacgcatgagcatatttgtggtgggaattaacccggaaggacctgctgccgcagatggacgaatgcgtattggagatgaactcttagagataaacaatcagattctgtatggaagaagtcaccaaaatgcatctgccattattaagactgccccatcaaaggtcaagctggttttcatcagaaacgaggatgcagtcaatcagatggccgttactccctttccagtgccatcaagttctccatcttctattgaggatcagagcggcaccgaacctattagtagtgaggaagatggcagcgtcgaagttggtattaaacaattgcctgaaagtgaaagcttcaaactggctgtcagccagatgaaacagcaaaaatatccaacaaaagtctccttcagttcacaagagataccattagcaccagcttcatcataccattcaacagatgcagacttcacaggctatggtggtttccaggctcctctgtcagtggaccccgcaacgtgtcccattgtccctggacaggaaatgattatagaaatatccaagggacgttcagggcttggtctcagcattgtgggaggaaaagacacacccttgttctggaggctgggaagtccaagagcatggagccagcatctggtgagggccttcatgctgcatcatcctgtgacagaagttgaagggcaaaatgctatagttatccatgaagtctatgaagaaggggcagcagccagagatggaagactttgggctggtgaccagatattagaggttaatggggttgacctgaggaactccagccacgaagaagccatcacagccctgaggcagaccccccagaaggtgcggctggtggtgtatagagatgaggcacactaccgggatgaggagaacttggagattttccctgtggatctgcagaagaaagctggccggggcctgggcctgagcatcgttgggaaacgaaatggaagcggagtgtttatttctgacatcgtgaaaggcggagccgcagacctggatgggagattgattcagggagatcagatcttatctgtgaatggggaggacatgagaaatgcctcacaggagacagtggccaccatcctcaagtgtgcacagggacttgtgcagctagagattggaagactccgagctggttcctggacctccgcaaggacgacatcacagaacagtcaggttgtcgatggcttctcatcagactgactcactcttctgcccccactgggagaaagttccccatttaataaatggttgtttggaaataatatctaatgtacagcatattcacagcaccaagtttagtgaactttcatgtgtttgaaataaaaatgaaaggtgggatggaaattca

SEQ ID NO: 142555 - DNA, 3657 bp, Homo sapiens
  Payload ID: 8168
  Gene Symbol: INADL
  Gene Name: InaD-like (Drosophila)
  Uniprot ID: Q8NI35
  ENST ID: ENST00000316485
  CDS Start-End: 115-3657
ctcacttccgcccaggtgaggcagggccgacaccgagcccgcccgacccgggctcccacctgctcctccagcgcaccaggtgtctttaagagtgattgaagagaataattcaaaatgcctgaaaatcctgctacagataaactgcaggtgctgcaggtacttgatcgcctgaaaatgaaattgcaggagaagggtgacacgtcgcagaatgagaagttatctatgttttatgagacactaaagagtcctctcttcaaccagatactcacacttcagcagtccatcaagcaactgaagggtcaactcaaccatataccctcagattgttcagccaactttgatttttctaggaaaggtttgttagtgttcacagatggttccatcactaatggaaatgtccacaggccctctaataactcgactgtatctgggttatttccgtggaccccgaagttgggaaatgaagactttaactcagtcattcaacagatggctcagggccggcaaattgaatatatagatatagaacggccttcaactggaggccttggattcagtgtggtggccctcagaagtcaaaatctcggaaaagttgatatcttcgtgaaggatgtccagccagggagtgtagcagacagggatcaaagattaaaggaaaatgatcaaatattggccattaatcacacgccattggatcagaacatttcccatcagcaagcaattgcattattacaacaaaccactggatctttgagactgattgtggccagggaaccagtccacacaaaaagcagtacttctagcagcctaaatgatacaactctgcctgaaacagtttgttggggccatgttgaagaggttgagctcattaatgatggctctggactaggttttggaatagttggaggaaaaacaagtggcgtggttgtgaggactatagttcctggaggattagcagatcgagatggaagactccagacaggggaccacatcttgaagattggtggcacaaacgtgcagggaatgaccagtgagcaagttgcacaagttctaaggaactgtgggaattcagtcaggatgctcgttgctagagatccagctggtgacatttcagtcaccccccctgcccctgcagccttacctgttgccctgcctactgtagccagcaagggccctggttctgacagttctctttttgaaacttataatgttgagcttgtgagaaaagatgggcagagtcttggaattagaattgttggctatgttggaacatctcatacaggggaagcttcagggatttatgtgaaaagtataatacctggcagtgctgcgtaccacaatggccacattcaagtgaatgacaaaatagttgctgtcgatggcgtgaacattcagggttttgccaaccatgatgttgttgaagtattacgaaatgcagggcaggtggtacacctaaccctagttcgaaggaagacatcctcatctacttctccacttgaaccaccttcagacagaggaactgttgtagaaccactgaaaccaccagctctctttctaactggagcagtggaaactgaaactaatgtggatggtgaagatgaggaaattaaagaaagaattgatactttaaaaaatgacaacatacaagccttagaaaaattggaaaaagtcccagactctccagaaaatgagctgaaatccagatgggaaaacctgttgggtcctgattatgaagtaatggttgctactttggacacacagattgcagatgatgctgagttacagaaatattcaaagctgctgcctattcacactctgaggcttggtgtggaagtggattcctttgatgggcaccattatatttcttcaattgtttctggtggtcctgttgatacattgggtctcctacagccagaagatgagctgcttgaggtcaatggcatgcagctttatggaaaatctcgccgagaagcagtctcctttcttaaagaagtgccacccccttttactttggtttgctgtcggaggttgtttgatgatgaagcttctgtagatgaaccaaggcgcactgaaacctctcttcctgagacagaggttgaccacaatatggatgtcaatactgaagaagatgatgatggggaattagcactgtggtcccctgaagtcaagattgttgaactagtaaaagattgtaaaggtttgggattcagcattttggattaccaggaccctttagatcctacaagatcagtgattgtgatccgctccctggtagcagatggtgtagcagaaagaagtgggggactattacctggagaccgcctggtctcagtcaatgaatactgtttggacaacacctcacttgctgaagctgtggaaatattgaaagctgtgccaccaggcctagtacaccttggcatctgtaagcctttggtggaagataatgaagaagaaagttgttatattttacattcaagcagtaatgaagacaagactgaattttcaggaacaattcatgatataaattcatctttaatactcgaagcacccaagggatttagagatgaaccatattttaaagaagaacttgtggatgaaccatttctagatctgggaaagtctttccattcccaacaaaaagagatagagcaaagcaaggaggcctgggagatgcatgaatttctgactcctagattgcaggaaatggatgaagaaagagaaattcttgttgatgaagaatatgagttatatcaagatccctcaccatccatggagttgtatcccttgtcgcacattcaagaggccactcctgtgccctctgtgaatgaacttcactttggtacacagtggttgcatgataatgaaccatccgagtctcaagaggcaagaaccgggaggactgtctattcccaggaggcacagccgtatggctattgccctgaaaatgtgatgaaagaaaattttgtcatggagtccctaccatctgtaccatcaactgaaggaaacagtcaacaaggcagatttgacgacctggaaaatcttaattcattagcaaaaactagtctggatttaggcatgatcccgaatgatgtccaaggtcctagcttgctcattgaccttcctgttgtggctcaaaggagggagcaagaagatttgcctttatatcaacaccaagcgacacgagttatttccaaggcctcagcatacacaggaatgttgtcttctagatatgccactgatacatgtgagttacctgagagagaagaaggcgaaggagaagaaactccaaattttagccactggggtccaccgagaattgttgagatttttagagaacccaatgtgtctcttgggatcagtattgttggtggacaaactgttataaaacgtctaaagaatggagaggagcttaaaggtatattcatcaaacaagttttagaagacagtccagcagggaagacgaacgcacttaaaactggagataaaatacttgaggtgtctggagtagatttgcagaatgcctcacacagcgaagcagttgaggccattaagaatgcaggaaaccctgtggtgttcattgttcagagtttgtcatccactccaccctggacgacagagcgagactctgtctcaaaaaaaaaaaaaagaaaagaaaga

SEQ ID NO: 142556 - DNA, 8505 bp, Homo sapiens
  Payload ID: 8168
  Gene Symbol: INADL
  Gene Name: InaD-like (Drosophila)
  Uniprot ID: Q8NI35
  ENST ID: ENST00000371158
  CDS Start-End: 115-5520
ctcacttccgcccaggtgaggcagggccgacaccgagcccgcccgacccgggctcccacctgctcctccagcgcaccaggtgtctttaagagtgattgaagagaataattcaaaatgcctgaaaatcctgctacagataaactgcaggtgctgcaggtacttgatcgcctgaaaatgaaattgcaggagaagggtgacacgtcgcagaatgagaagttatctatgttttatgagacactaaagagtcctctcttcaaccagatactcacacttcagcagtccatcaagcaactgaagggtcaactcaaccatataccctcagattgttcagccaactttgatttttctaggaaaggtttgttagtgttcacagatggttccatcactaatggaaatgtccacaggccctctaataactcgactgtatctgggttatttccgtggaccccgaagttgggaaatgaagactttaactcagtcattcaacagatggctcagggccggcaaattgaatatatagatatagaacggccttcaactggaggccttggattcagtgtggtggccctcagaagtcaaaatctcggaaaagttgatatcttcgtgaaggatgtccagccagggagtgtagcagacagggatcaaagattaaaggaaaatgatcaaatattggccattaatcacacgccattggatcagaacatttcccatcagcaagcaattgcattattacaacaaaccactggatctttgagactgattgtggccagggaaccagtccacacaaaaagcagtacttctagcagcctaaatgatacaactctgcctgaaacagtttgttggggccatgttgaagaggttgagctcattaatgatggctctggactaggttttggaatagttggaggaaaaacaagtggcgtggttgtgaggactatagttcctggaggattagcagatcgagatggaagactccagacaggggaccacatcttgaagattggtggcacaaacgtgcagggaatgaccagtgagcaagttgcacaagttctaaggaactgtgggaattcagtcaggatgctcgttgctagagatccagctggtgacatttcagtcaccccccctgcccctgcagccttacctgttgccctgcctactgtagccagcaagggccctggttctgacagttctctttttgaaacttataatgttgagcttgtgagaaaagatgggcagagtcttggaattagaattgttggctatgttggaacatctcatacaggggaagcttcagggatttatgtgaaaagtataatacctggcagtgctgcgtaccacaatggccacattcaagtgaatgacaaaatagttgctgtcgatggcgtgaacattcagggttttgccaaccatgatgttgttgaagtattacgaaatgcagggcaggtggtacacctaaccctagttcgaaggaagacatcctcatctacttctccacttgaaccaccttcagacagaggaactgttgtagaaccactgaaaccaccagctctctttctaactggagcagtggaaactgaaactaatgtggatggtgaagatgaggaaattaaagaaagaattgatactttaaaaaatgacaacatacaagccttagaaaaattggaaaaagtcccagactctccagaaaatgagctgaaatccagatgggaaaacctgttgggtcctgattatgaagtaatggttgctactttggacacacagattgcagatgatgctgagttacagaaatattcaaagctgctgcctattcacactctgaggcttggtgtggaagtggattcctttgatgggcaccattatatttcttcaattgtttctggtggtcctgttgatacattgggtctcctacagccagaagatgagctgcttgaggtcaatggcatgcagctttatggaaaatctcgccgagaagcagtctcctttcttaaagaagtgccacccccttttactttggtttgctgtcggaggttgtttgatgatgaagcttctgtagatgaaccaaggcgcactgaaacctctcttcctgagacagaggttgaccacaatatggatgtcaatactgaagaagatgatgatggggaattagcactgtggtcccctgaagtcaagattgttgaactagtaaaagattgtaaaggtttgggattcagcattttggattaccaggaccctttagatcctacaagatcagtgattgtgatccgctccctggtagcagatggtgtagcagaaagaagtgggggactattacctggagaccgcctggtctcagtcaatgaatactgtttggacaacacctcacttgctgaagctgtggaaatattgaaagctgtgccaccaggcctagtacaccttggcatctgtaagcctttggtggaagataatgaagaagaaagttgttatattttacattcaagcagtaatgaagacaagactgaattttcaggaacaattcatgatataaattcatctttaatactcgaagcacccaagggatttagagatgaaccatattttaaagaagaacttgtggatgaaccatttctagatctgggaaagtctttccattcccaacaaaaagagatagagcaaagcaaggaggcctgggagatgcatgaatttctgactcctagattgcaggaaatggatgaagaaagagaaattcttgttgatgaagaatatgagttatatcaagatccctcaccatccatggagttgtatcccttgtcgcacattcaagaggccactcctgtgccctctgtgaatgaacttcactttggtacacagtggttgcatgataatgaaccatccgagtctcaagaggcaagaaccgggaggactgtctattcccaggaggcacagccgtatggctattgccctgaaaatgtgatgaaagaaaattttgtcatggagtccctaccatctgtaccatcaactgaaggaaacagtcaacaaggcagatttgacgacctggaaaatcttaattcattagcaaaaactagtctggatttaggcatgatcccgaatgatgtccaaggtcctagcttgctcattgaccttcctgttgtggctcaaaggagggagcaagaagatttgcctttatatcaacaccaagcgacacgagttatttccaaggcctcagcatacacaggaatgttgtcttctagatatgccactgatacatgtgagttacctgagagagaagaaggcgaaggagaagaaactccaaattttagccactggggtccaccgagaattgttgagatttttagagaacccaatgtgtctcttgggatcagtattgttggtggacaaactgttataaaacgtctaaagaatggagaggagcttaaaggtatattcatcaaacaagttttagaagacagtccagcagggaagacgaacgcacttaaaactggagataaaatacttgaggtgtctggagtagatttgcagaatgcctcacacagcgaagcagttgaggccattaagaatgcaggaaaccctgtggtgttcattgttcagagtttgtcatccactccacgagtcattcctaacgtacataacaaggccaacaaaatcaccggtaaccagaaccaggacacccaagaaaagaaagaaaagaggcaaggaactgctccaccgccaatgaaacttcctcctccttataaagctctgactgatgacagtgatgaaaatgaagaagaagatgcctttaccgaccaaaaaatcagacaaagatatgcagatctgcctggagaactgcacattattgaacttgaaaaagataagaatggacttggactcagccttgctggtaataaagaccgatcacgcatgagcatatttgtggtgggaattaacccggaaggacctgctgccgcagatggacgaatgcgtattggagatgaactcttagagataaacaatcagattctgtatggaagaagtcaccaaaatgcatctgccattattaagactgccccatcaaaggtcaagctggttttcatcagaaacgaggatgcagtcaatcagatggccgttactccctttccagtgccatcaagttctccatcttctattgaggatcagagcggcaccgaacctattagtagtgaggaagatggcagcgtcgaagttggtattaaacaattgcctgaaagtgaaagcttcaaactggctgtcagccagatgaaacagcaaaaatatccaacaaaagtctccttcagttcacaagagataccattagcaccagcttcatcataccattcaacagatgcagacttcacaggctatggtggtttccaggctcctctgtcagtggaccccgcaacgtgtcccattgtccctggacaggaaatgattatagaaatatccaagggacgttcagggcttggtctcagcattgtgggaggaaaagacacacccttgaatgctatagttatccatgaagtctatgaagaaggggcagcagccagagatggaagactttgggctggtgaccagatattagaggttaatggggttgacctgaggaactccagccacgaagaagccatcacagccctgaggcagaccccccagaaggtgcggctggtggtgtatagagatgaggcacactaccgggatgaggagaacttggagattttccctgtggatctgcagaagaaagctggccggggcctgggcctgagcatcgttgggaaacgaaatggaagcggagtgtttatttctgacatcgtgaaaggcggagccgcagacctggatgggagattgattcagggagatcagatcttatctgtgaatggggaggacatgagaaatgcctcacaggagacagtggccaccatcctcaagtgtgcacagggacttgtgcagctagagattggaagactccgagctggttcctggacctccgcaaggacgacatcacagaacagtcagggtagtcagcagagtgcacacagcagctgtcatccctccttcgctcctgtcatcactggcctgcaaaacctggttggcacaaaaagagtttcagatccttcccagaaaaattcaggcacagatatggaaccaaggactgttgagataaacagggagctcagtgatgcccttggaatcagtattgctggaggaagaggaagtcccttaggagatatccccgtatttattgccatgattcaggctagcggagtggccgcacggacacagaagcttaaagttggagatcggattgtcagcattaacgggcaacctttggatgggctgtctcacgcggatgtggttaatctgctgaagaacgcctacgggcgcattatcctgcaggttgtagcagataccaatataagcgccatagcagctcagcttgaaaacatgtctacaggctaccaccttggttcgcccactgctgaacaccatccagaagacacagaggagcagctgcagatgacggccgattaaaacgaggggatcagattttagctgttaatggcgagaccctggaaggtgttactcatgagcaagcagtcgccattctaaaacaccagagagggactgtaaccttaactgtgctgtcatgagcctcgggcctgatcacaagatagatgttgttgtttagaatatccacaggcagatgaagttctgagtgggtatgaaaagcaccctcaactaaaatgcaccttcattcttatttcttgccctctctgctcaggagaaatggctgaggtttcatgtgaatttcccaaatcaacaatcatctcctaatgtttcccagttcctgtcacctgttggcgaggttgatttctaaaacttaaatgagtctacctgttttgcatttaatttcagtgttccgatttctttttttttttttttttttttttttgagacggagtctcactctgtcacccaggctggagtgcaatggcgcaatcttggctcactgcaacctcggcctcccaggttggagcgattctcctgcctcagcctcccgagtagctgggattacaggcatgcatcaccacactgggtttatttttgtttttttagtagagatggagcttccccatgtgggccaggctggtcttgaacttctgacctcaggtgatctgcctgccttggcctcccaaagtgctgggattccaggcgtgagccactgcgcccagcccagtattctgattttaaccaactggttctgattatatttaccaaaactggagttaacttctctttccttatactcttctctccctatcccctactcacaccgaggcttaacagcaacctcagatctcatccaatggacagaaacaaatgttaagcaacttgtcatctcactcatgatttacttatgctaattgtctcttcaagtaagcaagaaaacattagcagtgtaattaatttaccagtgatccccaagatgaaataccagattctcctatgggaaattactgtgctgtcttctgtatgacttatggtcaaataagtctcaaattcatttctctggatagatctttatatgctagtcattggtgattttgatgagtcaatttacagactgtaatcttctaaaaattctgaaagactaattgttttctgtgccatataaatgcataccactgagcaaatgaaccttattctcagcaggaacaactagcatacatgttctgaattctaacagtgctaaattacattcaagtccaggaagatcacctggaattaatggcatttcagttggcaggcatcattcccacccctcggtcttaggaaaaggaggtagaagccccagaaccacacggcagagatcagcaagttttgtctcaagtcagacaaggtctaggtggccttggccttatgcaaagtgggtgacatatttgattatatttccctttacctccatagtagtcaggccagcagcatggactgcaagaacctaagggagcaacatacttagctgcaaagtgagcaaatgaattgagcctaggaatatgtgatgaaaatgcatggctgatgtttcctgatctccaaggagactcccatttgctgaagttttgcatgctaagaaatcaactacagcagaaaatacaagaatacctttaagttgattattggcaatcttattcatatattagcaagaaaaagggagagatgcttactggtggatgctatagagtcctctgtttttaaaagtaccatggccgggtgcagtggctcacgcctgtaatcccagcactttgggaggccagggcaggcgaatcatgaggtcaggagttcgagaccagcctggccaatatggtgaaaccctgtctctactaaaaatacaaaaattagctgggtgcagtggcaggcgcctgtaatcccagctactccggaggttgaagcaggaaaattgcttgaacctgggaggtggaggttgcagtgagccaagttcgtgccactccactccagcctgggtgacagagcaagactctgtctcgaaaaagaaaaaaaaccatgaaggatgagtactagagtcagtaatagaagtagttcagcattatttaactacaacacaatgctgcaaatatttcacagtaattatcaaaatttaatgggctctaatttaaaatgttatttaataagtatagattttaattgagaattatctttgagtagatgtaatcacaaagtgcattaactcttgttggaatattttatggctattccaaagtatagagtgcctaaattttgtgttgaaaatgtctttcatgacggtattaagttttctgaaattacacatggcttttaaaatttctaatgtatccaagatgtgcaatgttgttaggatctcattcttcagtgcatgaaaagctactaccctcagaacattttgtgttaattgtacctgcaagaacacctcaggcaagccaagaagaaatgaaacccaaataaaacttgaaaatgcaccttaaaaatatatatacatataatagttttgaaatgggattctgctttattttgatggaatggccattaaatacacattttgagataatacattgttgtggtgtttctttatacattatccttttaggtcgtgctagtaaaagtatattgatgaaggaattatgatgctttatacttcttactgcactaaattgatagaactagtacttgtcataatcggttctgtctccgctcacatgactaatacgtaattgcctttccaaaaagatatttttgcctcagaacttactgacaagctgagaggctatgaagatggaaatttgtgaaagaagtagtgctcttatatttggcctcatcatttgggccatttcagtatagtaatgatatcactaatcggaattagcatgagagggaagtaagccaggaagaataaaactgctgaatgtttgtatgtgtaagatatttccaaagattctaaataaatgtagttgcctacagagcaaa

SEQ ID NO: 142557 - DNA, 4990 bp, Homo sapiens
  Payload ID: 8168
  Gene Symbol: INADL
  Gene Name: InaD-like (Drosophila)
  Uniprot ID: Q8NI35
  ENST ID: ENST00000484937
  CDS Start-End: 13-3417
gattatgaagtaatggttgctactttggacacacagattgcagatgatgctgagttacagaaatattcaaagctgctgcctattcacactctgaggcttggtgtggaagtggattcctttgatgggcaccattatatttcttcaattgtttctggtggtcctgttgatacattgggtctcctacagccagaagatgagctgcttgaggtcaatggcatgcagctttatggaaaatctcgccgagaagcagtctcctttcttaaagaagtgccacccccttttactttggtttgctgtcggaggttgtttgatgatgaagcttctgtagatgaaccaaggcgcactgaaacctctcttcctgagacagaggttgaccacaatatggatgtcaatactgaagaagatgatgatggggaattagcactgtggtcccctgaagtcaagattgttgaactagtaaaagattgtaaaggtttgggattcagcattttggattaccaggaccctttagatcctacaagatcagtgattgtgatccgctccctggtagcagatggtgtagcagaaagaagtgggggactattacctggagaccgcctggtctcagtcaatgaatactgtttggacaacacctcacttgctgaagctgtggaaatattgaaagctgtgccaccaggcctagtacaccttggcatctgtaagcctttggtggaagataatgaagaagaaagttgttatattttacattcaagcagtaatgaagacaagactgaattttcaggaacaattcatgatataaattcatctttaatactcgaagcacccaagggatttagagatgaaccatattttaaagaagaacttgtggatgaaccatttctagatctgggaaagtctttccattcccaacaaaaagagatagagcaaagcaaggaggcctgggagatgcatgaatttctgactcctagattgcaggaaatggatgaagaaagagaaattcttgttgatgaagaatatgagttatatcaagatccctcaccatccatggagttgtatcccttgtcgcacattcaagaggccactcctgtgccctctgtgaatgaacttcactttggtacacagtggttgcatgataatgaaccatccgagtctcaagaggcaagaaccgggaggactgtctattcccaggaggcacagccgtatggctattgccctgaaaatgtgatgaaagaaaattttgtcatggagtccctaccatctgtaccatcaactgaaggaaacagtcaacaaggcagatttgacgacctggaaaatcttaattcattagcaaaaactagtctggatttaggcatgatcccgaatgatgtccaaggtcctagcttgctcattgaccttcctgttgtggctcaaaggagggagcaagaagatttgcctttatatcaacaccaagcgacacgagttatttccaaggcctcagcatacacaggaatgttgtcttctagatatgccactgatacatgtgagttacctgagagagaagaaggcgaaggagaagaaactccaaattttagccactggggtccaccgagaattgttgagatttttagagaacccaatgtgtctcttgggatcagtattgttggtggacaaactgttataaaacgtctaaagaatggagaggagcttaaaggtatattcatcaaacaagttttagaagacagtccagcagggaagacgaacgcacttaaaactggagataaaatacttgaggtgtctggagtagatttgcagaatgcctcacacagcgaagcagttgaggccattaagaatgcaggaaaccctgtggtgttcattgttcagagtttgtcatccactccacgagtcattcctaacgtacataacaaggccaacaaaatcaccggtaaccagaaccaggacacccaagaaaagaaagaaaagaggcaaggaactgctccaccgccaatgaaacttcctcctccttataaagctctgactgatgacagtgatgaaaatgaagaagaagatgcctttaccgaccaaaaaatcagacaaagatatgcagatctgcctggagaactgcacattattgaacttgaaaaagataagaatggacttggactcagccttgctggtaataaagaccgatcacgcatgagcatatttgtggtgggaattaacccggaaggacctgctgccgcagatggacgaatgcgtattggagatgaactcttagagataaacaatcagattctgtatggaagaagtcaccaaaatgcatctgccattattaagactgccccatcaaaggtcaagctggttttcatcagaaacgaggatgcagtcaatcagatggccgttactccctttccagtgccatcaagttctccatcttctattgaggatcagagcggcaccgaacctattagtagtgaggaagatggcagcgtcgaagttggtattaaacaattgcctgaaagtgaaagcttcaaactggctgtcagccagatgaaacagcaaaaatatccaacaaaagtctccttcagttcacaagagataccattagcaccagcttcatcataccattcaacagatgcagacttcacaggctatggtggtttccaggctcctctgtcagtggaccccgcaacgtgtcccattgtccctggacaggaaatgattatagaaatatccaagggacgttcagggcttggtctcagcattgtgggaggaaaagacacacccttgaatgctatagttatccatgaagtctatgaagaaggggcagcagccagagatggaagactttgggctggtgaccagatattagaggttaatggggttgacctgaggaactccagccacgaagaagccatcacagccctgaggcagaccccccagaaggtgcggctggtggtgtatagagatgaggcacactaccgggatgaggagaacttggagattttccctgtggatctgcagaagaaagctggccggggcctgggcctgagcatcgttgggaaacgaaatggaagcggagtgtttatttctgacatcgtgaaaggcggagccgcagacctggatgggagattgattcagggagatcagatcttatctgtgaatggggaggacatgagaaatgcctcacaggagacagtggccaccatcctcaagtgtgcacagggacttgtgcagctagagattggaagactccgagctggttcctggacctccgcaaggacgacatcacagaacagtcagtcagcagagtgcacacagcagctgtcatccctccttcgctcctgtcatcactggcctgcaaaacctggttggcacaaaaagagtttcagatccttcccagaaaaattcaggcacagatatggaaccaaggactgttgagataaacagggagctcagtgatgcccttggaatcagtattgctggaggaagaggaagtcccttaggagatatccccgtatttattgccatgattcaggctagcggagtggccgcacggacacagaagcttaaagttggagatcggattgtcagcattaacgggcaacctttggatgggctgtctcacgcggatgtggttaatctgctgaagaacgcctacgggcgcattatcctgcaggttgtagcagataccaatataagcgccatagcagctcagcttgaaaacatgtctacaggctaccaccttggttcgcccactgctgaacaccatccagaagacacagaaacacctccacctaagattattactttggagaaaggctctgaaggcttggggtttagtattgtagggggttatggaagtccccatggagacctgccaatttatgtcaagactgtatttgcaaagggagcagctgcagatgacggccgattaaaacgaggggatcagattttagctgttaatggcgagaccctggaaggtgttactcatgagcaagcagtcgccattctaaaacaccagagagggactgtaaccttaactgtgctgtcatgagcctcgggcctgatcacaagatagatgttgttgtttagaatatccacaggcagatgaagttctgagtgggtatgaaaagcaccctcaactaaaatgcaccttcattcttatttcttgccctctctgctcaggagaaatggctgaggtttcatgtgaatttcccaaatcaacaatcatctcctaatgtttcccagttcctgtcacctgttggcgaggttgatttctaaaacttaaatgagtctacctgttttgcatttaatttcagtgttccgatttctttttttttttttttttttttttttgagacggagtctcactctgtcacccaggctggagttgcagtgagccaagttcgtgccactccactccagcctgggtgacagagcaagactctgtctcgaaaaagaaaaaaaaccatgaaggatgagtactagagtcagtaatagaagtagttcagcattatttaactacaacacaatgctgcaaatatttcacagtaattatcaaaatttaatgggctctaatttaaaatgttatttaataagtatagattttaattgagaattatctttgagtagatgtaatcacaaagtgcattaactcttgttggaatattttatggctattccaaagtatagagtgcctaaattttgtgttgaaaatgtctttcatgacggtattaagttttctgaaattacacatggcttttaaaatttctaatgtatccaagatgtgcaatgttgttaggatctcattcttcagtgcatgaaaagctactaccctcagaacattttgtgttaattgtacctgcaagaacacctcaggcaagccaagaagaaatgaaacccaaataaaacttgaaaatgcaccttaaaaatatatatacatataatagttttgaaatgggattctgctttattttgatggaatggccattaaatacacattttgagataa

SEQ ID NO: 142558 - DNA, 4172 bp, Homo sapiens
  Payload ID: 8168
  Gene Symbol: INADL
  Gene Name: InaD-like (Drosophila)
  ENST ID: ENST00000613764
  CDS Start-End: 98-3646
gaggcagggccgacaccgagcccgcccgacccgggctcccacctgctcctccagcgcaccaggtgtctttaagagtgattgaagagaataattcaaaatgcctgaaaatcctgctacagataaactgcaggtgctgcaggtacttgatcgcctgaaaatgaaattgcaggagaagggtgacacgtcgcagaatgagaagttatctatgttttatgagacactaaagagtcctctcttcaaccagatactcacacttcagcagtccatcaagcaactgaagggtcaactcaaccatataccctcagattgttcagccaactttgatttttctaggaaaggtttgttagtgttcacagatggttccatcactaatggaaatgtccacaggccctctaataactcgactgtatctgggttatttccgtggaccccgaagttgggaaatgaagactttaactcagtcattcaacagatggctcagggccggcaaattgaatatatagatatagaacggccttcaactggaggccttggattcagtgtggtggccctcagaagtcaaaatctcggaaaagttgatatcttcgtgaaggatgtccagccagggagtgtagcagacagggatcaaagattaaaggaaaatgatcaaatattggccattaatcacacgccattggatcagaacatttcccatcagcaagcaattgcattattacaacaaaccactggatctttgagactgattgtggccagggaaccagtccacacaaaaagcagtacttctagcagcctaaatgatacaactctgcctgaaacagtttgttggggccatgttgaagaggttgagctcattaatgatggctctggactaggttttggaatagttggaggaaaaacaagtggcgtggttgtgaggactatagttcctggaggattagcagatcgagatggaagactccagacaggggaccacatcttgaagattggtggcacaaacgtgcagggaatgaccagtgagcaagttgcacaagttctaaggaactgtgggaattcagtcaggatgctcgttgctagagatccagctggtgacatttcagtcaccccccctgcccctgcagccttacctgttgccctgcctactgtagccagcaagggccctggttctgacagttctctttttgaaacttataatgttgagcttgtgagaaaagatgggcagagtcttggaattagaattgttggctatgttggaacatctcatacaggggaagcttcagggatttatgtgaaaagtataatacctggcagtgctgcgtaccacaatggccacattcaagtgaatgacaaaatagttgctgtcgatggcgtgaacattcagggttttgccaaccatgatgttgttgaagtattacgaaatgcagggcaggtggtacacctaaccctagttcgaaggaagacatcctcatctacttctccacttgaaccaccttcagacagaggaactgttgtagaaccactgaaaccaccagctctctttctaactggagcagtggaaactgaaactaatgtggatggtgaagatgaggaaattaaagaaagaattgatactttaaaaaatgacaacatacaagccttagaaaaattggaaaaagtcccagactctccagaaaatgagctgaaatccagatgggaaaacctgttgggtcctgattatgaagtaatggttgctactttggacacacagattgcagatgatgctgagttacagaaatattcaaagctgctgcctattcacactctgaggcttggtgtggaagtggattcctttgatgggcaccattatatttcttcaattgtttctggtggtcctgttgatacattgggtctcctacagccagaagatgagctgcttgaggtcaatggcatgcagctttatggaaaatctcgccgagaagcagtctcctttcttaaagaagtgccacccccttttactttggtttgctgtcggaggttgtttgatgatgaagcttctgtagatgaaccaaggcgcactgaaacctctcttcctgagacagaggttgaccacaatatggatgtcaatactgaagaagatgatgatggggaattagcactgtggtcccctgaagtcaagattgttgaactagtaaaagattgtaaaggtttgggattcagcattttggattaccaggaccctttagatcctacaagatcagtgattgtgatccgctccctggtagcagatggtgtagcagaaagaagtgggggactattacctggagaccgcctggtctcagtcaatgaatactgtttggacaacacctcacttgctgaagctgtggaaatattgaaagctgtgccaccaggcctagtacaccttggcatctgtaagcctttggtggaagataatgaagaagaaagttgttatattttacattcaagcagtaatgaagacaagactgaattttcaggaacaattcatgatataaattcatctttaatactcgaagcacccaagggatttagagatgaaccatattttaaagaagaacttgtggatgaaccatttctagatctgggaaagtctttccattcccaacaaaaagagatagagcaaagcaaggaggcctgggagatgcatgaatttctgactcctagattgcaggaaatggatgaagaaagagaaattcttgttgatgaagaatatgagttatatcaagatccctcaccatccatggagttgtatcccttgtcgcacattcaagaggccactcctgtgccctctgtgaatgaacttcactttggtacacagtggttgcatgataatgaaccatccgagtctcaagaggcaagaaccgggaggactgtctattcccaggaggcacagccgtatggctattgccctgaaaatgtgatgaaagaaaattttgtcatggagtccctaccatctgtaccatcaactgaaggaaacagtcaacaaggcagatttgacgacctggaaaatcttaattcattagcaaaaactagtctggatttaggcatgatcccgaatgatgtccaaggtcctagcttgctcattgaccttcctgttgtggctcaaaggagggagcaagaagatttgcctttatatcaacaccaagcgacacgagttatttccaaggcctcagcatacacaggaatgttgtcttctagatatgccactgatacatgtgagttacctgagagagaagaaggcgaaggagaagaaactccaaattttagccactggggtccaccgagaattgttgagatttttagagaacccaatgtgtctcttgggatcagtattgttggtggacaaactgttataaaacgtctaaagaatggagaggagcttaaaggtatattcatcaaacaagttttagaagacagtccagcagggaagacgaacgcacttaaaactggagataaaatacttgaggcttctggagtagataaagaattgtgtaatcagtttgtgtccccagctgagggcaggaaaattgctacctgggaggtgtgcagtgagccaagttcgtgccactccactccagcctgggtgacagagcaagactctgtctcgaaaaagaaaaaaaaccatgaaggatgagtactagagtcagtaatagaagtagttcagcattatttaactacaacacaatgctgcaaatatttcacagtaattatcaaaatttaatgggctctaatttaaaatgttatttaataagtatagattttaattgagaattatctttgagtagatgtaatcacaaagtgcattaactcttgttggaatattttatggctattccaaagtatagagtgcctaaattttgtgttgaaaatgtctttcatgacggtattaagttttctgaaattacacatggcttttaaaatttctaatgtatccaagatgtgcaatgttgttaggatctcattcttcagtgcatgaaaagctactaccctcagaacattttgtgttaattgtacctgcaagaacacctcaggcaagccaagaagaaatgaaacccaaataaaacttgaaaatgcaccttaaaaatatatatacatataatagttttgaaatgggattctgctttattttgatggaatggccattaaatacacattttgag

SEQ ID NO: 142559 - DNA, 569 bp, Homo sapiens
  Payload ID: 8168
  Gene Symbol: INADL
  Gene Name: InaD-like (Drosophila)
  ENST ID: ENST00000465798
  CDS Start-End: 1-419
aagccatcacagccctgaggcagaccccccagaaggtgcggctggtggtgtatagagatgaggcacactaccgggatgaggagaacttggagattttccctgtggatctgcagaagaaagctggccggggcctgggcctgagcatcgttgggaaacgaaatggaagcggagtgtttatttctgacatcgtgaaaggcggagccgcagacctggatgggagattgattcagggagatcagatcttatctgtgaatggggaggacatgagaaatgcctcacaggagacagtggccaccatcctcaagtgtgcacagggacttgtgcagctagagattggaagactccgagctggttcctggacctccgcaaggacgacatcacagaacagtcaggttgtcgatggcttctcatcagactgactcactcttctgcccccactgggagaaagttccccatttaataaatggttgtttggaaataatatctaatgtacagcatattcacagcaccaagtttagtgaactttcatgtgtttgaaataaaaatgaaaggtgggatggaaattcatt

SEQ ID NO: 142560 - DNA, 2298 bp, Homo sapiens
  Payload ID: 8168
  Gene Symbol: INADL
  Gene Name: InaD-like (Drosophila)
  ENST ID: ENST00000635137
  CDS Start-End: 316-2097
atccaagggtctgatgtgggaaaccagggattttgcttctccggcatagttttccaggcagctttcacctgctgacagaggtgactgtttagcttgaggactagcttgaaattagcttaattgattgcttttcctgatataaatagattgacaggttgcccttaaagagaacaaaatctgagagagagagagagagagagagagaaaaataggcccaaggtcgtcagaagagagaggagtctgtggtgaggatttgagctgcgtccagcattggatatttgtcaggaatgcagataccctgaagggaacacaacaatggtccaagggggtttcccagaaaaaatcagacaaagatatgcagatctgcctggagaactgcacattattgaacttgaaaaagataagaatggacttggactcagccttgctggtaataaagaccgatcacgcatgagcatatttgtggtgggaattaacccggaaggacctgctgccgcagatggacgaatgcgtattggagatgaactcttagagataaacaatcagattctgtatggaagaagtcaccaaaatgcatctgccattattaagactgccccatcaaaggtcaagctggttttcatcagaaacgaggatgcagtcaatcagatggccgttactccctttccagtgccatcaagttctccatcttctattgaggatcagagcggcaccgaacctattagtagtgaggaagatggcagcgtcgaagttggtattaaacaattgcctgaaagtgaaagcttcaaactggctgtcagccagatgaaacagcaaaaatatccaacaaaagtctccttcagttcacaagagataccattagcaccagcttcatcataccattcaacagatgcagacttcacaggctatggtggtttccaggctcctctgtcagtggaccccgcaacgtgtcccattgtccctggacaggaaatgattatagaaatatccaagggacgttcagggcttggtctcagcattgtgggaggaaaagacacacccttgaatgctatagttatccatgaagtctatgaagaaggggcagcagccagagatggaagactttgggctggtgaccagatattagaggttaatggggttgacctgaggaactccagccacgaagaagccatcacagccctgaggcagaccccccagaaggtgcggctggtggtgtatagagatgaggcacactaccgggatgaggagaacttggagattttccctgtggatctgcagaagaaagctggccggggcctgggcctgagcatcgttgggaaacgaaatggaagcggagtgtttatttctgacatcgtgaaaggcggagccgcagacctggatgggagattgattcagggagatcagatcttatctgtgaatggggaggacatgagaaatgcctcacaggagacagtggccaccatcctcaagtgtgcacagggacttgtgcagctagagattggaagactccgagctggttcctggacctccgcaaggacgacatcacagaacagtcagggtagtcagcagagtgcacacagcagctgtcatccctccttcgctcctgtcatcactggcctgcaaaacctggttggcacaaaaagagtttcagatccttcccagaaaaattcaggcacagatatggaaccaaggactgttgagataaacagggagctcagtgatgcccttggaatcagtattgctggaggaagaggaagtcccttaggagatatccccgtatttattgccatgattcaggctagcggagtggccgcacggacacagaagcttaaagttggagatcggattgtcagcattaacgggcaacctttggatgggctgtctcacgcggatgtggttaatctgctgaagaacgcctacgggcgcattatcctgcaggttgtagcagataccaatataagcgccatagcagctcagcttgaaaacatgtctacaggctaccaccttggttcgcccactgctgaacaccatccagaagacacagagagatgctgtaattgcccaatggattcaccttgcccactgctgttggggtgatcagacccaacaccaggtcatggggacgacgaagtccggcggagtcaaaggaatgattaaaaagacagtttgagagaagtgggcccagggggccatcgtgtgaggctgcgaaggccccaagctctgggagcccacgctatttattggtgctcaaagaaacaggtggtgaggatgtggggtttgaaaagaaacagtgtatca

SEQ ID NO: 142561 - DNA, 701 bp, Homo sapiens
  Payload ID: 8168
  Gene Symbol: INADL
  Gene Name: InaD-like (Drosophila)
  ENST ID: ENST00000494842
  CDS Start-End: 1-439
tgttcagagtttgtcatccactccacgagtcattcctaacgtacataacaaggccaacaaaatcaccggtaaccagaaccaggacacccaagaaaagaaagaaaagaggcaaggaactgctccaccgccaatgaaacttcctcctccttataaagctctgactgatgacagtgatgaaaatgaagaagaagatgcctttaccgaccaaaaaatcagacaaagatatgcagatctgcctggagaactgcacattattgaacttgaaaaagataagaatggacttggactcagccttgctggtaataaagaccgatcacgcatgagcatatttgtggtgggaattaacccggaaggacctgctgccgcagatggacgaatgcgtattggagatgaactcttagagactctgactcagaatagaatttacagtcatccataattttacttgcctaataataactactgccacagctggccaggtgcaacaggaagaccatcgccatcaactctttcttccaaaccttggttgcttctccccacttaaaacctgtttctgcaaagaagtcacttccaggattacttttcttttcttgttcttttataatatagcaccacgaatgggacccacattgggtcgtaacactgactagcataatcattacataaataaagtcaaagatgaccttatgtaaccaatatta

SEQ ID NO: 142562 - DNA, 5242 bp, Homo sapiens
  Payload ID: 8168
  Gene Symbol: INADL
  Gene Name: InaD-like (Drosophila)
  ENST ID: ENST00000635023
  CDS Start-End: 47-2098
cagcgcaccaggtgtctttaagagtgattgaagagaataattcaaaatgcctgaaaatcctgctacagataaactgcaggtgctgcaggtacttgatcgcctgaaaatgaaattgcaggagaagggtgacacgtcgcagaatgagaagttatctatgttttatgagacactaaagagtcctctcttcaaccagatactcacacttcagcagtccatcaagcaactgaagggtcaactcaaccatataccctcagattgttcagccaactttgatttttctaggaaaggtttgttagtgttcacagatggttccatcactaatggaaatgtccacaggccctctaataactcgactgtatctgggttatttccgtggaccccgaagttgggaaatgaagactttaactcagtcattcaacagatggctcagggccggcaaattgaatatatagatatagaacggccttcaactggaggccttggattcagtgtggtggccctcagaagtcaaaatctcggaaaagttgatatcttcgtgaaggatgtccagccagggagtgtagcagacagggatcaaagattaaaggaaaatgatcaaatattggccattaatcacacgccattggatcagaacatttcccatcagcaagcaattgcattattacaacaaaccactggatctttgagactgattgtggccagggaaccagtccacacaaaaagcagtacttctagcagcctaaatgatacaactctgcctgaaacagtttgttggggccatgttgaagaggttgagctcattaatgatggctctggactaggttttggaatagttggaggaaaaacaagtggcgtggttgtgaggactatagttcctggaggattagcagatcgagatggaagactccagacaggggaccacatcttgaagattggtggcacaaacgtgcagggaatgaccagtgagcaagttgcacaagttctaaggaactgtgggaattcagtcaggatgctcgttgctagagatccagctggtgacatttcagtcaccccccctgcccctgcagccttacctgttgccctgcctactgtagccagcaagggccctggttctgacagttctctttttgaaacttataatgttgagcttgtgagaaaagatgggcagagtcttggaattagaattgttggctatgttggaacatctcatacaggggaagcttcagggatttatgtgaaaagtataatacctggcagtgctgcgtaccacaatggccacattcaagtgaatgacaaaatagttgctgtcgatggcgtgaacattcagggttttgccaaccatgatgttgttgaagtattacgaaatgcagggcaggtggtacacctaaccctagttcgaaggaagacatcctcatctacttctccacttgaaccaccttcagacagaggaactgttgtagaaccactgaaaccaccagctctctttctaactggagcagtggaaactgaaactaatgtggatggtgaagatgaggaaattaaagaaagaattgatactttaaaaaatgacaacatacaagccttagaaaaattggaaaaagtcccagactctccagaaaatgagctgaaatccagatgggaaaacctgttgggtcctgattatgaagtaatggttgctactttggacacacagattgcagatgatgctgagttacagaaatattcaaagctgctgcctattcacactctgaggcttggtgtggaagtggattcctttgatgggcaccattatatttcttcaattgtttctggtggtcctgttgatacattgggtctcctacagccagaagatgagctgcttgaggtcaatggcatgcagctttatggaaaatctcgccgagaagcagtctcctttcttaaagaagtgccacccccttttactttggtttgctgtcggaggttgtttgatgatgaagcttctgtagatgaaccaaggcgcactgaaacctctcttcctgagacagagaactcattgaagtataagaggttgaccacaatatggatgtcaatactgaagaagatgatgatggggaattagcactgtggtcccctgaagtcaagattgttgaactagtaaaagattgtaaaggtttgggattcagcattttggattaccaggaccctttagatcctacaagatcagtgattgtgatccgctccctggtagcagatggtgtagcagaaagaagtgggggactattacctggagaccgcctggtctcagtcaatgaatactgtttggacaacacctcacttgctgaagctgtggaaatattgaaagctgtgccaccaggcctagtacaccttggcatctgtaagcctttggtggaagataatgaagaagaaagttgttatattttacattcaagcagtaatgaagacaagactgaattttcaggaacaattcatgatataaattcatctttaatactcgaagcacccaagggatttagagatgaaccatattttaaagaagaacttgtggatgaaccatttctagatctgggaaagtctttccattcccaacaaaaagagatagagcaaagcaaggaggcctgggagatgcatgaatttctgactcctagattgcaggaaatggatgaagaaagagaaattcttgttgatgaagaatatgagttatatcaagatccctcaccatccatggagttgtatcccttgtcgcacattcaagaggccactcctgtgccctctgtgaatgaacttcactttggtacacagtggttgcatgataatgaaccatccgagtctcaagaggcaagaaccgggaggactgtctattcccaggaggcacagccgtatggctattgccctgaaaatgtgatgaaagaaaattttgtcatggagtccctaccatctgtaccatcaactgaaggaaacagtcaacaaggcagatttgacgacctggaaaatcttaattcattagcaaaaactagtctggatttaggcatgatcccgaatgatgtccaaggtcctagcttgctcattgaccttcctgttgtggctcaaaggagggagcaagaagatttgcctttatatcaacaccaagcgacacgagttatttccaaggcctcagcatacacaggaatgttgtcttctagatatgccactgatacatgtgagttacctgagagagaagaaggcgaaggagaagaaactccaaattttagccactggggtccaccgagaattgttgagatttttagagaacccaatgtgtctcttgggatcagtattgttggtggacaaactgttataaaacgtctaaagaatggagaggagcttaaaggtatattcatcaaacaagttttagaagacagtccagcagggaagacgaacgcacttaaaactggagataaaatacttgaggtgtctggagtagatttgcagaatgcctcacacagcgaagcagttgaggccattaagaatgcaggaaaccctgtggtgttcattgttcagagtttgtcatccactccacgagtcattcctaacgtacataacaaggccaacaaaatcaccggtaaccagaaccaggacacccaagaaaagaaagaaaagaggcaaggaactgctccaccgccaatgaaacttcctcctccttataaagctctgactgatgacagtgatgaaaatgaagaagaagatgcctttaccgaccaaaaaatcagacaaagatatgcagatctgcctggagaactgcacattattgaacttgaaaaagataagaatggacttggactcagccttgctggtaataaagaccgatcacgcatgagcatatttgtggtgggaattaacccggaaggacctgctgccgcagatggacgaatgcgtattggagatgaactcttagagataaacaatcagattctgtatggaagaagtcaccaaaatgcatctgccattattaagactgccccatcaaaggtcaagctggttttcatcagaaacgaggatgcagtcaatcagatggccgttactccctttccagtgccatcaagttctccatcttctattgaggatcagagcggcaccgaacctattagtagtgaggaagatggcagcgtcgaagttggtattaaacaattgcctgaaagtgaaagcttcaaactggctgtcagccagatgaaacagcaaaaatatccaacaaaagtctccttcagttcacaagagataccattagcaccagcttcatcataccattcaacagatgcagacttcacaggctatggtggtttccaggctcctctgtcagtggaccccgcaacgtgtcccattgtccctggacaggaaatgattatagaaatatccaagggacgttcagggcttggtctcagcattgtgggaggaaaagacacacccttgaatgctatagttatccatgaagtctatgaagaaggggcagcagccagagatggaagactttgggctggtgaccagatattagaggttaatggggttgacctgaggaactccagccacgaagaagccatcacagccctgaggcagaccccccagaaggtgcggctggtggtgtatagagatgaggcacactaccgggatgaggagaacttggagattttccctgtggatctgcagaagaaagctggccggggcctgggcctgagcatcgttgggaaacggtaaagacgtgctgtgggagttgggatctgcctttttcatccagagctctgatgcctgtgaacactgaaagagaaagcctaatgtaaagtagtgatgggatttctaaaaataagatatttatgaaaatttgacaacatgggtcatatttctgagcaaggtcttaccagaaaaattgtcatatcaagatagaactccaagtccaatcaatccagactgatatatttctgtacagagtaagaacaactagcaaggttctttcacttggaattactaagatcggagttttgcagaggttgattaaagcaaccatacccaagaaatagctagcatcaagaatgagatttatccaatgttgggtcaagaacattgcttcgacatggaaattaacatggaacattgcttttcgtgatactgttaatttcatactatgttgaaactagttgagtagacatagttaagagataaacataattcttcacgatagtagttttctattaagaaaaatgtcctgctgggcaca

SEQ ID NO: 142563 - DNA, 387 bp, Homo sapiens
  Payload ID: 8168
  Gene Symbol: INADL
  Gene Name: InaD-like (Drosophila)
  ENST ID: ENST00000490547
  CDS Start-End: 1-336
caagaaaagaaagaaaagaggcaaggaactgctccaccgccaatgaaacttcctcctccttataaagctctgactgatgacagtgatgaaaatgaagaagaagatgcctttaccgaccaaaaaatcagacaaagatatgcagatctgcctggagaactgcacattattgaacttgaaaaagataagaatggacttggactcagccttgctggtaataaagaccgatcacgcatgagcatatttgtggtgggaattaacccggaaggacctgctgccgcagatggacgaatgcgtattggagatgaactcttagaggtgagaagcatgtgtttttaacttatcttttggtgaagtggatgggtgcagtggatgttgtataggaaaatg

SEQ ID NO: 142564 - DNA, 1255 bp, Homo sapiens
  Payload ID: 8169
  Gene Symbol: INAFM1
  Gene Name: InaF-motif containing 1
  Uniprot ID: C9JVW0
  ENST ID: ENST00000552360
  CDS Start-End: 468-896
gccgtagcgggcagggctcgagcactggagtagagcagtccgacaggtagagaagtgagactggctgcggcacagggcgggttagggctccaggcagggcttgagcgggacgagggggcgggctccgaggcgggctagatgcctgggctggatgaagtccgagtctgggaagagaaccgtgttgtggcgggaggaggcggtgattggggtggtggggctaagcgcgggggcggggctggagcgaggggggcggggtagcacctccgcctgtcggtggtggggcggaggctggagggggtgggcctaggatgcggaggcggcagctcgcgtgggggcgtgaccatgctggcgggggcggggccggaggcgggcggtttagagagcggggcggtctgcggggtgggggcggggcctggtgggggcggggcctgtgcggtctgcggcgcggagccgagtgggctgcggggatgcgggggaccagctgcgtgggcggcggcgccgagagccccggaggcgcggggctgagcgagggcccgcgggggcgctggctgcgcttggctccggtatgcgcctacttcctctgcgtctcgctagctgccgtgctgctcgccgtgtactacggtctcatctgggtacccacgcggtctcccgcggcacccgccggcccacagcccagcgcgccgtcccctccgtgtgctgcccgcccgggcgtgccgcctgtcccggcgcccgccgctgcctccctctcctgcctcctgggagtccccggcgggccgcgaccccagctccagctgccgctgagccgccgccgccgctacagcgaccctgaccgccgtccgagccgccagacacccagagagacgccagaggccgcggaggggcgaagacccgggtaactctcccttccaccccaacccggatcgccagccctcgagagctctgtgctccacgccgaggatgcaccgtctctggattggtccggccttcttcctaatgacatcgctcagcgtctctggagccgtcatcccgcggaatgggggcccagggggtgtcagctcggggccttgcctcttgcagctactctgtggtcaggccgggtcctccaccatcaggaagatcccatcctgagctctgtctcctgcccctcctgctgtgggatgctgagcacagagcccacagcccatctgcctcttcacctccctgaatccgtgtccatctgcaataaacgacagcctcggctgcctcgtgctgtgtc

SEQ ID NO: 142565 - DNA, 2356 bp, Homo sapiens
  Payload ID: 8170
  Gene Symbol: IST1
  Gene Name: increased sodium tolerance 1 homolog (yeast)
  Uniprot ID: P53990
  ENST ID: ENST00000329908
  CDS Start-End: 63-1145
gaaccctgaagtcggtgtctgctgcgttcacggcaggattcggttaggaggaacagcacagcatgctgggctctggatttaaagctgagcgcttaagagtgaatttgagattagtcataaatcgccttaaactattggagaaaaagaaaacggaactggcccagaaagcaaggaaggagattgctgactatctggctgctgggaaagatgaacgagctcggatccgtgtggagcacattatccgggaagactacctcgtggaggccatggagatcctggagctgtactgtgacctgctgctggctcggtttggccttatccagtctatgaaggaactagattctggtctggctgaatctgtgtctacattgatctgggctgctcctcgactccagtcagaagtggctgagttgaaaatagttgctgatcagctctgtgccaagtatagcaaggaatatggcaagctatgtaggaccaaccagattggaactgtgaatgacaggctaatgcacaagctgagtgtggaagccccacccaaaatcctggtggagagatacctgattgaaattgcaaagaattacaacgtaccctatgaacctgactctgtggtcatggcagaagctcctcctggggtagagacagatcttattgatgttggattcacagatgatgtgaagaaaggaggccctggaagaggagggagtggtggcttcacagcaccagttggtggacctgatggaacggtgccaatgcccatgcccatgcccatgcctatgccatctgcaaatacgcctttctcatatccactgccaaagggaccatcagatttcaatggactgccaatggggacttatcaggcctttcccaatattcatccacctcagataccagcaactcccccatcgtatgaatctatgacattaatgctgataagaatatctcttctgcacagattgttggtcctggacccaagccagaagcctctgcaaagcttccttccagacctgcagataactatgacaactttgtcctaccagagttgccatctgtgccagacacactaccaactgcatctgctggtgccagcacctcagcatctgaagacattgactttgatgatctttcccggaggtttgaagagctgaaaaagaaaacataggtctcttaaaccaggcaactttcacgttttgggagttgagactgagcaatttctccttgtaacaaagaatctccatgaaattctgtttcatctgttaaccgtcactcagcacaacactccctctgggctctcttcctgctcctccagattctgctgctttccagttctctgttgatcctgagactaacaattggagactgaggccagagcaactggctcctggcagctgtgcttgtccgtttcctgtcagagtgatcccaggtttcctcctggcccgtcccatggtccctccacaggagtgtgagaggatgggggaagcactgtgggaagaccaccaaagatggctggacagtgggagagagcacgttgtgaagcatcccagcctcgtgttgaggttccagacttagaaacagacccctctgtacagggggattgtggtgagtgagaatcaaggccaccttgtgtgttttctcactctcgaatgcaagtgggagagggaaaatgactcgggacgccattgtaacggttcctggaagctgggccctctcattggcatatacagtactcctcgctgcagggcactgtcccaccgggatccagttgcaaagtttgtcttgacagttgaaggcctcgcttagttgtactggattctcagggagccctctgtggccttttgctttgcgtgctgtttcccttgtaccagagggcggcaccgtggaaattctgttttccctgtagcatattgtgttggattgcattactggcagagaaaggacaaggtgccattcaagtcctagggtgggcttccagctgccttaatagaagtactcaagtcttttgggtagtgagctggaaagcctacaggaaaagaggggtacctgttttcatttgaaaactttgattcatggaacctttaaaactaatctcagaaaaatttttggtgcccatgcagctgtagttgttcactgctttcctggatggatgggactcttatgtcataacttctgttactcctttggcccatagctaaggtcatccttccccacaggggtggctttgggattggatgatacagcttttgcttctgtgtagtatacctgtacatacttgtttcaggcagcctttctttaatgttttcagttggtttgtattctgtagctcagtagctgctaataaagttaaagatcctgtgtcctg

SEQ ID NO: 142566 - DNA, 2255 bp, Homo sapiens
  Payload ID: 8170
  Gene Symbol: IST1
  Gene Name: increased sodium tolerance 1 homolog (yeast)
  Uniprot ID: P53990
  ENST ID: ENST00000378798
  CDS Start-End: 53-1060
gtcggtgtctgctgcgttcacggcaggattcggttaggaggaacagcacagcatgctgggctctggatttaaagctgagcgcttaagagtgaatttgagattagtcataaatcgccttaaactattggagaaaaagaaaacggaactggcccagaaagcaaggaaggagattgctgactatctggctgctgggaaagatgaacgagctcggatccgtgtggagcacattatccgggaagactacctcgtggaggccatggagatcctggagctgtactgtgacctgctgctggctcggtttggccttatccagtctatgaaggaactagattctggtctggctgaatctgtgtctacattgatctgggctgctcctcgactccagtcagaagtggctgagttgaaaatagttgctgatcagctctgtgccaagtatagcaaggaatatggcaagctatgtaggaccaaccagattggaactgtgaatgacaggctaatgcacaagctgagtgtggaagccccacccaaaatcctggtggagagatacctgattgaaattgcaaagaattacaacgtaccctatgaacctgactctgtggtcatggcagaagctcctcctggggtagagacagatcttattgatgttggattcacagatgatgtgaagaaaggaggccctggaagaggagggagtggtggcttcacagcaccagttggtggacctgatggaacggtgccaatgcccatgcccatgcccatgcctatgccatctgcaaatacgcctttctcatatccactgccaaagggaccagtagatgacattaatgctgataagaatatctcttctgcacagattgttggtcctggacccaagccagaagcctctgcaaagcttccttccagacctgcagataactatgacaactttgtcctaccagagttgccatctgtgccagacacactaccaactgcatctgctggtgccagcacctcagcatctgaagacattgactttgatgatctttcccggaggtttgaagagctgaaaaagaaaacataggtctcttaaaccaggcaactttcacgttttgggagttgagactgagcaatttctccttgtaacaaagaatctccatgaaattctgtttcatctgttaaccgtcactcagcacaacactccctctgggctctcttcctgctcctccagattctgctgctttccagttctctgttgatcctgagactaacaattggagactgaggccagagcaactggctcctggcagctgtgcttgtccgtttcctgtcagagtgatcccaggtttcctcctggcccgtcccatggtccctccacaggagtgtgagaggatgggggaagcactgtgggaagaccaccaaagatggctggacagtgggagagagcacgttgtgaagcatcccagcctcgtgttgaggttccagacttagaaacagacccctctgtacagggggattgtggtgagtgagaatcaaggccaccttgtgtgttttctcactctcgaatgcaagtgggagagggaaaatgactcgggacgccattgtaacggttcctggaagctgggccctctcattggcatatacagtactcctcgctgcagggcactgtcccaccgggatccagttgcaaagtttgtcttgacagttgaaggcctcgcttagttgtactggattctcagggagccctctgtggccttttgctttgcgtgctgtttcccttgtaccagagggcggcaccgtggaaattctgttttccctgtagcatattgtgttggattgcattactggcagagaaaggacaaggtgccattcaagtcctagggtgggcttccagctgccttaatagaagtactcaagtcttttgggtagtgagctggaaagcctacaggaaaagaggggtacctgttttcatttgaaaactttgattcatggaacctttaaaactaatctcagaaaaatttttggtgcccatgcagctgtagttgttcactgctttcctggatggatgggactcttatgtcataacttctgttactcctttggcccatagctaaggtcatccttccccacaggggtggctttgggattggatgatacagcttttgcttctgtgtagtatacctgtacatacttgtttcaggcagcctttctttaatgttttcagttggtttgtattctgtagctcagtagctgctaataaagttaaagatcctgtgtcc

SEQ ID NO: 142567 - DNA, 4843 bp, Homo sapiens
  Payload ID: 8170
  Gene Symbol: IST1
  Gene Name: increased sodium tolerance 1 homolog (yeast)
  Uniprot ID: P53990
  ENST ID: ENST00000378799
  CDS Start-End: 357-1457
ctgtggctggcctccccgcgcccagagcgaaattaagggcatgcccccagcagctgactcagtcggcgtggcgcttcccccaacgtctgccgtgcccccgccgcgggaagtagtccccggccgcgccgactccaaaggaaaccgagggagggtgccccgagtcagcgcgtgggtcccggcagcggcgatcgcgcagccaatccctggaaaggagggcgtggctatatcggccccgtggatccctccgcccgcgcttgttgtgctgaggccgagggagtcgccattttggatggtgaaccctgaagtcggtgtctgctgcgttcacggcaggattcggttaggaggaacagcacagcatgctgggctctggatttaaagctgagcgcttaagagtgaatttgagattagtcataaatcgccttaaactattggagaaaaagaaaacggaactggcccagaaagcaaggaaggagattgctgactatctggctgctgggaaagatgaacgagctcggatccgtgtggagcacattatccgggaagactacctcgtggaggccatggagatcctggagctgtactgtgacctgctgctggctcggtttggccttatccagtctatgaaggaactagattctggtctggctgaatctgtgtctacattgatctgggctgctcctcgactccagtcagaagtggctgagttgaaaatagttgctgatcagctctgtgccaagtatagcaaggaatatggcaagctatgtaggaccaaccagattggaactgtgaatgacaggctaatgcacaagctgagtgtggaagccccacccaaaatcctggtggagagatacctgattgaaattgcaaagaattacaacgtaccctatgaacctgactctgtggtcatggcagaagctcctcctggggtagagacagatcttattgatgttggattcacagatgatgtgaagaaaggaggccctggaagaggagggagtggtggcttcacagcaccagttggtggacctgatggaacggtgccaatgcccatgcccatgcccatgcctatgccatctgcaaatacgcctttctcatatccactgccaaagggaccatcagatttcaatggactgccaatggggacttatcaggcctttcccaatattcatccacctcagataccagcaactcccccatcgtatgaatctgtagatgacattaatgctgataagaatatctcttctgcacagattgttggtcctggacccaagccagaagcctctgcaaagcttccttccagacctgcagataactatgacaactttgtcctaccagagttgccatctgtgccagacacactaccaactgcatctgctggtgccagcacctcagcatctgaagacattgactttgatgatctttcccggaggtttgaagagctgaaaaagaaaacataggtctcttaaaccaggcaactttcacgttttgggagttgagactgagcaatttctccttgtaacaaagaatctccatgaaattctgtttcatctgttaaccgtcactcagcacaacactccctctgggctctcttcctgctcctccagattctgctgctttccagttctctgttgatcctgagactaacaattggagactgaggccagagcaactggctcctggcagctgtgcttgtccgtttcctgtcagagtgatcccaggtttcctcctggcccgtcccatggtccctccacaggagtgtgagaggatgggggaagcactgtgggaagaccaccaaagatggctggacagtgggagagagcacgttgtgaagcatcccagcctcgtgttgaggttccagacttagaaacagacccctctgtacagggggattgtggtgagtgagaatcaaggccaccttgtgtgttttctcactctcgaatgcaagtgggagagggaaaatgactcgggacgccattgtaacggttcctggaagctgggccctctcattggcatatacagtactcctcgctgcagggcactgtcccaccgggatccagttgcaaagtttgtcttgacagttgaaggcctcgcttagttgtactggattctcagggagccctctgtggccttttgctttgcgtgctgtttcccttgtaccagagggcggcaccgtggaaattctgttttccctgtagcatattgtgttggattgcattactggcagagaaaggacaaggtgccattcaagtcctagggtgggcttccagctgccttaatagaagtactcaagtcttttgggtagtgagctggaaagcctacaggaaaagaggggtacctgttttcatttgaaaactttgattcatggaacctttaaaactaatctcagaaaaatttttggtgcccatgcagctgtagttgttcactgctttcctggatggatgggactcttatgtcataacttctgttactcctttggcccatagctaaggtcatccttccccacaggggtggctttgggattggatgatacagcttttgcttctgtgtagtatacctgtacatacttgtttcaggcagcctttctttaatgttttcagttggtttgtattctgtagctcagtagctgctaataaagttaaagatcctgtgtcctgctttctctactgtttggtcagatgatgaagtataaatctggattttagtggagaatattttaaccaagtgatccatgtaaaccagcccttagtttcaggattcctggagcagtacagagctcattttgatctctgtatttagatagcccagatagcatctgtgaatttccttggtcttcctcagtggcagggctccgcatctgccatgcctcatccttggatgtttatttttagtaagttgcagtgagctcacttctgactgcttcatttcccgcagccatcctgggccatgggtggtgagttctgttacttgctgcttggcagcagagctagtttgtctcgtagtattcttgcattgttaatcctatcttgacagtgccaagatccataagaacttgggaccaaggggattttgattcctaacttacagaattaaaaacaaagtatattataattttaaagctatgccatgcaaagataagtagtaatacgctaataaatactaagccaagtaggagataacaggattaaggtagttcatctaaaacttcagtgtcactgcccactgctgtcgtggctgcttgctcagatgaggttttttggggccaactgattcctaacaaatttgagagcttctgtagcagtgtatctattagtgcagcttctttctgagtattgaagacaaaaagagaaaagtgagaaaattgaaattactgctaatagtggagtaaaaaaagtaccaaagatttttaaaaaattagtaaatgtaaagatactatttctttaataatttgcagtcaggcattggagtgtttccactaatggttgcgagccaactatttataggacaatggctatagaatattatgtagtcttataaattgggtttcctaggaagatagctggcagagcttttgaaactaataaagggaatatgatactgtgcattataaattatgtcagcccgtcatcttaggggcagttacagtggagctttcccagtgatataacagcatgctagtttatcttttagttacctaccttaagcgactttctttcttttccaaaggccatgagaatggccgaaacgaaaagattaattaccacaagtaccatcaagatgacactggtgaggatcagaaaggtgcccaggactgggtctaaagcgaaaacctgggaaaacaataagaacacttgcagtgactgacaatttagtttatactttacaaacataagctatatgctagtgtttgggatcttatcagaagaaaagcttatccgaaggaaacttagggagagagtcaaaagataataagaaggaaaatacttttaaatggacagaagagcaggaatgactcattttaaggaggttaagataattgtgactgcagggctttcacaagaaaacaggtgagttgcagtggaattggaaatgattcaaatgtcacatgagttttggcaaaaaatacatctaatcatggaagctaaaagtgggaggggggtaagcaaacactgaaagattaaatgcataccagaaatgagaatgcacactgtctctgccatatcaagaaactacaaccctaaacacaggagcattccaataaaagttaacaggttggccacagaaaactggctttttagtatttttttttttccattgtcatttttaaaggtacaagcattgagttctgccattctttacttttctgcatacataaatatcaagttctgggcttattggaatggttcccataacaaaaactgttgtttaaaatttagatgttctttttcaacaaatggtatttattttcccttggtattggcccattcattgttgccactagggcactgtttaaaaatatcccaacagaggggttgattacagtcaatgccaccctgatggaaatctatatggcaaaatattttcaagcaccaaactgttttacctacttaaaaatgattattataacaatttcaggtcaaccagataatgtgggcaatctctgagtttgtgatacaagacttatttccaataagtttatttttatgtacaattttactgtttattttttgtttgctctatttgttttttaatgttttttactttatgtttactgtatttttatgtacaattacatccaaagcagaaaagttccttttttatccccaaaaggaggtgtcagcaaaaa

SEQ ID NO: 142568 - DNA, 521 bp, Homo sapiens
  Payload ID: 8170
  Gene Symbol: IST1
  Gene Name: increased sodium tolerance 1 homolog (yeast)
  ENST ID: ENST00000424485
  CDS Start-End: 98-521
gtgctgaggccgagggagtcgccattttggatggtgaaccctgaagtcggtgtctgctgcgttcacggcaggattcggttaggaggaacagcacagcatgctgggctctggatttaaagctgagcgcttaagagtgaatttgagattagtcataaatcgccttaaactattggagaaaaagaaaacggaactggcccagaaagcaaggaaggagattgctgactatctggctgctgggaaagatgaacgagctcggatccgtgtggagcacattatccgggaagactacctcgtggaggccatggagatcctggagctgtactgtgacctgctgctggctcggtttggccttatccagtctatgaaggaactagattctggtctggctgaatctgtgtctacattgatctgggctgctcctcgactccagtcagaagtggctgagttgaaaatactctgtgccaagtatagcaaggaatatggcaagctatgtaggaccaaccagattggaactgtgaatg

SEQ ID NO: 142569 - DNA, 1841 bp, Homo sapiens
  Payload ID: 8170
  Gene Symbol: IST1
  Gene Name: increased sodium tolerance 1 homolog (yeast)
  ENST ID: ENST00000439924
  CDS Start-End: 16-141
gaggaacagcacagcatgctgggctctggatttaaagctgagcgcttaagagtgaatttgagattagtcataaatcgccttaaactattggagaaaaagaaaagcagaagctcctcctggggtagagacagatcttattgatgttggattcacagatgatgtgaagaaaggaggccctggaagaggagggagtggtggcttcacagcaccagttggtggacctgatggaacggtgccaatgcccatgcccatgcccatgcctatgccatctgcaaatacgcctttctcatatccactgccaaagggaccatcagatttcaatggactgccaatggggacttatcaggcctttcccaatattcatccacctcagataccagcaactcccccatcgtatgaatctgtagatgacattaatgctgataagaatatctcttctgcacagattgttggtcctggacccaagccagaagcctctgcaaagcttccttccagacctgcagataactatgacaactttgtcctaccagagttgccatctgtgccagacacactaccaactgcatctgctggtgccagcacctcagcatctgaagacattgactttgatgatctttcccggaggtttgaagagctgaaaaagaaaacataggtctcttaaaccaggcaactttcacgttttgggagttgagactgagcaatttctccttgtaacaaagaatctccatgaaattctgtttcatctgttaaccgtcactcagcacaacactccctctgggctctcttcctgctcctccagattctgctgctttccagttctctgttgatcctgagactaacaattggagactgaggccagagcaactggctcctggcagctgtgcttgtccgtttcctgtcagagtgatcccaggtttcctcctggcccgtcccatggtccctccacaggagtgtgagaggatgggggaagcactgtgggaagaccaccaaagatggctggacagtgggagagagcacgttgtgaagcatcccagcctcgtgttgaggttccagacttagaaacagacccctctgtacagggggattgtggtgagtgagaatcaaggccaccttgtgtgttttctcactctcgaatgcaagtgggagagggaaaatgactcgggacgccattgtaacggttcctggaagctgggccctctcattggcatatacagtactcctcgctgcagggcactgtcccaccgggatccagttgcaaagtttgtcttgacagttgaaggcctcgcttagttgtactggattctcagggagccctctgtggccttttgctttgcgtgctgtttcccttgtaccagagggcggcaccgtggaaattctgttttccctgtagcatattgtgttggattgcattactggcagagaaaggacaaggtgccattcaagtcctagggtgggcttccagctgccttaatagaagtactcaagtcttttgggtagtgagctggaaagcctacaggaaaagaggggtacctgttttcatttgaaaactttgattcatggaacctttaaaactaatctcagaaaaatttttggtgcccatgcagctgtagttgttcactgctttcctggatggatgggactcttatgtcataacttctgttactcctttggcccatagctaaggtcatccttccccacaggggtggctttgggattggatgatacagcttttgcttctgtgtagtatacctgtacatacttgtttcaggcagcctttctttaatgttttcagttggtttgtattctgtagctcagtagctgctaataaagttaaagatcct

SEQ ID NO: 142570 - DNA, 2031 bp, Homo sapiens
  Payload ID: 8170
  Gene Symbol: IST1
  Gene Name: increased sodium tolerance 1 homolog (yeast)
  ENST ID: ENST00000456820
  CDS Start-End: 1-870
gactacctcgtggaggccatggagatcctggagctgtactgtgacctgctgctggctcggtttggccttatccagtctatgaaggaactagattctggtctggctgaatctgtgtctacattgatctgggctgctcctcgactccagtcagaagtggctgagttgaaaatagttgctgatcagctctgtgccaagtatagcaaggaatatggcaagctatgtaggaccaaccagattggaactgtgaatgacaggctaatgcacaagctgagtgtggaagccccacccaaaatcctggtggagagatacctgattgaaattgcaaagaattacaacgtaccctatgaacctgactctgtggtcatggcagaagctcctcctggggtagagacagatcttattgatgttggattcacagatgatgtgaagaaaggaggccctggaagaggagggagtggtggcttcacagcaccagttggtggacctgatggaacggtgccaatgcccatgcccatgcccatgcctatgccatctgcaaatacgcctttctcatatccactgccaaagggaccatcagatttcaatggactgccaatggggacttatcaggcctttcccaatattcatccacctcagataccagcaactcccccatcgtatgaatctgtaagtcctggacccaagccagaagcctctgcaaagcttccttccagacctgcagataactatgacaactttgtcctaccagagttgccatctgtgccagacacactaccaactgcatctgctggtgccagcacctcagcatctgaagacattgactttgatgatctttcccggaggtttgaagagctgaaaaagaaaacataggtctcttaaaccaggcaactttcacgttttgggagttgagactgagcaatttctccttgtaacaaagaatctccatgaaattctgtttcatctgttaaccgtcactcagcacaacactccctctgggctctcttcctgctcctccagattctgctgctttccagttctctgttgatcctgagactaacaattggagactgaggccagagcaactggctcctggcagctgtgcttgtccgtttcctgtcagagtgatcccaggtttcctcctggcccgtcccatggtccctccacaggagtgtgagaggatgggggaagcactgtgggaagaccaccaaagatggctggacagtgggagagagcacgttgtgaagcatcccagcctcgtgttgaggttccagacttagaaacagacccctctgtacagggggattgtggtgagtgagaatcaaggccaccttgtgtgttttctcactctcgaatgcaagtgggagagggaaaatgactcgggacgccattgtaacggttcctggaagctgggccctctcattggcatatacagtactcctcgctgcagggcactgtcccaccgggatccagttgcaaagtttgtcttgacagttgaaggcctcgcttagttgtactggattctcagggagccctctgtggccttttgctttgcgtgctgtttcccttgtaccagagggcggcaccgtggaaattctgttttccctgtagcatattgtgttggattgcattactggcagagaaaggacaaggtgccattcaagtcctagggtgggcttccagctgccttaatagaagtactcaagtcttttgggtagtgagctggaaagcctacaggaaaagaggggtacctgttttcatttgaaaactttgattcatggaacctttaaaactaatctcagaaaaatttttggtgcccatgcagctgtagttgttcactgctttcctggatggatgggactcttatgtcataacttctgttactcctttggcccatagctaaggtcatccttccccacaggggtggctttgggattggatgatacagcttttgcttctgtgtagtatacctgtacatacttgtttcaggcagcctttctttaatgttttcagttggtttgtattctgtagctc

SEQ ID NO: 142571 - DNA, 4082 bp, Homo sapiens
  Payload ID: 8170
  Gene Symbol: IST1
  Gene Name: increased sodium tolerance 1 homolog (yeast)
  Uniprot ID: P53990
  ENST ID: ENST00000535424
  CDS Start-End: 117-1256
agcgatgcggtttcactatggtgtccaggctggtctgcaactcccgggctcaagcgatcctcccgccccgcctctcaaagtgctgggaaggtcccttccaggcttaagcagcgataatggttttcaagttaaaaacaaaggaggaacagcacagcatgctgggctctggatttaaagctgagcgcttaagagtgaatttgagattagtcataaatcgccttaaactattggagaaaaagaaaacggaactggcccagaaagcaaggaaggagattgctgactatctggctgctgggaaagatgaacgagctcggatccgtgtggagcacattatccgggaagactacctcgtggaggccatggagatcctggagctgtactgtgacctgctgctggctcggtttggccttatccagtctatgaaggaactagattctggtctggctgaatctgtgtctacattgatctgggctgctcctcgactccagtcagaagtggctgagttgaaaatagttgctgatcagctctgtgccaagtatagcaaggaatatggcaagctatgtaggaccaaccagattggaactgtgaatgacaggctaatgcacaagctgagtgtggaagccccacccaaaatcctggtggagagatacctgattgaaattgcaaagaattacaacgtaccctatgaacctgactctgtggtcatggcagaagctcctcctggggtagagacagatcttattgatgttggattcacagatgatgtgaagaaaggaggccctggaagaggagggagtggtggcttcacagcaccagttggtggacctgatggaacggtgccaatgcccatgcccatgcccatgcctatgccatctgcaaatacgcctttctcatatccactgccaaagggaccatcagatttcaatggactgccaatggggacttatcaggcctttcccaatattcatccacctcagataccagcaactcccccatcgtatgaatctgtagatgacattaatgctgataagaatatctcttctgcacagattgttggtcctggacccaagccagaagcctctgcaaagcttccttccagacctgcagataactatgacaactttgtcctaccagagttgccatctgtgccagacacactaccaactgcatctgctggtgccagcacctcagcatctgaagacattgactttgatgatctttcccggaggtttgaagagctgaaaaagaaaacataggtctcttaaaccaggcaactttcacgttttgggagttgagactgagcaatttctccttgtaacaaagaatctccatgaaattctgtttcatctgttaaccgtcactcagcacaacactccctctgggctctcttcctgctcctccagattctgctgctttccagttctctgttgatcctgagactaacaattggagactgaggccagagcaactggctcctggcagctgtgcttgtccgtttcctgtcagagtgatcccaggtttcctcctggcccgtcccatggtccctccacaggagtgtgagaggatgggggaagcactgtgggaagaccaccaaagatggctggacagtgggagagagcacgttgtgaagcatcccagcctcgtgttgaggttccagacttagaaacagacccctctgtacagggggattgtggtgagtgagaatcaaggccaccttgtgtgttttctcactctcgaatgcaagtgggagagggaaaatgactcgggacgccattgtaacggttcctggaagctgggccctctcattggcatatacagtactcctcgctgcagggcactgtcccaccgggatccagttgcaaagtttgtcttgacagttgaaggcctcgcttagttgtactggattctcagggagccctctgtggccttttgctttgcgtgctgtttcccttgtaccagagggcggcaccgtggaaattctgttttccctgtagcatattgtgttggattgcattactggcagagaaaggacaaggtgccattcaagtcctagggtgggcttccagctgccttaatagaagtactcaagtcttttgggtagtgagctggaaagcctacaggaaaagaggggtacctgttttcatttgaaaactttgattcatggaacctttaaaactaatctcagaaaaatttttggtgcccatgcagctgtagttgttcactgctttcctggatggatgggactcttatgtcataacttctgttactcctttggcccatagctaaggtcatccttccccacaggggtggctttgggattggatgatacagcttttgcttctgtgtagtatacctgtacatacttgtttcaggcagcctttctttaatgttttcagttggtttgtattctgtagctcagtagctgctaataaagttaaagatcctgtgtcctgctttctctactgtttggtcagatgatgaagtataaatctggattttagtggagaatattttaaccaagtgatccatgtaaaccagcccttagtttcaggattcctggagcagtacagagctcattttgatctctgtatttagatagcccagatagcatctgtgaatttccttggtcttcctcagtggcagggctccgcatctgccatgcctcatccttggatgtttatttttagtaagttgcagtgagctcacttctgactgcttcatttcccgcagccatcctgggccatgggtggtgagttctgttacttgctgcttggcagcagagctagtttgtctcgtagtattcttgcattgttaatcctatcttgacagtgccaagatccataagaacttgggaccaaggggattttgattcctaacttacagaattaaaaacaaagtatattataattttaaagctatgccatgcaaagataagtagtaatacgctaataaatactaagccaagtaggagataacaggattaaggtagttcatctaaaacttcagtgtcactgcccactgctgtcgtggctgcttgctcagatgaggttttttggggccaactgattcctaacaaatttgagagcttctgtagcagtgtatctattagtgcagcttctttctgagtattgaagacaaaaagagaaaagtgagaaaattgaaattactgctaatagtggagtaaaaaaagtaccaaagatttttaaaaaattagtaaatgtaaagatactatttctttaataatttgcagtcaggcattggagtgtttccactaatggttgcgagccaactatttataggacaatggctatagaatattatgtagtcttataaattgggtttcctaggaagatagctggcagagcttttgaaactaataaagggaatatgatactgtgcattataaattatgtcagcccgtcatcttaggggcagttacagtggagctttcccagtgatataacagcatgctagtttatcttttagttacctaccttaagcgactttctttcttttccaaaggccatgagaatggccgaaacgaaaagattaattaccacaagtaccatcaagatgacactggtgaggatcagaaaggtgcccaggactgggtctaaagcgaaaacctgggaaaacaataagaacacttgcagtgactgacaatttagtttatactttacaaacataagctatatgctagtgtttgggatcttatcagaagaaaagcttatccgaaggaaacttagggagagagtcaaaagataataagaaggaaaatacttttaaatggacagaagagcaggaatgactcattttaaggaggttaagataattgtgactgcagggctttcacaagaaaacaggtgagttgcagtggaattggaaatgattcaaatgtcacatgagttttggcaaaaaatacatctaatcatggaagctaaaagtgggaggggggtaagcaaacactgaaagattaaatgcataccagaaatgagaatgcacactgtctctgccatatcaagaaactacaaccctaaacacaggagcattccaataaaagttaacaggttggccacagaaaa

SEQ ID NO: 142572 - DNA, 674 bp, Homo sapiens
  Payload ID: 8170
  Gene Symbol: IST1
  Gene Name: increased sodium tolerance 1 homolog (yeast)
  ENST ID: ENST00000534994
  CDS Start-End: 56-674
gtcggtgtctgctgcgttcacggcaggattcggttaggtgagtgaacagcacagcatgctgggctctggatttaaagctgagcgcttaagagtgaatttgagattagtcataaatcgccttaaactattggagaaaaagaaaacggaactggcccagaaagcaaggaaggagattgctgactatctggctgctgggaaagatgaacgagctcggatccgtgtggagcacattatccgggaagactacctcgtggaggccatggagatcctggagctgtactgtgacctgctgctggctcggtttggccttatccagtctatgaaggaactagattctggtctggctgaatctgtgtctacattgatctgggctgctcctcgactccagtcagaagtggctgagttgaaaatagttgctgatcagctctgtgccaagtatagcaaggaatatggcaagctatgtaggaccaaccagattggaactgtgaatgacaggctaatgcacaagctgagtgtggaagccccacccaaaatcctggtggagagatacctgattgaaattgcaaagaattacaacgtaccctatgaacctgactctgtggtcatggcagaagctcctcctggggtagagacagatcttattgatgttggattcacagatgatgtgaagaaag

SEQ ID NO: 142573 - DNA, 476 bp, Homo sapiens
  Payload ID: 8170
  Gene Symbol: IST1
  Gene Name: increased sodium tolerance 1 homolog (yeast)
  ENST ID: ENST00000540296
  CDS Start-End: 298-476
ttcctctcttctagaatgcctgagcctgccctggcatcgcttacctggagaagcagggaatgcagaggaaagaagatgagatctggtattagaagatctggctttgagccccagctctgccacccaccagcctgttgactttggcgatgcggtttcactatggtgtccaggctggtctgcaactcccgggctcaagcgatcctcccgccccgcctctcaaagtgctgggaaggtcccttccaggcttaagcagcgataatggttttcaagttaaaaacaaaggaggaacagcacagcatgctgggctctggatttaaagctgagcgcttaagagtgaatttgagattagtcataaatcgccttaaactattggagaaaaagaaaacggaactggcccagaaagcaaggaaggagattgctgactatctggctgctgggaaagatgaacgagctcggatccgtgtggagcacattat

SEQ ID NO: 142574 - DNA, 531 bp, Homo sapiens
  Payload ID: 8170
  Gene Symbol: IST1
  Gene Name: increased sodium tolerance 1 homolog (yeast)
  ENST ID: ENST00000538104
  CDS Start-End: 412-531
accatgcgtaatttcctctttagtagagacggggttcctctgtgttggccaggctggtctcgaattaccgacttcagcgatgcggtttcactatggtgtccaggctggtctgcaactcccgggctcaagcgatcctcccgccccgcctctcaaagtgctgggaaggtcccttccaggcttaagcagcgataatggttttcaagttaaaaacaaagagaatggggtcttgctacattgtccaagctggtctcaaactcctggcctcaagtgatcctctccccttggcctcccaaagtgctggaattacagagacgaggtcttactgtgttactcaggctggtcccttggcctcaaacgatccttctacctcagcctctcaagtagctgaggttataggaggaacagcacagcatgctgggctctggatttaaagctgagcgcttaagagtgaatttgagattagtcataaatcgccttaaactattggagaaaaagaaaacggaactggcccagaaagcaaggaaggagatt

SEQ ID NO: 142575 - DNA, 542 bp, Homo sapiens
  Payload ID: 8170
  Gene Symbol: IST1
  Gene Name: increased sodium tolerance 1 homolog (yeast)
  ENST ID: ENST00000539186
  CDS Start-End: 44-542
ggtgagtgtggcatcctcggcgtcagaggaggaacagcacagcatgctgggctctggatttaaagctgagcgcttaagagtgaatttgagattagtcataaatcgccttaaactattggagaaaaagaaaacggaactggcccagaaagcaaggaaggagattgctgactatctggctgctgggaaagatgaacgagctcggatccgtgtggagcacattatccgggaagactacctcgtggaggccatggagatcctggagctgtactgtgacctgctgctggctcggtttggccttatccagtctatgaaggaactagattctggtctggctgaatctgtgtctacattgatctgggctgctcctcgactccagtcagaagtggctgagttgaaaatagttgctgatcagctctgtgccaagtatagcaaggaatatggcaagctatgtaggaccaaccagattggaactgtgaatgacaggctaatgcacaagctgagtgtggaagccccacccaaaatcctggtggagagatacctga

SEQ ID NO: 142576 - DNA, 908 bp, Homo sapiens
  Payload ID: 8170
  Gene Symbol: IST1
  Gene Name: increased sodium tolerance 1 homolog (yeast)
  ENST ID: ENST00000541918
  CDS Start-End: 149-908
aagtcggtgtctgctgcgttcacggcaggattcggttagagaatggggtcttgctacattgtccaagctggtctcaaactcctggcctcaagtgatcctctccccttggcctcccaaagtgctggaattacaggaggaacagcacagcatgctgggctctggatttaaagctgagcgcttaagagtgaatttgagattagtcataaatcgccttaaactattggagaaaaagaaaacggaactggcccagaaagcaaggaaggagattgctgactatctggctgctgggaaagatgaacgagctcggatccgtgtggagcacattatccgggaagactacctcgtggaggccatggagatcctggagctgtactgtgacctgctgctggctcggtttggccttatccagtctatgaaggaactagattctggtctggctgaatctgtgtctacattgatctgggctgctcctcgactccagtcagaagtggctgagttgaaaatagttgctgatcagctctgtgccaagtatagcaaggaatatggcaagctatgtaggaccaaccagattggaactgtgaatgacaggctaatgcacaagctgagtgtggaagccccacccaaaatcctggtggagagatacctgattgaaattgcaaagaattacaacgtaccctatgaacctgactctgtggtcatggcagaagctcctcctggggtagagacagatcttattgatgttggattcacagatgatgtgaagaaaggaggccctggaagaggagggagtggtggcttcacagcaccagttggtggacctgatggaacggtgccaatgcccatgcccatgcccatgcctatgccatctgcaaatacgcctttctcatatccactgccaaagggaccag

SEQ ID NO: 142577 - DNA, 1962 bp, Homo sapiens
  Payload ID: 8170
  Gene Symbol: IST1
  Gene Name: increased sodium tolerance 1 homolog (yeast)
  Uniprot ID: P53990
  ENST ID: ENST00000541571
  CDS Start-End: 702-1802
ttttttcttttttttgtattttttttagtagagacgagatttcacaatgttggtcaggctggtcttgaactcctgacctcaggtgatccacctgcctcagtctccccaagtgctgggattacaggcatgtgccaccgcgcctggcatggaacctggttttatcttgaaatgttgcaaacgtttataaagatacagtatttctaaattcacatcaacatcttatgataagggctagctcctacttgtcatatgactgccccggtacaagcattagatgcagcctccacagcagggagcagatgacttccttctggaggcccctttttcttttttccctttttttttttgagacgtttcgctcttgttgcccaggctggagggcaatcgccggatctcggctcactgtaactcgagaatcaagcgattctcctgcctcagcctccggagtagctgggattacaggcttgcgccaccatgcgtaatttcctctttagtagagacggggttcctctgtgttggccaggctggtctcgaattaccgacttcagcgatgcggtttcactatggtgtccaggctggtctgcaactcccgggctcaagcgatcctcccgccccgcctctcaaagtgctgggaaggtcccttccaggcttaagcagcgataatggttttcaagttaaaaacaaaggaggaacagcacagcatgctgggctctggatttaaagctgagcgcttaagagtgaatttgagattagtcataaatcgccttaaactattggagaaaaagaaaacggaactggcccagaaagcaaggaaggagattgctgactatctggctgctgggaaagatgaacgagctcggatccgtgtggagcacattatccgggaagactacctcgtggaggccatggagatcctggagctgtactgtgacctgctgctggctcggtttggccttatccagtctatgaaggaactagattctggtctggctgaatctgtgtctacattgatctgggctgctcctcgactccagtcagaagtggctgagttgaaaatagttgctgatcagctctgtgccaagtatagcaaggaatatggcaagctatgtaggaccaaccagattggaactgtgaatgacaggctaatgcacaagctgagtgtggaagccccacccaaaatcctggtggagagatacctgattgaaattgcaaagaattacaacgtaccctatgaacctgactctgtggtcatggcagaagctcctcctggggtagagacagatcttattgatgttggattcacagatgatgtgaagaaaggaggccctggaagaggagggagtggtggcttcacagcaccagttggtggacctgatggaacggtgccaatgcccatgcccatgcccatgcctatgccatctgcaaatacgcctttctcatatccactgccaaagggaccatcagatttcaatggactgccaatggggacttatcaggcctttcccaatattcatccacctcagataccagcaactcccccatcgtatgaatctgtagatgacattaatgctgataagaatatctcttctgcacagattgttggtcctggacccaagccagaagcctctgcaaagcttccttccagacctgcagataactatgacaactttgtcctaccagagttgccatctgtgccagacacactaccaactgcatctgctggtgccagcacctcagcatctgaagacattgactttgatgatctttcccggaggtttgaagagctgaaaaagaaaacataggtctcttaaaccaggcaactttcacgttttgggagttgagactgagcaatttctccttgtaacaaagaatctccatgaaattctgtttcatctgttaaccgtcactcagcacaacactccctctgggctctcttcctgctcctccagattctgctgcttt

SEQ ID NO: 142578 - DNA, 503 bp, Homo sapiens
  Payload ID: 8170
  Gene Symbol: IST1
  Gene Name: increased sodium tolerance 1 homolog (yeast)
  ENST ID: ENST00000568581
  CDS Start-End: 187-503
ggggggcgctgggtgtggggcggctccggggccggggatggcggcggccgcggttgcggcggctccgggacgagtgagtggatcctgggaagcgctgtgaaatgggctggctcccgagccagccgggaggacacttactacagctgctcagaagcaccactggaaactcaggaggaacagcacagcatgctgggctctggatttaaagctgagcgcttaagagtgaatttgagattagtcataaatcgccttaaactattggagaaaaagaaaacggaactggcccagaaagcaaggaaggagattgctgactatctggctgctgggaaagatgaacgagctcggatccgtgtggagcacattatccgggaagactacctcgtggaggccatggagatcctggagctgtactgtgacctgctgctggctcggtttggccttatccagtctatgaaggaactagattctggtctggctgaatctgtgtctacattgatctgggc

SEQ ID NO: 142579 - DNA, 894 bp, Homo sapiens
  Payload ID: 8170
  Gene Symbol: IST1
  Gene Name: increased sodium tolerance 1 homolog (yeast)
  ENST ID: ENST00000537613
  CDS Start-End: 136-894
cgcccgcgcttgttgtgctgaggccgagggagtcgccattttggatggtgaaccctgaagtcggtgtctgctgcgttcacggcaggattcggttagtcattgtgcttcttctgtttctaggaggaacagcacagcatgctgggctctggatttaaagctgagcgcttaagagtgaatttgagattagtcataaatcgccttaaactattggagaaaaagaaaacggaactggcccagaaagcaaggaaggagattgctgactatctggctgctgggaaagatgaacgagctcggatccgtgtggagcacattatccgggaagactacctcgtggaggccatggagatcctggagctgtactgtgacctgctgctggctcggtttggccttatccagtctatgaaggaactagattctggtctggctgaatctgtgtctacattgatctgggctgctcctcgactccagtcagaagtggctgagttgaaaatagttgctgatcagctctgtgccaagtatagcaaggaatatggcaagctatgtaggaccaaccagattggaactgtgaatgacaggctaatgcacaagctgagtgtggaagccccacccaaaatcctggtggagagatacctgattgaaattgcaaagaattacaacgtaccctatgaacctgactctgtggtcatggcagaagctcctcctggggtagagacagatcttattgatgttggattcacagatgatgtgaagaaaggaggccctggaagaggagggagtggtggcttcacagcaccagttggtggacctgatggaacggtgccaatgcccatgcccatgcccatgcctatgccatctgcaaatacgcctttctcatatccactgccaaagggacca

SEQ ID NO: 142580 - DNA, 1500 bp, Homo sapiens
  Payload ID: 8170
  Gene Symbol: IST1
  Gene Name: increased sodium tolerance 1 homolog (yeast)
  Uniprot ID: P53990
  ENST ID: ENST00000544564
  CDS Start-End: 323-1423
tagagacagattttcgcaatgttgaccaggctggtctcgaactcctgacctcaagtgatccccctgccttaccctcccaaaatgctgggattacagagatactgtttcgaataattggcttgttggggtacaattcacagttgatatattacaggatctaaatagacagcgatgcggtttcactatggtgtccaggctggtctgcaactcccgggctcaagcgatcctcccgccccgcctctcaaagtgctgggaaggtcccttccaggcttaagcagcgataatggttttcaagttaaaaacaaaggaggaacagcacagcatgctgggctctggatttaaagctgagcgcttaagagtgaatttgagattagtcataaatcgccttaaactattggagaaaaagaaaacggaactggcccagaaagcaaggaaggagattgctgactatctggctgctgggaaagatgaacgagctcggatccgtgtggagcacattatccgggaagactacctcgtggaggccatggagatcctggagctgtactgtgacctgctgctggctcggtttggccttatccagtctatgaaggaactagattctggtctggctgaatctgtgtctacattgatctgggctgctcctcgactccagtcagaagtggctgagttgaaaatagttgctgatcagctctgtgccaagtatagcaaggaatatggcaagctatgtaggaccaaccagattggaactgtgaatgacaggctaatgcacaagctgagtgtggaagccccacccaaaatcctggtggagagatacctgattgaaattgcaaagaattacaacgtaccctatgaacctgactctgtggtcatggcagaagctcctcctggggtagagacagatcttattgatgttggattcacagatgatgtgaagaaaggaggccctggaagaggagggagtggtggcttcacagcaccagttggtggacctgatggaacggtgccaatgcccatgcccatgcccatgcctatgccatctgcaaatacgcctttctcatatccactgccaaagggaccatcagatttcaatggactgccaatggggacttatcaggcctttcccaatattcatccacctcagataccagcaactcccccatcgtatgaatctgtagatgacattaatgctgataagaatatctcttctgcacagattgttggtcctggacccaagccagaagcctctgcaaagcttccttccagacctgcagataactatgacaactttgtcctaccagagttgccatctgtgccagacacactaccaactgcatctgctggtgccagcacctcagcatctgaagacattgactttgatgatctttcccggaggtttgaagagctgaaaaagaaaacataggtctcttaaaccaggcaactttcacgttttgggagttgagactgagcaatttctccttgtaacaaagaatctccatg

SEQ ID NO: 142581 - DNA, 1125 bp, Homo sapiens
  Payload ID: 8170
  Gene Symbol: IST1
  Gene Name: increased sodium tolerance 1 homolog (yeast)
  Uniprot ID: P53990
  ENST ID: ENST00000538850
  CDS Start-End: 130-786
ctgaagtcggtgtctgctgcgttcacggcaggattcggttaggttgctgatcagctctgtgccaagtatagcaaggaatatggcaagctatgtaggaccaaccagattggaactgtgaatgacaggctaatgcacaagctgagtgtggaagccccacccaaaatcctggtggagagatacctgattgaaattgcaaagaattacaacgtaccctatgaacctgactctgtggtcatggcagaagctcctcctggggtagagacagatcttattgatgttggattcacagatgatgtgaagaaaggaggccctggaagaggagggagtggtggcttcacagcaccagttggtggacctgatggaacggtgccaatgcccatgcccatgcccatgcctatgccatctgcaaatacgcctttctcatatccactgccaaagggaccatcagatttcaatggactgccaatggggacttatcaggcctttcccaatattcatccacctcagataccagcaactcccccatcgtatgaatctgtagatgacattaatgctgataagaatatctcttctgcacagattgttggtcctggacccaagccagaagcctctgcaaagcttccttccagacctgcagataactatgacaactttgtcctaccagagttgccatctgtgccagacacactaccaactgcatctgctggtgccagcacctcagcatctgaagacattgactttgatgatctttcccggaggtttgaagagctgaaaaagaaaacataggtctcttaaaccaggcaactttcacgttttgggagttgagactgagcaatttctccttgtaacaaagaatctccatgaaattctgtttcatctgttaaccgtcactcagcacaacactccctctgggctctcttcctgctcctccagattctgctgctttccagttctctgttgatcctgagactaacaattggagactgaggccagagcaactggctcctggcagctgtgcttgtccgtttcctgtcagagtgatcccaggtttcctcctggcccgtcccatggtccctccacaggagtgtgagaggatgggggaagcactgtgggaagaccaccaaa

SEQ ID NO: 142582 - DNA, 823 bp, Homo sapiens
  Payload ID: 8170
  Gene Symbol: IST1
  Gene Name: increased sodium tolerance 1 homolog (yeast)
  ENST ID: ENST00000536027
  CDS Start-End: 1-258
atgcctatgccatctgcaaatacgcctttctcatatccactgccaaagggaccatcagatttcaatggactgccaatggggacttatcaggcctttcccaatattcatccacctcagataccagcaactcccccatcgtatgaatctctgatgtgttctaccttgggcctgagtttttcttatgctttggttttgcatgcgtcacataacccacagccgttggtaggaatgaggtcgaaaatcttcatcagtatttgaggacttggttcttaagatatattcaagaatgctttccctttgcccaaaggtgaaagtatcattaaagttgtcttagtatggtagatgacattaatgctgataagaatatctcttctgcacagattgttggtcctggacccaagccagaagcctctgcaaagcttccttccagacctgcagataactatgacaactttgtcctaccagagttgccatctgtgccagacacactaccaactgcatctgctggtgccagcacctcagcatctgaagacattgactttgatgatctttcccggaggtttgaagagctgaaaaagaaaacataggtctcttaaaccaggcaactttcacgttttgggagttgagactgagcaatttctccttgtaacaaagaatctccatgaaattctgtttcatctgttaaccgtcactcagcacaacactccctctgggctctcttcctgctcctccagattctgctgctttccagttctctgttgatcctgagactaacaattggagactgaggccagagcaactggctcctggcagctgtgcttgt

SEQ ID NO: 142583 - DNA, 3583 bp, Homo sapiens
  Payload ID: 8170
  Gene Symbol: IST1
  Gene Name: increased sodium tolerance 1 homolog (yeast)
  Uniprot ID: P53990
  ENST ID: ENST00000606369
  CDS Start-End: 101-757
ccgcccgcgcttgttgtgctgaggccgagggagtcgccattttggatggtgaaccctgaagtcggtgtctgctgcgttcacggcaggattcggttagctaatgcacaagctgagtgtggaagccccacccaaaatcctggtggagagatacctgattgaaattgcaaagaattacaacgtaccctatgaacctgactctgtggtcatggcagaagctcctcctggggtagagacagatcttattgatgttggattcacagatgatgtgaagaaaggaggccctggaagaggagggagtggtggcttcacagcaccagttggtggacctgatggaacggtgccaatgcccatgcccatgcccatgcctatgccatctgcaaatacgcctttctcatatccactgccaaagggaccatcagatttcaatggactgccaatggggacttatcaggcctttcccaatattcatccacctcagataccagcaactcccccatcgtatgaatctgtagatgacattaatgctgataagaatatctcttctgcacagattgttggtcctggacccaagccagaagcctctgcaaagcttccttccagacctgcagataactatgacaactttgtcctaccagagttgccatctgtgccagacacactaccaactgcatctgctggtgccagcacctcagcatctgaagacattgactttgatgatctttcccggaggtttgaagagctgaaaaagaaaacataggtctcttaaaccaggcaactttcacgttttgggagttgagactgagcaatttctccttgtaacaaagaatctccatgaaattctgtttcatctgttaaccgtcactcagcacaacactccctctgggctctcttcctgctcctccagattctgctgctttccagttctctgttgatcctgagactaacaattggagactgaggccagagcaactggctcctggcagctgtgcttgtccgtttcctgtcagagtgatcccaggtttcctcctggcccgtcccatggtccctccacaggagtgtgagaggatgggggaagcactgtgggaagaccaccaaagatggctggacagtgggagagagcacgttgtgaagcatcccagcctcgtgttgaggttccagacttagaaacagacccctctgtacagggggattgtggtgagtgagaatcaaggccaccttgtgtgttttctcactctcgaatgcaagtgggagagggaaaatgactcgggacgccattgtaacggttcctggaagctgggccctctcattggcatatacagtactcctcgctgcagggcactgtcccaccgggatccagttgcaaagtttgtcttgacagttgaaggcctcgcttagttgtactggattctcagggagccctctgtggccttttgctttgcgtgctgtttcccttgtaccagagggcggcaccgtggaaattctgttttccctgtagcatattgtgttggattgcattactggcagagaaaggacaaggtgccattcaagtcctagggtgggcttccagctgccttaatagaagtactcaagtcttttgggtagtgagctggaaagcctacaggaaaagaggggtacctgttttcatttgaaaactttgattcatggaacctttaaaactaatctcagaaaaatttttggtgcccatgcagctgtagttgttcactgctttcctggatggatgggactcttatgtcataacttctgttactcctttggcccatagctaaggtcatccttccccacaggggtggctttgggattggatgatacagcttttgcttctgtgtagtatacctgtacatacttgtttcaggcagcctttctttaatgttttcagttggtttgtattctgtagctcagtagctgctaataaagttaaagatcctgtgtcctgctttctctactgtttggtcagatgatgaagtataaatctggattttagtggagaatattttaaccaagtgatccatgtaaaccagcccttagtttcaggattcctggagcagtacagagctcattttgatctctgtatttagatagcccagatagcatctgtgaatttccttggtcttcctcagtggcagggctccgcatctgccatgcctcatccttggatgtttatttttagtaagttgcagtgagctcacttctgactgcttcatttcccgcagccatcctgggccatgggtggtgagttctgttacttgctgcttggcagcagagctagtttgtctcgtagtattcttgcattgttaatcctatcttgacagtgccaagatccataagaacttgggaccaaggggattttgattcctaacttacagaattaaaaacaaagtatattataattttaaagctatgccatgcaaagataagtagtaatacgctaataaatactaagccaagtaggagataacaggattaaggtagttcatctaaaacttcagtgtcactgcccactgctgtcgtggctgcttgctcagatgaggttttttggggccaactgattcctaacaaatttgagagcttctgtagcagtgtatctattagtgcagcttctttctgagtattgaagacaaaaagagaaaagtgagaaaattgaaattactgctaatagtggagtaaaaaaagtaccaaagatttttaaaaaattagtaaatgtaaagatactatttctttaataatttgcagtcaggcattggagtgtttccactaatggttgcgagccaactatttataggacaatggctatagaatattatgtagtcttataaattgggtttcctaggaagatagctggcagagcttttgaaactaataaagggaatatgatactgtgcattataaattatgtcagcccgtcatcttaggggcagttacagtggagctttcccagtgatataacagcatgctagtttatcttttagttacctaccttaagcgactttctttcttttccaaaggccatgagaatggccgaaacgaaaagattaattaccacaagtaccatcaagatgacactggtgaggatcagaaaggtgcccaggactgggtctaaagcgaaaacctgggaaaacaataagaacacttgcagtgactgacaatttagtttatactttacaaacataagctatatgctagtgtttgggatcttatcagaagaaaagcttatccgaaggaaacttagggagagagtcaaaagataataagaaggaaaatacttttaaatggacagaagagcaggaatgactcattttaaggaggttaagataattgtgactgcagggctttcacaagaaaacaggtgagttgcagtggaattggaaatgattcaaatgtcacatgagttttggcaaaaaatacatctaatcatggaagctaaaagtgggaggggggtaagcaaacactgaaagattaaatgcataccagaaatgagaatgcacactgtctctgccatatcaagaaactacaaccctaaacacaggagcattccaataaaagttaacaggttggccacagaaaa

SEQ ID NO: 142584 - DNA, 126 bp, Homo sapiens
  Payload ID: 8170
  Gene Symbol: IST1
  Gene Name: increased sodium tolerance 1 homolog (yeast)
  ENST ID: ENST00000626438
  CDS Start-End: 1-126
atgctgggctctggatttaaagctgagcgcttaagagtgaatttgagattagtcataaatcgccttaaactattggagaaaaagaaaagcagaagctcctcctggggtagagacagatcttattga

SEQ ID NO: 142585 - DNA, 2023 bp, Homo sapiens
  Payload ID: 8171
  Gene Symbol: IHH
  Gene Name: indian hedgehog
  Uniprot ID: Q14623
  ENST ID: ENST00000295731
  CDS Start-End: 1-1236
atgtctcccgcccggctccggccccgactgcacttctgcctggtcctgttgctgctgctggtggtgccggcggcatggggctgcgggccgggtcgggtggtgggcagccgccggcgaccgccacgcaaactcgtgccgctcgcctacaagcagttcagccccaatgtgcccgagaagaccctgggcgccagcggacgctatgaaggcaagatcgctcgcagctccgagcgcttcaaggagctcacccccaattacaatccagacatcatcttcaaggacgaggagaacacaggcgccgaccgcctcatgacccagcgctgcaaggaccgcctgaactcgctggctatctcggtgatgaaccagtggcccggtgtgaagctgcgggtgaccgagggctgggacgaggacggccaccactcagaggagtccctgcattatgagggccgcgcggtggacatcaccacatcagaccgcgaccgcaataagtatggactgctggcgcgcttggcagtggaggccggctttgactgggtgtattacgagtcaaaggcccacgtgcattgctccgtcaagtccgagcactcggccgcagccaagacgggcggctgcttccctgccggagcccaggtacgcctggagagtggggcgcgtgtggccttgtcagccgtgaggccgggagaccgtgtgctggccatgggggaggatgggagccccaccttcagcgatgtgctcattttcctggaccgcgagcctcacaggctgagagccttccaggtcatcgagactcaggaccccccacgccgcctggcactcacacccgctcacctgctctttacggctgacaatcacacggagccggcagcccgcttccgggccacatttgccagccacgtgcagcctggccagtacgtgctggtggctggggtgccaggcctgcagcctgcccgcgtggcagctgtctctacacacgtggccctcggggcctacgccccgctcacaaagcatgggacactggtggtggaggatgtggtggcatcctgcttcgcggccgtggctgaccaccacctggctcagttggccttctggcccctgagactctttcacagcttggcatggggcagctggactccgggggagggtgtgcattggtacccccagctgctctaccgcctggggcgtctcctgctagaagagggcagcttccacccactgggcatgtccggggcagggagctgaaaggactccaccgctgccctcctggaactgctgtactgggtccagaagcctctcagccaggagggagctggccctggaagggacctgagctgggggacactggctcctgccatctcctctgccatgaagatacaccattgagacttgactgggcaacaccagcgtcccccacccccgtcgtggtgtagtcatagagctgcaagctgagctggcgaggggatggttgttgacccctctctcctagagaccttgaggctggcacggcgactcccaactcagcctgctctcactacgagttttcatactctgcctcccccattggggagggcccattccatccatcttaggcccctttgggtgggcttgcgcctcagttgatgctgctaaattccctgggagccagcatggatctggctggacccgatgctgtccagaactgggaaggccacaggggtggggcagccatcccggccattctgaggtatgacattcctccccggccacactcctcaagacacatccagagactgttgctgtctgtgggcagagttctgtgttctggccaatgtgaccgtagtgccggggactgggggaggtgggttggatgtgcttgccacccccccggctaagctcccccttctgctgaaccatgatccccaccccctccgccggtcagtctcccataccttatttattggagtggagggggaagcccatgggagaattttggggatgttttggtcttttcttccttttgtaataaaaattatttaagttgttagagcca

SEQ ID NO: 142586 - DNA, 1525 bp, Homo sapiens
  Payload ID: 8172
  Gene Symbol: IDO1
  Gene Name: indoleamine 2,3-dioxygenase 1
  ENST ID: ENST00000253513
  CDS Start-End: 55-567
atgctctgaaaactcttcagacactgaggggcaccagaggagcagactacaagaatggcacacgctatggaaaactcctggacaatcagtaaagagtaccatattgatgaagaagtgggctttgctctgccaaatccacaggaaaatctacctgatttttataatgactggatgttcattgctaaacatctgcctgatctcatagagtctggccagcttcgagaaagagttgagaagttaaacatgctcagcattgatcatctcacagaccacaagtcacagcgccttgcacgtctagttctgggatgcatcaccatggcatatgtgtggggcaaaggtcatggagatgtccgtaaggtcttgccaagaaatattgctgttccttactgccaactctccaagaaactggaactgcctcctattttggtttatgcagactgtgtcttggcaaactggaagaaaaaggatcctaataagtatgtaaacagaacatggacgttttgttctcatttcgtgatggagactgcagtaaaggattcttcctggtctctctattggtggaaatagcagctgcttctgcaatcaaagtaattcctactgtattcaaggcaatgcaaatgcaagaacgggacactttgctaaaggcgctgttggaaatagcttcttgcttggagaaagcccttcaagtgtttcaccaaatccacggcaaatcatgtgaacccaaaagcatttttcagtgttcttcgcatatatttgtctggctggaaaggcaacccccagctatcagacggtctggtgtatgaagggttctgggaagacccaaaggagtttgcagggggcagtgcaggccaaagcagcgtctttcagtgctttgacgtcctgctgggcatccagcagactgctggtggaggacatgctgctcagttcctccaggacatgagaagatatatgccaccagctcacaggaacttcctgtgctcattagagtcaaatccctcagtccgtgagtttgtcctttcaaaaggtgatgctggcctgcgggaagcttatgacgcctgtgtgaaagctctggtctccctgaggagctaccatctgcaaatcgtgactaagtacatcctgattcctgcaagccagcagccaaaggagaataagacctctgaagacccttcaaaactggaagccaaaggaactggaggcactgatttaatgaatttcctgaagactgtaagaagtacaactgagaaatcccttttgaaggaaggttaatgtaacccaacaagagcacattttatcatagcagagacatctgtatgcattcctgtcattacccattgtaacagagccacaaactaatactatgcaatgttttaccaataatgcaatacaaaagacctcaaaatacctgtgcatttcttgtaggaaaacaacaaaaggtaattatgtgtaattatactagaagttttgtaatctgtatcttatcattggaataaaatgacattcaataaataaaaatgcataagatata

SEQ ID NO: 142587 - DNA, 1138 bp, Homo sapiens
  Payload ID: 8172
  Gene Symbol: IDO1
  Gene Name: indoleamine 2,3-dioxygenase 1
  ENST ID: ENST00000519154
  CDS Start-End: 599-1138
gaacaggacaaccaaaactgctctgctcttccgaaaattgcagtcagggaacctgggacccggcaagccagcagaaggagccattgactaatagttgagtataacacaggttgtgtttccgggctgctgaaacatgacactaatattttcaaagaactgtggaagcctaaaaggaagccaatgagaaataactaaatgagagtttaggactgcagccttcattttcattcaaagatttaaaagtttccataaagtaaaatgttcttctccggccacctgttttcatagttctgtgttttccttcaggcctttctggcttcctatatggcagtaagaaaatgatgtgcttaatgattacaaatttcatatggaatacgaactttcagtttgtacatatgatgcacagagatgcttttgtggttttattggttttcatattacaaacaaagaaactagaaaatgaaaccattccaaaagtggaagtaatttctcactgcccctgtgataaactgtggtcactggctgtggcagcaactattataagatgctctgaaaactcttcagacactgaggggcaccagaggagcagactacaagaatggcacacgctatggaaaactcctggacaatcagtaaagagtaccatattgatgaagaagtgggctttgctctgccaaatccacaggaaaatctacctgatttttataatgactggatgttcattgctaaacatctgcctgatctcatagagtctggccagcttcgagaaagagttgagaagttaaacatgctcagcattgatcatctcacagaccacaagtcacagcgccttgcacgtctagttctgggatgcatcaccatggcatatgtgtggggcaaaggtcatggagatgtccgtaaggtcttgccaagaaatattgctgttccttactgccaactctccaagaaactggaactgcctcctattttggtttatgcagactgtgtcttggcaaactggaagaaaaaggatcctaataagcccctgacttatgagaacatggacgttttgttctcatttcgtgatggagactgcagtaaaggattcttcctggtctctctattggtggaaatagcagctgcttctgcaatcaaagta

SEQ ID NO: 142588 - DNA, 612 bp, Homo sapiens
  Payload ID: 8172
  Gene Symbol: IDO1
  Gene Name: indoleamine 2,3-dioxygenase 1
  ENST ID: ENST00000518804
  CDS Start-End: 379-612
ttttctcctattaatctgctttgtcatttgattttcaatgaaccttcagagggcaaaaggaaagttttccctcagctccaacagttttggcccagtgaacaggacaaccaaaactgctctgctcttccgaaaattgcagtcagggaacctgggacccggcaagccagcagaaggaacacagttggagactctggttattttaccaaggctttgactgaaatgccatattttcagatgtgaccagacagctttaagaaactgaggttgatattatgaagcccataggagcttttggaaaaactggtctaatatcctaaatacacggttcacataatgggcttgtgacactgaggggcaccagaggagcagactacaagaatggcacacgctatggaaaactcctggacaatcagtaaagagtaccatattgatgaagaagtgggctttgctctgccaaatccacaggaaaatctacctgatttttataatgactggatgttcattgctaaacatctgcctgatctcatagagtctggccagcttcgagaaagagttgagaagttaaacatgctcagcattgatcatctcacagaccacaagtcacagcgcctt

SEQ ID NO: 142589 - DNA, 572 bp, Homo sapiens
  Payload ID: 8172
  Gene Symbol: IDO1
  Gene Name: indoleamine 2,3-dioxygenase 1
  ENST ID: ENST00000522840
  CDS Start-End: 431-572
aaccaaaactgctctgctcttccgaaaattgcagtcagggaacctgggacccggcaagccagcagaaggagttaaggaaaatgtttgttctgttaagctttacagaaatggaacacagttggagactctggttattttaccaaggctttgactgaaatgccatattttcagatgtgaccagacagctttaagaaactgaggttgatattatgaagcccataggagcttttggaaaaactggtctaatatcctaaatacacggttcacataatgggcttgtgaaactagaaaatgaaaccattccaaaagtggaagtaatttctcactgcccctgtgataaactgtggtcactggctgtggcagcaactattataagatgctctgaaaactcttcagacactgaggggcaccagaggagcagactacaagaatggcacacgctatggaaaactcctggacaatcagtaaagagtaccatattgatgaagaagtgggctttgctctgccaaatccacaggaaaatctacctgatttttataatgactggatgttcattgctaaacatctgcctg

SEQ ID NO: 142590 - DNA, 1709 bp, Homo sapiens
  Payload ID: 8172
  Gene Symbol: IDO1
  Gene Name: indoleamine 2,3-dioxygenase 1
  Uniprot ID: P14902
  ENST ID: ENST00000522495
  CDS Start-End: 257-1468
aggacaaccaaaactgctctgctcttccgaaaattgcagtcagggaacctgggacccggcaagccagcagaaggaggaacgggcaacttggtttcttctttagcttccttgttctcattaagattgaacaatgcctctaaagtgaaccacagacttgcatgcaagctgaaaacctttaccaaatgcagtcttaatttgtactttgagaaaaacattttcaagacactgaggggcaccagaggagcagactacaagaatggcacacgctatggaaaactcctggacaatcagtaaagagtaccatattgatgaagaagtgggctttgctctgccaaatccacaggaaaatctacctgatttttataatgactggatgttcattgctaaacatctgcctgatctcatagagtctggccagcttcgagaaagagttgagaagttaaacatgctcagcattgatcatctcacagaccacaagtcacagcgccttgcacgtctagttctgggatgcatcaccatggcatatgtgtggggcaaaggtcatggagatgtccgtaaggtcttgccaagaaatattgctgttccttactgccaactctccaagaaactggaactgcctcctattttggtttatgcagactgtgtcttggcaaactggaagaaaaaggatcctaataagcccctgacttatgagaacatggacgttttgttctcatttcgtgatggagactgcagtaaaggattcttcctggtctctctattggtggaaatagcagctgcttctgcaatcaaagtaattcctactgtattcaaggcaatgcaaatgcaagaacgggacactttgctaaaggcgctgttggaaatagcttcttgcttggagaaagcccttcaagtgtttcaccaaatccacgatcatgtgaacccaaaagcatttttcagtgttcttcgcatatatttgtctggctggaaaggcaacccccagctatcagacggtctggtgtatgaagggttctgggaagacccaaaggagtttgcagggggcagtgcaggccaaagcagcgtctttcagtgctttgacgtcctgctgggcatccagcagactgctggtggaggacatgctgctcagttcctccaggacatgagaagatatatgccaccagctcacaggaacttcctgtgctcattagagtcaaatccctcagtccgtgagtttgtcctttcaaaaggtgatgctggcctgcgggaagcttatgacgcctgtgtgaaagctctggtctccctgaggagctaccatctgcaaatcgtgactaagtacatcctgattcctgcaagccagcagccaaaggagaataagacctctgaagacccttcaaaactggaagccaaaggaactggaggcactgatttaatgaatttcctgaagactgtaagaagtacaactgagaaatcccttttgaaggaaggttaatgtaacccaacaagagcacattttatcatagcagagacatctgtatgcattcctgtcattacccattgtaacagagccacaaactaatactatgcaatgttttaccaataatgcaatacaaaagacctcaaaatacctgtgcatttcttgtaggaaaacaacaaaaggtaattatgtgtaattatactagaagttttgtaatctgtatcttatcattggaataaaatgacattcaataaat

SEQ ID NO: 142591 - DNA, 2097 bp, Homo sapiens
  Payload ID: 8172
  Gene Symbol: IDO1
  Gene Name: indoleamine 2,3-dioxygenase 1
  Uniprot ID: P14902
  ENST ID: ENST00000518237
  CDS Start-End: 640-1851
tgagaagggcaaatgctatcattggaaaaactgacaaaagtcccaataggaaaaataaggaagtggagagttactatgtttctaatttttcatgtgcttctatttttttcctacttcagagccattgactaatagttgagtataacacaggttgtgtttccgggctgctgaaacatgacactaatattttcaaagaactgtggaagcctaaaaggaagccaatgagaaataactaaatgagagtttaggactgcagccttcattttcattcaaagatttaaaagtttccataaagtaaaatgttcttctccggccacctgttttcatagttctgtgttttccttcaggcctttctggcttcctatatggcagtaagaaaatgatgtgcttaatgattacaaatttcatatggaatacgaactttcagtttgtacatatgatgcacagagatgcttttgtggttttattggttttcatattacaaacaaagaaactagaaaatgaaaccattccaaaagtggaagtaatttctcactgcccctgtgataaactgtggtcactggctgtggcagcaactattataagatgctctgaaaactcttcagacactgaggggcaccagaggagcagactacaagaatggcacacgctatggaaaactcctggacaatcagtaaagagtaccatattgatgaagaagtgggctttgctctgccaaatccacaggaaaatctacctgatttttataatgactggatgttcattgctaaacatctgcctgatctcatagagtctggccagcttcgagaaagagttgagaagttaaacatgctcagcattgatcatctcacagaccacaagtcacagcgccttgcacgtctagttctgggatgcatcaccatggcatatgtgtggggcaaaggtcatggagatgtccgtaaggtcttgccaagaaatattgctgttccttactgccaactctccaagaaactggaactgcctcctattttggtttatgcagactgtgtcttggcaaactggaagaaaaaggatcctaataagcccctgacttatgagaacatggacgttttgttctcatttcgtgatggagactgcagtaaaggattcttcctggtctctctattggtggaaatagcagctgcttctgcaatcaaagtaattcctactgtattcaaggcaatgcaaatgcaagaacgggacactttgctaaaggcgctgttggaaatagcttcttgcttggagaaagcccttcaagtgtttcaccaaatccacgatcatgtgaacccaaaagcatttttcagtgttcttcgcatatatttgtctggctggaaaggcaacccccagctatcagacggtctggtgtatgaagggttctgggaagacccaaaggagtttgcagggggcagtgcaggccaaagcagcgtctttcagtgctttgacgtcctgctgggcatccagcagactgctggtggaggacatgctgctcagttcctccaggacatgagaagatatatgccaccagctcacaggaacttcctgtgctcattagagtcaaatccctcagtccgtgagtttgtcctttcaaaaggtgatgctggcctgcgggaagcttatgacgcctgtgtgaaagctctggtctccctgaggagctaccatctgcaaatcgtgactaagtacatcctgattcctgcaagccagcagccaaaggagaataagacctctgaagacccttcaaaactggaagccaaaggaactggaggcactgatttaatgaatttcctgaagactgtaagaagtacaactgagaaatcccttttgaaggaaggttaatgtaacccaacaagagcacattttatcatagcagagacatctgtatgcattcctgtcattacccattgtaacagagccacaaactaatactatgcaatgttttaccaataatgcaatacaaaagacctcaaaatacctgtgcatttcttgtaggaaaacaacaaaaggtaattatgtgtaattatactagaagttttgtaatctgtatcttatcattggaataaaatgacattcaataaataaaaa

SEQ ID NO: 142592 - DNA, 1227 bp, Homo sapiens
  Payload ID: 8173
  Gene Symbol: IDO2
  Gene Name: indoleamine 2,3-dioxygenase 2
  Uniprot ID: Q6ZQW0
  ENST ID: ENST00000389060
  CDS Start-End: 1-1224
atggagccccacagaccgaatgtgaagacagcagtgccattgtctttggaaagctatcacatatctgaagagtatggctttcttcttccagattctctgaaagaacttccagatcattataggccttggatggaaattgccaacaaacttcctcaattgattgatgctcaccagcttcaagctcatgtggacaagatgcccctgctgagctgccagttcctgaagggtcaccgggagcagcgcctggcccacctggtcctgagcttcctcaccatgggttatgtctggcaggaaggagaggcgcagcctgcagaggtcctgccaaggaatcttgcccttccatttgtcgaagtctccaggaacttggggctccctcctatcctggtccactcagacttggtgctgacgaactggaccaaaaaagatccagacggattcctggaaattgggaacctggagaccatcatctcatttcctgggggagagagcctgcatggttttatactggtgactgctttggtagagaaagaagcagtgcctgggataaaggctcttgttcaggccacgaatgctatcttgcagcccaaccaggaggccctgctccaagccctgcagcgactgagactgtctattcaggacatcaccaaaaccttaggacagatgcatgattatgtagatccagacatattttatgcaggcatccggatctttctctctggatggaaagacaacccagcaatgcctgcagggctgatgtatgaaggagtttcccaagagcccctgaaatactccggcgggagtgcagctcagagcacagtgcttcatgcctttgatgagttcttaggcattcgtcatagcaaggaaagtggtgactttctgtacagaatgagggattacatgcctccttcccataaggccttcatagaagacatccactcagcaccttccctgagggactacatcctgtcatctggacaggaccacttgctgacagcttataaccagtgtgtgcaggccctggcagagctgcggagctatcacatcaccatggtcaccaaatacctcatcacagctgcagccaaggcaaagcatgggaagccaaaccatctcccagggcctcctcaggctttaaaagacaggggcacaggtggaaccgcagttatgagctttcttaagagtgtcagggataagaccttggagtcaatccttcacccacgtggttaggag

SEQ ID NO: 142593 - DNA, 2294 bp, Homo sapiens
  Payload ID: 8173
  Gene Symbol: IDO2
  Gene Name: indoleamine 2,3-dioxygenase 2
  ENST ID: ENST00000502986
  CDS Start-End: 243-1505
agtccagatgatagttaagaaagcagtaagaatacagagagtccacaatgagatgaaaatgcactgccagttgaaacatcctcctacactggagctttataaatattttaaagacaaggattggattagatttgacattagaaatgtaccataatacagaaggcaatggacacctaaagaacagaatgaaaaccttcttaggaaatgaagcttgacacttcacccaccaggccaccacaagaatgttgcattttcattattatgatacttcaaacaaaataatggagccccacagaccgaatgtgaagacagcagtgccattgtctttggaaagctatcacatatctgaagagtatggctttcttcttccagattctctgaaagaacttccagatcattataggccttggatggaaattgccaacaaacttcctcaattgattgatgctcaccagcttcaagctcatgtggacaagatgcccctgctgagctgccagttcctgaagggtcaccgggagcagcgcctggcccacctggtcctgagcttcctcaccatgggttatgtctggcaggaaggagaggcgcagcctgcagaggtcctgccaaggaatcttgcccttccatttgtcgaagtctccaggaacttggggctccctcctatcctggtccactcagacttggtgctgacgaactggaccaaaaaagatccagacggattcctggaaattgggaacctggagaccatcatctcatttcctgggggagagagcctgcatggttttatactggtgactgctttggtagagaaagaagcagtgcctgggataaaggctcttgttcaggccacgaatgctatcttgcagcccaaccaggaggccctgctccaagccctgcagcgactgagactgtctattcaggacatcaccaaaaccttaggacagatgcatgattatgtagatccagacatattttatgcaggcatccggatctttctctctggatggaaagacaacccagcaatgcctgcagggctgatgtatgaaggagtttcccaagagcccctgaaatactccggcgggagtgcagctcagagcacagtgcttcatgcctttgatgagttcttaggcattcgtcatagcaaggaaagtggtgactttctgtacagaatgagggattacatgcctccttcccataaggccttcatagaagacatccactcagcaccttccctgagggactacatcctgtcatctggacaggaccacttgctgacagcttataaccagtgtgtgcaggccctggcagagctgcggagctatcacatcaccatggtcaccaaatacctcatcacagctgcagccaaggcaaagcatgggaagccaaaccatctcccagggcctcctcaggctttaaaagacaggggcacaggtggaaccgcagttatgagctttcttaagagtgtcagggataagaccttggagtcaatccttcacccacgtggttaggaggctgccctctccccagcaatgcagagcccccatggagggcaggtgggcctggagaatgagggtcagggttctgcctgggatcatccaggaaggatctcagccctattcatgtttctgctctacagagcactatattctccttgttgagagctgttggcttcacaaaggagagttgatgtggccaagcctttccctccctacctgatcactgcttaacggcatgtataatggatacttcctcatgcagaacccccagaggagtgactgtatgccattctctttgccaagtaatagaaaaccaatctaaatgtcaaaaatcagataaaattgcctggggatacattacttgttgattttcttaaaaaacaaattcacttaacaattcattaagttcatactgagcactgcctccaagattaaaaccaggatttctgtggtcccagaccagccctcttctccctgaatgtgttgagttggtggcaggaggttggaaatgctccagtggagatgggaagatagaggatgctgacaataaggacttggaagtcactagtgtgaaaatgagcagttaatgatatgggaacggatgagactttccacgtggtacctagatttgcaaattctattgtaatgcctttatttttagaagaattattctctcttcttactctgaaaatctgtatttgtaaaatgaatgaatggatcctatataagtaaataagaaaactgggaataagtagtaaatcaatgtgtttagtgtgcaaataaatgtaaatgcttttattg

SEQ ID NO: 142594 - DNA, 2559 bp, Homo sapiens
  Payload ID: 8174
  Gene Symbol: INMT
  Gene Name: indolethylamine N-methyltransferase
  Uniprot ID: O95050
  ENST ID: ENST00000013222
  CDS Start-End: 17-808
acatttcagggacaccatgaagggtggcttcactgggggtgatgagtaccagaagcacttcctgcccagggactacttggctacttactacagcttcgatggcagcccctcacccgaggccgagatgctgaagtttaacttggaatgtctccacaagaccttcggccctggaggcctccaaggggacacgctgattgacattggctcaggtcctaccatctaccaagttcttgctgcctgtgattccttccaagacatcactctctccgactttaccgaccgcaaccgggaggagctggaaaagtggctgaagaaggagccgggggcctatgactggaccccagcggtgaaattcgcctgtgagctggaaggaaacagcggccgatgggaggagaaggaggagaagctgcgggcagcggtgaagcgggtgctcaagtgcgatgtccacctgggcaacccgctggccccggctgtgttgcctctcgccgactgtgtgctcaccctgctggccatggagtgtgcctgctgtagccttgatgcctaccgcgctgccctgtgcaaccttgcctcactgctcaagccgggtggccacctggtgaccactgtcacgcttcggctcccgtcctacatggtggggaagcgtgaattttcctgcgtggccctggagaaagaggaggtggagcaggctgtcctggatgctggctttgacattgaacagctcctacacagtccccagagctactctgtcaccaatgctgccaacaatggggtctgcttcattgtggctcgcaagaagcctgggccctgagccaggagggccagccagaggtctggtcaggctgtgaggccttggccatctgtatgctagagaggggtgaggaatggatactgtctaacagtctctgatttcaacactaacattccatcttctgaaattctgagattctaacatccttgttttagaattctaagtttccaacattcctcattctaggatcctaggagtggaattttccattttctaatatactaagccttacagctatcttagatgcgatctgactcctgtgtgactgtggagcacccagggacgtggttttagagtctacctaatatgttaaggacaaggaaacctctgagtctacctaatatgttaaggacaaggaaacctctggacagtggtatattggggaattttttttttttttttgagacggagtctggctctgtcacccaggctagagtgcaatggcacgatctcggctcactgcaagctctgcgtcctgggttgacgccattctcctgcctcagcctcccgagtagctgggactacaggagctcgccaccacacccagctaatttttttttttttttttttatttgagacggagtttcgctctgtcgcccaggctggagtgcagtggcgcgatctcgactcactgcaagctccgcctcccgggttcacgccattctcctgcctcagcctcccgtgtagctgggactacaggcacgcgccaccatgcccggctaatttttgtatttttagtagagatggggtttcaccgtgttagccaggatggtctcgatctcctgacctggtgatccacccaccttggcctcccaaagtgctgggattacaggcgtgagccaccgcacccagccagggggaatgttctataaccagctctgtaaaggaaaagcactgatgtgtggtagtcaccaatttctgtggtgtaaatactcccaccatggttgatttcaagccaccagtggtttaataaccagctcataaatctcctaaatattttacagttgactctcatgagctgattggagtcagctggaacataccactgcctctagactaaggtcagcagatttagcaaatacagactgccccagttcattgaattttagataaatgaaataaatctataaggttaagtatgtccccagaactgcatggaacatgcttaatctaaacaatgatttgttgttcacctgaaattcaaatttagctgggtgtcctgtatttcatctggcaaccctacttcagacccaggtgtaaggtacatggatgtgctttggtcaaggaataggccaaggcagagatccatgcctgcatgactcagtgggtttggtgcacaggcacacacctccacttgttatataacctgtttgtgtaagttcatacttggtctgagccactgttgtctgtaaaaggtaattgtcctgctaatgctgtacaggggctcttggggttcggctcagctcaacatggcttgacatggtgggcacactggcgcccagtaagagagagagagagccaaagctgtccgttttgcagatggacaggaaggagccaggacacagctcagcttgctcacgcccagagagagaaaaagttaagctgctgaccctgaaggcaagggagagcaggctgcacagctgtgtgtggaagccacgggctcaagcagccaaggcagggcggacagtgtgagagagctagtgtaagctgttgatgagagctgttgctgaataaaaccatattcacctgcc

SEQ ID NO: 142595 - DNA, 803 bp, Homo sapiens
  Payload ID: 8174
  Gene Symbol: INMT
  Gene Name: indolethylamine N-methyltransferase
  Uniprot ID: O95050
  ENST ID: ENST00000409539
  CDS Start-End: 15-803
atttcagggacaccatgaagggtggcttcactgggggtgatgagtaccagaagcacttcctgcccagggactacttggctacttactacagcttcgatggcagcccctcacccgaggccgagatgctgaagtttaacttggaatgtctccacaagaccttcggccctggcctccaaggggacacgctgattgacattggctcaggtcctaccatctaccaagttcttgctgcctgtgattccttccaagacatcactctctccgactttaccgaccgcaaccgggaggagctggaaaagtggctgaagaaggagccgggggcctatgactggaccccagcggtgaaattcgcctgtgagctggaaggaaacagcggccgatgggaggagaaggaggagaagctgcgggcagcggtgaagcgggtgctcaagtgcgatgtccacctgggcaacccgctggccccggctgtgttgcctctcgccgactgtgtgctcaccctgctggccatggagtgtgcctgctgtagccttgatgcctaccgcgctgccctgtgcaaccttgcctcactgctcaagccgggtggccacctggtgaccactgtcacgcttcggctcccgtcctacatggtggggaagcgtgaattttcctgcgtggccctggagaaagaggaggtggagcaggctgtcctggatgctggctttgacattgaacagctcctacacagtccccagagctactctgtcaccaatgctgccaacaatggggtctgcttcattgtggctcgcaagaagcctgggccctga

SEQ ID NO: 142596 - DNA, 2645 bp, Homo sapiens
  Payload ID: 8175
  Gene Symbol: ICOS
  Gene Name: inducible T-cell co-stimulator
  Uniprot ID: Q9Y6W8
  ENST ID: ENST00000316386
  CDS Start-End: 68-667
cgagagcctgaattcactgtcagctttgaacactgaacgcgaggactgttaactgtttctggcaaacatgaagtcaggcctctggtatttctttctcttctgcttgcgcattaaagttttaacaggagaaatcaatggttctgccaattatgagatgtttatatttcacaacggaggtgtacaaattttatgcaaatatcctgacattgtccagcaatttaaaatgcagttgctgaaaggggggcaaatactctgcgatctcactaagacaaaaggaagtggaaacacagtgtccattaagagtctgaaattctgccattctcagttatccaacaacagtgtctctttttttctatacaacttggaccattctcatgccaactattacttctgcaacctatcaatttttgatcctcctccttttaaagtaactcttacaggaggatatttgcatatttatgaatcacaactttgttgccagctgaagttctggttacccataggatgtgcagcctttgttgtagtctgcattttgggatgcatacttatttgttggcttacaaaaaagaagtattcatccagtgtgcacgaccctaacggtgaatacatgttcatgagagcagtgaacacagccaaaaaatctagactcacagatgtgaccctataatatggaactctggcacccaggcatgaagcacgttggccagttttcctcaacttgaagtgcaagattctcttatttccgggaccacggagagtctgacttaactacatacatcttctgctggtgttttgttcaatctggaagaatgactgtatcagtcaatggggattttaacagactgccttggtactgccgagtcctctcaaaacaaacaccctcttgcaaccagctttggagaaagcccagctcctgtgtgctcactgggagtggaatccctgtctccacatctgctcctagcagtgcatcagccagtaaaacaaacacatttacaagaaaaatgttttaaagatgccaggggtactgaatctgcaaagcaaatgagcagccaaggaccagcatctgtccgcatttcactatcatactacctcttctttctgtagggatgagaattcctcttttaatcagtcaagggagatgcttcaaagctggagctattttatttctgagatgttgatgtgaactgtacattagtacatactcagtactctccttcaattgctgaaccccagttgaccattttaccaagactttagatgctttcttgtgccctcaattttctttttaaaaatacttctacatgactgcttgacagcccaacagccactctcaatagagagctatgtcttacattctttcctctgctgctcaatagttttatatatctatgcatacatatatacacacatatgtatataaaattcataatgaatatatttgcctatattctccctacaagaatatttttgctccagaaagacatgttcttttctcaaattcagttaaaatggtttactttgttcaagttagtggtaggaaacattgcccggaattgaaagcaaatttattttattatcctattttctaccattatctatgttttcatggtgctattaattacaagtttagttctttttgtagatcatattaaaattgcaaacaaaatcatctttaatgggccagcattctcatggggtagagcagaatattcatttagcctgaaagctgcagttactataggttgctgtcagactatacccatggtgcctctgggcttgacaggtcaaaatggtccccatcagcctggagcagccctccagacctgggtggaattccagggttgagagactcccctgagccagaggccactaggtattcttgctcccagaggctgaagtcaccctgggaatcacagtggtctacctgcattcataattccaggatctgtgaagagcacatatgtgtcagggcacaattccctctcataaaaaccacacagcctggaaattggccctggcccttcaagatagccttctttagaatatgatttggctagaaagattcttaaatatgtggaatatgattattcttagctggaatattttctctacttcctgtctgcatgcccaaggcttctgaagcagccaatgtcgatgcaacaacatttgtaactttaggtaaactgggattatgttgtagtttaacattttgtaactgtgtgcttatagtttacaagtgagacccgatatgtcattatgcatacttatattatcttaagcatgtgtaatgctggatgtgtacagtacagtactgaacttgtaatttgaatctagtatggtgttctgttttcagctgacttggacaacctgactggctttgcacaggtgttccctgagttgtttgcaggtttctgtgtgtggggtggggtatggggaggagaaccttcatggtggcccacctggcctggttgtccaagctgtgcctcgacacatcctcatccccagcatgggacacctcaagatgaataataattcacaaaatttctgtgaaatcaaatccagttttaagaggagccacttatcaaagagattttaacagtagtaagaaggcaaagaataaacatttgatattcagcaactgaaaa

SEQ ID NO: 142597 - DNA, 2528 bp, Homo sapiens
  Payload ID: 8175
  Gene Symbol: ICOS
  Gene Name: inducible T-cell co-stimulator
  Uniprot ID: Q9Y6W8
  ENST ID: ENST00000435193
  CDS Start-End: 36-542
ctgaacgcgaggactgttaactgtttctggcaaacatgaagtcaggcctctggtatttctttctcttctgcttgcgcattaaagttttaacaggagaaatcaatggttctgccaattatgagatgtttatatttcacaacggaggtgtacaaattttatgcaaatatcctgacattgtccagcaatttaaaatgcagttgctgaaaggggggcaaatactctgcgatctcactaagacaaaaggaagtggaaacacagtgtccattaagagtctgaaattctgccattctcagttatccaacaacagtgtctctttttttctatacaacttggaccattctcatgccaactattacttctgcaacctatcaatttttgatcctcctccttttaaagtaactcttacaggaggatatttgcatatttatgaatcacaactttgttgccagctgaagttctggttacccataggatgtgcagcctttgttgtagtctgcattttgggatgcatacttatttgttggcttacaaaaaagatgtgaccctataatatggaactctggcacccaggcatgaagcacgttggccagttttcctcaacttgaagtgcaagattctcttatttccgggaccacggagagtctgacttaactacatacatcttctgctggtgttttgttcaatctggaagaatgactgtatcagtcaatggggattttaacagactgccttggtactgccgagtcctctcaaaacaaacaccctcttgcaaccagctttggagaaagcccagctcctgtgtgctcactgggagtggaatccctgtctccacatctgctcctagcagtgcatcagccagtaaaacaaacacatttacaagaaaaatgttttaaagatgccaggggtactgaatctgcaaagcaaatgagcagccaaggaccagcatctgtccgcatttcactatcatactacctcttctttctgtagggatgagaattcctcttttaatcagtcaagggagatgcttcaaagctggagctattttatttctgagatgttgatgtgaactgtacattagtacatactcagtactctccttcaattgctgaaccccagttgaccattttaccaagactttagatgctttcttgtgccctcaattttctttttaaaaatacttctacatgactgcttgacagcccaacagccactctcaatagagagctatgtcttacattctttcctctgctgctcaatagttttatatatctatgcatacatatatacacacatatgtatataaaattcataatgaatatatttgcctatattctccctacaagaatatttttgctccagaaagacatgttcttttctcaaattcagttaaaatggtttactttgttcaagttagtggtaggaaacattgcccggaattgaaagcaaatttattttattatcctattttctaccattatctatgttttcatggtgctattaattacaagtttagttctttttgtagatcatattaaaattgcaaacaaaatcatctttaatgggccagcattctcatggggtagagcagaatattcatttagcctgaaagctgcagttactataggttgctgtcagactatacccatggtgcctctgggcttgacaggtcaaaatggtccccatcagcctggagcagccctccagacctgggtggaattccagggttgagagactcccctgagccagaggccactaggtattcttgctcccagaggctgaagtcaccctgggaatcacagtggtctacctgcattcataattccaggatctgtgaagagcacatatgtgtcagggcacaattccctctcataaaaaccacacagcctggaaattggccctggcccttcaagatagccttctttagaatatgatttggctagaaagattcttaaatatgtggaatatgattattcttagctggaatattttctctacttcctgtctgcatgcccaaggcttctgaagcagccaatgtcgatgcaacaacatttgtaactttaggtaaactgggattatgttgtagtttaacattttgtaactgtgtgcttatagtttacaagtgagacccgatatgtcattatgcatacttatattatcttaagcatgtgtaatgctggatgtgtacagtacagtactgaacttgtaatttgaatctagtatggtgttctgttttcagctgacttggacaacctgactggctttgcacaggtgttccctgagttgtttgcaggtttctgtgtgtggggtggggtatggggaggagaaccttcatggtggcccacctggcctggttgtccaagctgtgcctcgacacatcctcatccccagcatgggacacctcaagatgaataataattcacaaaatttctgtgaaatcaaatccagttttaagaggagccacttatcaaagagattttaacagtagtaagaaggcaaagaataaacatttgatattcagcaactgaaaa

SEQ ID NO: 142598 - DNA, 1009 bp, Homo sapiens
  Payload ID: 8176
  Gene Symbol: ICOSLG
  Gene Name: inducible T-cell co-stimulator ligand
  Uniprot ID: O75144
  ENST ID: ENST00000344330
  CDS Start-End: 24-953
ggcccgaggtctccgcccgcaccatgcggctgggcagtcctggactgctcttcctgctcttcagcagccttcgagctgatactcaggagaaggaagtcagagcgatggtaggcagcgacgtggagctcagctgcgcttgccctgaaggaagccgttttgatttaaatgatgtttacgtatattggcaaaccagtgagtcgaaaaccgtggtgacctaccacatcccacagaacagctccttggaaaacgtggacagccgctaccggaaccgagccctgatgtcaccggccggcatgctgcggggcgacttctccctgcgcttgttcaacgtcaccccccaggacgagcagaagtttcactgcctggtgttgagccaatccctgggattccaggaggttttgagcgttgaggttacactgcatgtggcagcaaacttcagcgtgcccgtcgtcagcgccccccacagcccctcccaggatgagctcaccttcacgtgtacatccataaacggctaccccaggcccaacgtgtactggatcaataagacggacaacagcctgctggaccaggctctgcagaatgacaccgtcttcttgaacatgcggggcttgtatgacgtggtcagcgtgctgaggatcgcacggacccccagcgtgaacattggctgctgcatagagaacgtgcttctgcagcagaacctgactgtcggcagccagacaggaaatgacatcggagagagagacaagatcacagagaatccagtcagtaccggcgagaaaaacgcggccacgtggagcatcctggctgtcctgtgcctgcttgtggtcgtggcggtggccataggctgggtgtgcagggaccgatgcctccaacacagctatgcaggtgcctgggctgtgagtccggagacagagctcactgaatcctggaacctgctccttctgctctcgtgactgactgtgttctctatgcaacttccaataaaacctcttcatttgaaaggaaaaaa

SEQ ID NO: 142599 - DNA, 2907 bp, Homo sapiens
  Payload ID: 8176
  Gene Symbol: ICOSLG
  Gene Name: inducible T-cell co-stimulator ligand
  Uniprot ID: O75144
  ENST ID: ENST00000400377
  CDS Start-End: 150-707
agagcctcgggcgcggcgggagcgcagttagagccgatctcccgcgccccgaggttgctcctctccgaggtctcccgcggcccaagttctccgcgccccgaggtctccgcgccccgaggtctccgcggcccgaggtctccgcccgcaccatgcggctgggcagtcctggactgctcttcctgctcttcagcagccttcgagctgcaaacttcagcgtgcccgtcgtcagcgccccccacagcccctcccaggatgagctcaccttcacgtgtacatccataaacggctaccccaggcccaacgtgtactggatcaataagacggacaacagcctgctggaccaggctctgcagaatgacaccgtcttcttgaacatgcggggcttgtatgacgtggtcagcgtgctgaggatcgcacggacccccagcgtgaacattggctgctgcatagagaacgtgcttctgcagcagaacctgactgtcggcagccagacaggaaatgacatcggagagagagacaagatcacagagaatccagtcagtaccggcgagaaaaacgcggccacgtggagcatcctggctgtcctgtgcctgcttgtggtcgtggcggtggccataggctgggtgtgcagggaccgatgcctccaacacagctatgcaggtgcctgggctgtgagtccggagacagagctcactggccacgtttgaccggagctcaccgcccagagcgtggacagggcttccgtgagacgccaccgtgagaggccaggtggcagcttgagcatggactcccagactgcaggggagcacttggggcagcccccagaaggaccactgctggatcccagggagaacctgctggcgttggctgtgatcctggaatgaggccctttcaaaagcgtcatccacaccaaaggcaaatgtccccaagtgagtgggctccccgctgtcactgccagtcacccacaggaagggactggtgatgggctgtctctacccggagcgtgcgggattcagcaccaggctcttcccagtaccccagacccactgtgggtcttcccgtgggatgcgggatcctgagaccgaagggtgtttggtttaaaaagaagactgggcgtccgctcttccaggacggcctctgtgctgctggggtcacgcgaggctgtttgcaggggacacggtcacaggagctcttctgccctgaacgctcccaacctgcctcccgcccggaagccacaggacccactcatgtgtgtgcccacaagtgtagttagccgtccacaccgaggagcccccggaagtccccactgggcttcagtgtcctctgccacattccctgggaggaacaatgtccctcggctgttccggtgaaaagttgagccacctttggaagacgcacgggtggagtttgccagaagaaaggctgtgccagggccgtgtttggctacaggggctgccggggctcttggctctgcagcgagaaagacacagcccagcagggctggagacgcccatgtccagcaggcgcaggcctggcaacacggtccccagagtcctgagcagcagttaggtgcatggagagggtatcacctggtggccacagtcccccttctcacctcagcaatgatccccaaagtgagaggtggctcccccggcccccaccaccctcagcagccccaccccactcaaccctgagggtccccagggtcctgatgaagacctccgaccccagcgccaggctcctcggagcccaacagtcccaagggggcaggagacggggtggtccagtgctgaggggtacagccctgggccctgaccagccccggcacctgccatgctggttcccggaatgaatcagctgctgactgtctccagaagggctggaaaggatgctgccaggtgacccgaggtgcactcgccccagggagatggagtagacagcctggcctggccctcgggacacattgtctgccccggggctatgggcaaatgcccctccttcttacttcccagaatcccctgacattcccagggtcagccaggacctgttacagccctggtcacttggaactgacagctgtgtgaggcctgcacttctcagacccagacttagaacaaaaggaggagtgaggactcaaggctacaatgaggttccagtacttgttacaagaaattggttttctgcaaaaaaagtccctacctgagcctttaggtgaatgtgggatccactcccgcttttaacatgaaagcattagaagatgtgtggtgtttataaaagaacagttgtcatcaccgggcattgattggcagggacaaggagctgcttgggtgtggaaagttggggcgttggaaagtgggctgtggtgcccatttgcagtgactgtgaagtgactccaggacggacctgcgggggcacccagaggtcctaagccccaggactgagggtcgtgcatcaccactcgggtgtcccgggaggtgccctgggcccggggacctcacaggcaggacggcgacactaatgcagggagagggagtctggccccagcttttcctatcagaggcgattttccttcaccaggggatgggcaggaaagaggcaggggccccagaagcttctgtccctcatgcctgagggcacgggggacacttggaggctgctgtcaccactgtgcgtccaaggccatgctctctgcgggtcagtgcctgagtctcgcctccctgctggtccctgaagccccctcagaagccctgcctgtcacgtcggcatttgtgagacctaccctgtaacgcctgcccctctcagcccaacatcagcttcctctttctcccttgctgtagacaggctggattccagtgttgggacagccatctccagaaacctgacttaagagagtaagatgcaaatcgt

SEQ ID NO: 142600 - DNA, 4246 bp, Homo sapiens
  Payload ID: 8176
  Gene Symbol: ICOSLG
  Gene Name: inducible T-cell co-stimulator ligand
  ENST ID: ENST00000400379
  CDS Start-End: 129-1550
gcgcagttagagccgatctcccgcgccccgaggttgctcctctccgaggtctcccgcggcccaagttctccgcgccccgaggtctccgcgccccgaggtctccgcggcccgaggtctccgcccgcaccatgcggctgggcagtcctggactgctcttcctgctcttcagcagccttcgagctgatactcaggagaaggaagtcagagcgatggtaggcagcgacgtggagctcagctgcgcttgccctgaaggaagccgttttgatttaaatgatgtttacgtatattggcaaaccagtgagtcgaaaaccgtggtgacctaccacatcccacagaacagctccttggaaaacgtggacagccgctaccggaaccgagccctgatgtcaccggccggcatgctgcggggcgacttctccctgcgcttgttcaacgtcaccccccaggacgagcagaagtttcactgcctggtgttgagccaatccctgggattccaggaggttttgagcgttgaggttacactgcatgtggcagcaaacttcagcgtgcccgtcgtcagcgccccccacagcccctcccaggatgagctcaccttcacgtgtacatccataaacggctaccccaggcccaacgtgtactggatcaataagacggacaacagcctgctggaccaggctctgcagaatgacaccgtcttcttgaacatgcggggcttgtatgacgtggtcagcgtgctgaggatcgcacggacccccagcgtgaacattggctgctgcatagagaacgtgcttctgcagcagaacctgactgtcggcagccagacaggaaatgacatcggagagagagacaagatcacagagaatccagtcagtaccggcgagaaaaacgcggccacgtggagcatcctggctgtcctgtgcctgcttgtggtcgtggcggtggccataggctgggtgtgcagggaccgatgcctccaacacagctatgcaggtgcctgggctgtgagtccggagacagagctcactggtgagtttgccgtgggaagcagcaggttctggggggcccaggggaggcttggctgccagctgtctttcagagtttcaaaaaactttcaaaaggcaaaagtcccttgccttgaacaactgttgttcctggagacgcagcgaagccctcgatggtgcgcatggcatttcctgcagcctccccttggcatgggatggcatcctggtgtgcactttgtcacactgcgatgggattttcccaacatgcacagaagcagagagacgagtgctagacccccgcgctccccagtgcccagccccgaccagggtgtccagggcgggtccaggcaccggcgcccagcccccatggggtgtccggagtgggtccaggcaccggcgcccagcccccgtggggtgtccagggcgggtccaggcaccggcgcccagcccctgtggggtgtccggagtgggtccgggcaccgccagcttctctctgtggcagccactcctgcagctctcgtttgcccctcagttccaggagcaacatagatgtggattcctgtccaatttgggaaaaatgtccacacacggtcacccacctggcaggtgcctctggctgcaaggggcgctgggcttcgcaggcaggccagccgggctccccgccatgggccaggatcccctccgagccctgtttgccgcccaggagaaggggttccccggggacagtgggctcagggtgtgcgcagccaccatgctgtggtgtcacctgtggacccaggcgagctgatggccgaccgcagaaacgcacttccaaggccaggtcggcccatccagatgatgcaggaacacagcttgctaaaaacacggccggcctgttcccgtcggagccagtcgaagttccctgaacaggccgctgtttccgaagctttaaaccctgtgtttccaccaagctgagtcctgagaaaaccgacgtctgcctgcagaagggaaaggggtgcttcatgttcctctctctccttcatctcccttccaaggccacgtttgaccggagctcaccgcccagagcgtggacagggcttccgtgagacgccaccgtgagaggccaggtggcagcttgagcatggactcccagactgcaggggagcacttggggcagcccccagaaggaccactgctggatcccagggagaacctgctggcgttggctgtgatcctggaatgaggccctttcaaaagcgtcatccacaccaaaggcaaatgtccccaagtgagtgggctccccgctgtcactgccagtcacccacaggaagggactggtgatgggctgtctctacccggagcgtgcgggattcagcaccaggctcttcccagtaccccagacccactgtgggtcttcccgtgggatgcgggatcctgagaccgaagggtgtttggtttaaaaagaagactgggcgtccgctcttccaggacggcctctgtgctgctggggtcacgcgaggctgtttgcaggggacacggtcacaggagctcttctgccctgaacgctcccaacctgcctcccgcccggaagccacaggacccactcatgtgtgtgcccacaagtgtagttagccgtccacaccgaggagcccccggaagtccccactgggcttcagtgtcctctgccacattccctgggaggaacaatgtccctcggctgttccggtgaaaagttgagccacctttggaagacgcacgggtggagtttgccagaagaaaggctgtgccagggccgtgtttggctacaggggctgccggggctcttggctctgcagcgagaaagacacagcccagcagggctggagacgcccatgtccagcaggcgcaggcctggcaacacggtccccagagtcctgagcagcagttaggtgcatggagagggtatcacctggtggccacagtcccccttctcacctcagcaatgatccccaaagtgagaggtggctcccccggcccccaccaccctcagcagccccaccccactcaaccctgagggtccccagggtcctgatgaagacctccgaccccagcgccaggctcctcggagcccaacagtcccaagggggcaggagacggggtggtccagtgctgaggggtacagccctgggccctgaccagccccggcacctgccatgctggttcccggaatgaatcagctgctgactgtctccagaagggctggaaaggatgctgccaggtgacccgaggtgcactcgccccagggagatggagtagacagcctggcctggccctcgggacacattgtctgccccggggctatgggcaaatgcccctccttcttacttcccagaatcccctgacattcccagggtcagccaggacctgttacagccctggtcacttggaactgacagctgtgtgaggcctgcacttctcagacccagacttagaacaaaaggaggagtgaggactcaaggctacaatgaggttccagtacttgttacaagaaattggttttctgcaaaaaaagtccctacctgagcctttaggtgaatgtgggatccactcccgcttttaacatgaaagcattagaagatgtgtggtgtttataaaagaacagttgtcatcaccgggcattgattggcagggacaaggagctgcttgggtgtggaaagttggggcgttggaaagtgggctgtggtgcccatttgcagtgactgtgaagtgactccaggacggacctgcgggggcacccagaggtcctaagccccaggactgagggtcgtgcatcaccactcgggtgtcccgggaggtgccctgggcccggggacctcacaggcaggacggcgacactaatgcagggagagggagtctggccccagcttttcctatcagaggcgattttccttcaccaggggatgggcaggaaagaggcaggggccccagaagcttctgtccctcatgcctgagggcacgggggacacttggaggctgctgtcaccactgtgcgtccaaggccatgctctctgcgggtcagtgcctgagtctcgcctccctgctggtccctgaagccccctcagaagccctgcctgtcacgtcggcatttgtgagacctaccctgtaacgcctgcccctctcagcccaacatcagcttcctctttctcccttgctgtagacaggctggattccagtgttgggacagccatctccagaaacctgacttaagagagtaagatgcaaatcgt

SEQ ID NO: 142601 - DNA, 7080 bp, Homo sapiens
  Payload ID: 8176
  Gene Symbol: ICOSLG
  Gene Name: inducible T-cell co-stimulator ligand
  Uniprot ID: O75144
  ENST ID: ENST00000407780
  CDS Start-End: 129-1037
gcgcagttagagccgatctcccgcgccccgaggttgctcctctccgaggtctcccgcggcccaagttctccgcgccccgaggtctccgcgccccgaggtctccgcggcccgaggtctccgcccgcaccatgcggctgggcagtcctggactgctcttcctgctcttcagcagccttcgagctgatactcaggagaaggaagtcagagcgatggtaggcagcgacgtggagctcagctgcgcttgccctgaaggaagccgttttgatttaaatgatgtttacgtatattggcaaaccagtgagtcgaaaaccgtggtgacctaccacatcccacagaacagctccttggaaaacgtggacagccgctaccggaaccgagccctgatgtcaccggccggcatgctgcggggcgacttctccctgcgcttgttcaacgtcaccccccaggacgagcagaagtttcactgcctggtgttgagccaatccctgggattccaggaggttttgagcgttgaggttacactgcatgtggcagcaaacttcagcgtgcccgtcgtcagcgccccccacagcccctcccaggatgagctcaccttcacgtgtacatccataaacggctaccccaggcccaacgtgtactggatcaataagacggacaacagcctgctggaccaggctctgcagaatgacaccgtcttcttgaacatgcggggcttgtatgacgtggtcagcgtgctgaggatcgcacggacccccagcgtgaacattggctgctgcatagagaacgtgcttctgcagcagaacctgactgtcggcagccagacaggaaatgacatcggagagagagacaagatcacagagaatccagtcagtaccggcgagaaaaacgcggccacgtggagcatcctggctgtcctgtgcctgcttgtggtcgtggcggtggccataggctgggtgtgcagggaccgatgcctccaacacagctatgcaggtgcctgggctgtgagtccggagacagagctcactggccacgtttgaccggagctcaccgcccagagcgtggacagggcttccgtgagacgccaccgtgagaggccaggtggcagcttgagcatggactcccagactgcaggggagcacttggggcagcccccagaaggaccactgctggatcccagggagaacctgctggcgttggctgtgatcctggaatgaggccctttcaaaagcgtcatccacaccaaaggcaaatgtccccaagtgagtgggctccccgctgtcactgccagtcacccacaggaagggactggtgatgggctgtctctacccggagcgtgcgggattcagcaccaggctcttcccagtaccccagacccactgtgggtcttcccgtgggatgcgggatcctgagaccgaagggtgtttggtttaaaaagaagactgggcgtccgctcttccaggacggcctctgtgctgctggggtcacgcgaggctgtttgcaggggacacggtcacaggagctcttctgccctgaacgctcccaacctgcctcccgcccggaagccacaggacccactcatgtgtgtgcccacaagtgtagttagccgtccacaccgaggagcccccggaagtccccactgggcttcagtgtcctctgccacattccctgggaggaacaatgtccctcggctgttccggtgaaaagttgagccacctttggaagacgcacgggtggagtttgccagaagaaaggctgtgccagggccgtgtttggctacaggggctgccggggctcttggctctgcagcgagaaagacacagcccagcagggctggagacgcccatgtccagcaggcgcaggcctggcaacacggtccccagagtcctgagcagcagttaggtgcatggagagggtatcacctggtggccacagtcccccttctcacctcagcaatgatccccaaagtgagaggtggctcccccggcccccaccaccctcagcagccccaccccactcaaccctgagggtccccagggtcctgatgaagacctccgaccccagcgccaggctcctcggagcccaacagtcccaagggggcaggagacggggtggtccagtgctgaggggtacagccctgggccctgaccagccccggcacctgccatgctggttcccggaatgaatcagctgctgactgtctccagaagggctggaaaggatgctgccaggtgacccgaggtgcactcgccccagggagatggagtagacagcctggcctggccctcgggacacattgtctgccccggggctatgggcaaatgcccctccttcttacttcccagaatcccctgacattcccagggtcagccaggacctgttacagccctggtcacttggaactgacagctgtgtgaggcctgcacttctcagacccagacttagaacaaaaggaggagtgaggactcaaggctacaatgaggttccagtacttgttacaagaaattggttttctgcaaaaaaagtccctacctgagcctttaggtgaatgtgggatccactcccgcttttaacatgaaagcattagaagatgtgtggtgtttataaaagaacagttgtcatcaccgggcattgattggcagggacaaggagctgcttgggtgtggaaagttggggcgttggaaagtgggctgtggtgcccatttgcagtgactgtgaagtgactccaggacggacctgcgggggcacccagaggtcctaagccccaggactgagggtcgtgcatcaccactcgggtgtcccgggaggtgccctgggcccggggacctcacaggcaggacggcgacactaatgcagggagagggagtctggccccagcttttcctatcagaggcgattttccttcaccaggggatgggcaggaaagaggcaggggccccagaagcttctgtccctcatgcctgagggcacgggggacacttggaggctgctgtcaccactgtgcgtccaaggccatgctctctgcgggtcagtgcctgagtctcgcctccctgctggtccctgaagccccctcagaagccctgcctgtcacgtcggcatttgtgagacctaccctgtaacgcctgcccctctcagcccaacatcagcttcctctttctcccttgctgtagacaggctggattccagtgttgggacagccatctccagaaacctgacttaagagagtaagatgcaaatcgtgcctgtatccagtggctttggtgggtgcagggagtcttgggcacagccagctcagctgtctgtggtatgagcaggaacaggtgccactcctgctcaggggaccctgccctacaccaggctgttccgtccccctggaggacatggggccaggtctggaggcattttgggttgtcacagctgggggctgttcctcggcttcagcgggtggaagcctcagatgctgttcaacatcttctggacacgggaggccccgacagagagaagcgtccacccgcaagtccacagtctgaggtctcccctcagagaccctgccctgcacacccacctccagccaaaggtcctgcctgccccagggctcaggggaaccttgccggtctgtggaacaggagaggggactctcgccagctgcaccaccctgcacgtagtaggtgtgcggtaaacatccaccagggaggctccagtcaaggctggcagatggggcggtccatccctagggcaggtgacagaagggaaaaggctgcctgctggcccccgagccaggtagcacatgcttgtgcctcagtttcccctcctgtaaagtgaggcgctggatccaggttctgtctactgggctctgcagcttggacgctcctaagaccaagcgacccaccctggggagggcagctatggctttggaatagctgtccaggcccgggtgcctccaagacggccaccacaccctgcctgtgctgcaggggtgcaggggtaaggggcaagactccagaggcctcctctctgcatctccttgtcttcagtggccggaggtgaggcctgagctcaggggaggggcttctgccacgaaccctatggcggggcacagcacacttttcccagggaggacccctgggccccctgcattatccccagcggagtgtggggtcaccttccaagagcgacattgagaagctccagctctaggagtgtgcagactcttaaccaggcaggcccaggccctggggcacacaaaggcggggcctgctctccccagctgcccctgccaatgggggctggactgtcctaccctcctcccttctacctccccactgtcttccctctccactgtcaccactgcctccctcttccactgtcctccatgcactgccctccctccaccttcccccacccccaccactccccatgctgtccccaggctccccccgctctcccccctccccactgtccccctccccatgctgtacccagctcaccccgctctcccctctccccactgtcccccctcccactccccatgctgtccccagctcaccctacatggacttggcgatgtccttccatggctcaccggtctgaatttccatgatgagccgggcctgcagctttgctcccctatccctgcccaggctgcagctgtccatgcagggagcgagctccagcacctgcggagtccttccgtgggggcctctccgtgccacagcagccagggacctcaggtgcctgtgcatgacaccaccgcccatcctcatcctgagccagcctctcaggatcaggacttggtttggcggcgttaaccttagagcctgcaaggggcttcctcctggtgggtctggccgtagcctggggaggccacagctccaggccactccagacctcccttcctctgggccttccatgtggtggcaaccaccgcagctgtaagggagggaaaatggagcgtttgttctcgggctgggctggggtctgggggaagccatgggcgtgaagactggagtattatttgatggagaagcggccactcctggagaccggcggcaaacacagaagcacagcgtggaaggtgctggtgtcagcccacacgggtgatggggtcagactcaggagtcacactcaggagtcaccaggctcaaagggcccaggcaccgcaagtcctgctcagccccagacacaatgcattcctgttgccctcgccctcagccaggccccacgcaggccagggagcactggcaaagcttggcaaccctctgggggccagccttcatccaggccgaaggtggtcagtggcccaccatggcccaggtagaaaactcacggattaagatttcatgcccgactccaaaggcaagagactttattattttattttttttgagccagagtatcgctctgtcacctaggctggagtgcaatctctgctcattgcaacatctgcctcccgaactcaagcaattctgcctcagcctcccaagtagctgggattacaggtgtgcgccaccatgcccaggtaattgtatttttagtagagacagggtttcaccatgttggtcaggctggtttcaaactcctgacctcaaatgatctgcccacctcgacctcccaaagtgctgggattacaggtgcgagccaccgcacctggctaccagacacttcagagttacaggttagtttttctttttcttttatttttttttttttggcggaggtgcagggggagttaaacaaacaaacaaaataaacaggccgggtgcggtggctcatgcctgtaatcccagcactttaggaggcctaggtgggtggatcacgagatcaggggttcaagaccagcctggccgagatggtaaaaccccgtctccactaaaaatacaaaaattggccaggcacggtggctcacacctgtaatcccagtactttgggaggctgaggtgggcagatcacctgaggtcaggagttcaagaccaacctgaccaacatggagaaaccccatctctactaaaaatacaaaattagccaggtgtggtggtgcatgcctgtaattccagctactcgggaggctgaggcaggagaattgcttgaacccaggaggcagaggttgcagtgggccaagatggcgccattgcactccagcctgggaacaagagcgaaactctgactaaaaaagaaagaaagaaagaaaaaaattagttgggcacggtggcaggcgcctgtaatcccaggtactcaggaggctgaggcaggagaattgcttgaacccgggaggcagaggtcgcagtgagccgagattgcaccactgccctccagcctgggtgacagagcaagactccgtctcaaaaaaaaaaaaaaaaaaaattggatacattgtaatacctcaaatacttgtaagtgaagcaccccagttcccatagagctgccgcactcagaggcttctgtaacctgcctgctcccagcattctatttagggtctggtatgtccagaatttgcagacacagcaattcctgcagcagcagtgcaccatgtggaaggggccccatgaccagcccactgtgagctcacacgtgatgactgaggcttcttcacacagcagggctctgggtgtgatacccagggcacacgcgtttgcacaggcacaggccacacaagttctcacatgctcagccccataagccgtgctggacaggcatggccatttacacccaggatcctgctgagaacagcaaccaactcaccaccctcgcatcatgatccttgccacacaggggctctggtggctttggtggcctgggctgtggctctgctgccagccaccttgagtgaagatccgggttctctgggtgctactcagctgctatgtggggagctggcccctggggtgatgagggcccttcccaacccgccctcagcccttggacagccaggatcacccggggctgtctgcatacagacttctcaggggagttctcagcttggacccttatctccccagaatcctggaacctgctccttctgctctcgtgactgactgtgttctctatgcaacttccaataaaacctcttcatttgaaaggaaaaaa

SEQ ID NO: 142602 - DNA, 746 bp, Homo sapiens
  Payload ID: 8177
  Gene Symbol: IVNS1ABP
  Gene Name: influenza virus NS1A binding protein
  ENST ID: ENST00000367497
  CDS Start-End: 52-459
ttcccagaaatacatttgccaccaacagagtagccaaatttataaggaaaaatgattcccaatggatatttgatgtttgaggatgaaaattttattgagtcttctgttgccaaattaaatgccctgaggaaaagtggccagttctgtgatgttcgacttcaggtctgtggccatgaaatgttagcacacagagcagtgctagcttgctgcagtccctatttatttgaaatctttaatagtgatagtgatcctcatggaatttctcacgttaaatttgatgatctcaatccagaagctgttgaagtcttgttgaattatgcctacactgctcagttgaaagcagataaggaattggtaaaagatgtttattctgcagcaaaaaagctgaagatggatcgagtaaagcagcatcttctctacttctgtctgcattcaacatcaacatcatctctcctgtagagcccagttcagatactgcgtttcatgaagccttaccaaattattctacttgaaaatacttatgtgaacttacatagcatttcaatttgttgtacctctccttaaactaaaacttacatatctgtatggcataattagatgtttatcatttgtatacgtgttattaccactattaacatttgttgtattaagacagtgatttttgattctttgtatcttcacatagtctttaccacactgaacattaaatatttgttgaataaaagatatgtaagtgttggcactca

SEQ ID NO: 142603 - DNA, 4199 bp, Homo sapiens
  Payload ID: 8177
  Gene Symbol: IVNS1ABP
  Gene Name: influenza virus NS1A binding protein
  Uniprot ID: Q9Y6Y0
  ENST ID: ENST00000367498
  CDS Start-End: 624-2552
gaagcgggctgggaggcgtcggcggcggcagcgcacgtggtgacgtgcgagggggtgcggcgcgagcggtcggcggcggcggaggcagtgtctcccggtcgcgcgtggaggtcggtcgctcagagctgctgggcgcagtttctccgcctgctgcttcggcgcggctgtatcggcgagcgagcgagttcccgcgagttctcggtggcgctcccccttcctttcagtctccacggactggcccctcgtccttctacttgaccgctcccgtcttccgccgccttctggcgctttccgttgggccgattcccgcccgcttcctcctgcttcccatcgaagctctagaaatgaatgtttccatctcttcagagatgaaccagattatgatgcatcattatcacagaagaaattcgtgtctatagcttttaaggacttgattacatcattttcaagcctgatagttttggaatcaccattagagcttaagacacacctgccttcatttcaaccacctgtcttcataccctgacgaagtgcaccttttaacactcctttgtccttggattacttaagagttcccagaaatacatttgccaccaacagagtagccaaatttataaggaaaaatgattcccaatggatatttgatgtttgaggatgaaaattttattgagtcttctgttgccaaattaaatgccctgaggaaaagtggccagttctgtgatgttcgacttcaggtctgtggccatgaaatgttagcacacagagcagtgctagcttgctgcagtccctatttatttgaaatctttaatagtgatagtgatcctcatggaatttctcacgttaaatttgatgatctcaatccagaagctgttgaagtcttgttgaattatgcctacactgctcagttgaaagcagataaggaattggtaaaagatgtttattctgcagcaaaaaagctgaagatggatcgagtaaagcaggtttgtggtgattatttactgtctagaatggatgttaccagctgcatctcttaccgaaattttgcaagttgtatgggagactcccgtttgttgaataaggttgatgcttatattcaggagcatttgttacaaatttctgaagaggaggagtttcttaagcttccaaggctaaagttggaggtaatgcttgaagataatgtttgcttgcccagcaatggcaaattatatacaaaggtaatcaactgggtgcagcgtagcatctgggagaatggagacagtctggaagagctgatggaagaggttcaaaccttgtactactcagctgatcacaagctgcttgatgggaacctactagatggacaggctgaggtgtttggcagtgatgatgaccacattcagtttgtgcagaaaaagccaccacgtgagaatggccataagcagataagtagcagttcaactggatgtctctcttctccaaatgctacagtacaaagccctaagcatgagtggaaaatcgttgcttcagaaaagacttcaaataacacttacttgtgcctggctgtgctggatggtatattctgtgtcatttttcttcatgggagaaacagcccacagagctcaccaacaagtactccaaaactaagtaagagtttaagctttgagatgcaacaagatgagctaatcgaaaagcccatgtctcctatgcagtacgcacgatctggtctgggaacagcagagatgaatggcaaactcatagctgcaggtggctataacagagaggaatgtcttcgaacagtcgaatgctataatccacatacagatcactggtcctttcttgctcccatgagaacaccaagagcccgatttcaaatggctgtactcatgggccagctctatgtggtaggtggatcaaatggccactcagatgacctgagttgtggagagatgtatgattcaaacatagatgactggattcctgttccagaattgagaactaaccgttgtaatgcaggagtgtgtgctctgaatggaaagttatacatcgttggtggctctgatccatatggtcaaaaaggactgaaaaattgtgatgtatttgatcctgtaacaaagttgtggacaagctgtgcccctcttaacattcggagacaccagtctgcagtctgtgagcttggtggttatttgtacataatcggaggtgcagaatcttggaattgtctgaacacagtagaacgatacaatcctgaaaataatacctggactttaattgcacccatgaatgtggctaggcgaggagctggagtggctgttcttaatggaaaactgtttgtatgtggtggctttgatggttctcatgccatcagttgtgtggaaatgtatgatccaactagaaatgaatggaagatgatgggaaatatgacttcaccaaggagcaatgctgggattgcaactgtagggaacaccatttatgcagtgggaggattcgatggcaatgaatttctgaatacggtggaagtctataaccttgagtcaaatgaatggagcccctatacaaagattttccagttttaacaaatttaagaccctctcaaactaacaggcttagtgatgtaattatggttagtagaggtacacttgtgaataaagagggtgggtgggtatagatgttgctaacagcaacacaaagcttttgcatattgcatactattaaacatgctgtacatactttttgggtttatttggaaaggaatgcaaagatgaaggtctgttttgtgtacttttaagactttggttattttactttttggaaaagaataaaccaagaattgattgggcacatcatttcaagaagtcccctctcctccacatttgttttgccaatttgcacattaaatgactcttccctcaaatgtgtactatggggtaaaaggggtagggtttaaagatgtagacagttgggttttttaagggccctttttcaataactggaacactctataacaaaggatacttatttaaatagatgacattgactatttttgtttttattaaaaggaagcttacatgcctaccaatatttaatcttttatgattgcctttttataactttttatattctcagcagagtgctttaccaattgaagtaaaatgtggcaggctggagttattgaagcagagtggcagtcttcagtttgcagagtaggggtctgtcttttaaactctgagtgcaaacttcagagttcttgccttggctgcagtttttttccttcaagaatgcagtactaacatttatttgagtggagttactgaacagtaacatagctgtgatttttggtatttgaaacactggttttaaatattttgacttgttgagggtatgttttatatagcaagacattatatagcagtaaaaaatggtgttttatcttctatataattcctgtttttattattaacaaaacagtcctaaatagcagccctcaattgtgaaaaaatttactttaaactacattaggttgtgaatgcaggttttatcagaactatgtttttgttcagtttatctgttcatatggataaatattggttgggatgacttggtgtctaatgtgtagtgctacacacctaacttatggggccaaaatagcatgtcctaatgcttgctgctgatttaaacacattaaaggtactttgcaggaaatccttgcaccatgggattaatatccaattgctgcttgtacactcattcattactaaaagttttgagaaatttttttttccagtaatgagcttaagaaatttgtggaaaataactcacctggcatcttacatctgaaataaggaatgatataaggtttttttttctcacagaagatgaagcacacaggaacctaatgggccaactgggatgaggtgactattctgagatgactattcagtggctaacttgggttaggaagaaaataattaggtattttctccaaatgttcactggtactctgccactttatttctctcatctgttacacaaagaaccaccaggaaagcaaatcagtttggttggtaactctgtaattcctaactatcactggtttggttctggactaaaactacattgacagattgaatttgcctaatatgatgactgtttttaatatggatctgtatgtgttctattcagcacaaggaaataaaattttagttgaggattcagcactaaaa

SEQ ID NO: 142604 - DNA, 564 bp, Homo sapiens
  Payload ID: 8177
  Gene Symbol: IVNS1ABP
  Gene Name: influenza virus NS1A binding protein
  ENST ID: ENST00000422754
  CDS Start-End: 1-354
gtttgtggtgattatttactgtctagaatggatgttaccagctgcatctcttaccgaaattttgcaagttgtatgggagactcccgtttgttgaataaggttgatgcttatattcaggagcatttgttacaaatttctgaagaggaggagtttcttaagcttccaaggctaaagttggaggtaatgcttgaagataatgtttgcttgcccagcaatggcaaattatatacaaaggtaatcaactgggtgcagcgtagcatctgggagaatggagacagtctggaagagctgatggaagaggttagttttaaagtaaatgggattcaaccatttttaaaaattattttgctataacatgaaggattccctttcacttttattttataaccatgaccctaaagaatttaaattttgctataggtacccctaagctgagaaacagggggggtgtccaggtgagctgaatgaactgttcagtttggtcttctgcttttctttttttatttctttgcttattatgtgctgttaactttctttaaagtagcatgtaatttgctttagaaa

SEQ ID NO: 142605 - DNA, 1468 bp, Homo sapiens
  Payload ID: 8178
  Gene Symbol: INHA
  Gene Name: inhibin, alpha
  Uniprot ID: P05111
  ENST ID: ENST00000243786
  CDS Start-End: 181-1281
gccacgggcaggggcaactcggactgtggggcgtggaaaggactggggaagactggatgagaagggtagaagagggtgggtgtgggatggggaggggagagtggaaaggccctgggcagaccctggcagaaggggcacggggcagggtgtgagttccccactagcagggccaggtgagctatggtgctgcacctactgctcttcttgctgctgaccccacagggtgggcacagctgccaggggctggagctggcccgggaacttgttctggccaaggtgagggccctgttcttggatgccttggggccccccgcggtgaccagggaaggtggggaccctggagtcaggcggctgccccgaagacatgccctggggggcttcacacacaggggctctgagcccgaggaagaggaggatgtctcccaagccatccttttcccagccacagatgccagctgtgaggacaagtcagctgccagagggctggcccaggaggctgaggagggcctcttcagatacatgttccggccatcccagcatacacgcagccgccaggtgacttcagcccagctgtggttccacaccgggctggacaggcagggcacagcagcctccaatagctctgagcccctgctaggcctgctggcactgtcaccgggaggacccgtggctgtgcccatgtctttgggccatgctccccctcactgggccgtgctgcacctggccacctctgctctctctctgctgacccaccccgtcctggtgctgctgctgcgctgtcccctctgtacctgctcagcccggcctgaggccacgcccttcctggtggcccacactcggaccagaccacccagtggaggggagagagcccgacgctcaactcccctgatgtcctggccttggtctccctctgctctgcgcctgctgcagaggcctccggaggaaccggctgcccatgccaactgccacagagtagcactgaacatctccttccaggagctgggctgggaacggtggatcgtgtaccctcccagtttcatcttccactactgtcatggtggttgtgggctgcacatcccaccaaacctgtcccttccagtccctggggctccccctaccccagcccagccctactccttgctgccaggggcccagccctgctgtgctgctctcccagggaccatgaggcccctacatgtccgcaccacctcggatggaggttactctttcaagtatgagacagtgcccaaccttctcacgcagcactgtgcttgtatctaagggtggggggtcttccttcttaatcccatggctggtggccacgcccccaccatcatcagctgggaggaaaggcagagttgggaaatagatggctcccactcctccctcctttcacttctctgcctatgggctaccctccccaccccacttctatctcaataaagaacacagtgcatatgacttgaca

SEQ ID NO: 142606 - DNA, 6064 bp, Homo sapiens
  Payload ID: 8179
  Gene Symbol: INHBA
  Gene Name: inhibin, beta A
  Uniprot ID: P08476
  ENST ID: ENST00000242208
  CDS Start-End: 248-1528
agtacagtataaaacttcacagtgccaataccatgaagaggagctcagacagctcttaccacatgatacaagagccggctggtggaagagtggggaccagaaagagaatttgctgaagaggagaaggaaaaaaaaaacaccaaaaaaaaaaataaaaaaatccacacacacaaaaaaacctgcgcgtgaggggggaggaaaagcagggccttttaaaaaggcaatcacaacaacttttgctgccaggatgcccttgctttggctgagaggatttctgttggcaagttgctggattatagtgaggagttcccccaccccaggatccgaggggcacagcgcggcccccgactgtccgtcctgtgcgctggccgccctcccaaaggatgtacccaactctcagccagagatggtggaggccgtcaagaagcacattttaaacatgctgcacttgaagaagagacccgatgtcacccagccggtacccaaggcggcgcttctgaacgcgatcagaaagcttcatgtgggcaaagtcggggagaacgggtatgtggagatagaggatgacattggaaggagggcagaaatgaatgaacttatggagcagacctcggagatcatcacgtttgccgagtcaggaacagccaggaagacgctgcacttcgagatttccaaggaaggcagtgacctgtcagtggtggagcgtgcagaagtctggctcttcctaaaagtccccaaggccaacaggaccaggaccaaagtcaccatccgcctcttccagcagcagaagcacccgcagggcagcttggacacaggggaagaggccgaggaagtgggcttaaagggggagaggagtgaactgttgctctctgaaaaagtagtagacgctcggaagagcacctggcatgtcttccctgtctccagcagcatccagcggttgctggaccagggcaagagctccctggacgttcggattgcctgtgagcagtgccaggagagtggcgccagcttggttctcctgggcaagaagaagaagaaagaagaggagggggaagggaaaaagaagggcggaggtgaaggtggggcaggagcagatgaggaaaaggagcagtcgcacagacctttcctcatgctgcaggcccggcagtctgaagaccaccctcatcgccggcgtcggcggggcttggagtgtgatggcaaggtcaacatctgctgtaagaaacagttctttgtcagtttcaaggacatcggctggaatgactggatcattgctccctctggctatcatgccaactactgcgagggtgagtgcccgagccatatagcaggcacgtccgggtcctcactgtccttccactcaacagtcatcaaccactaccgcatgcggggccatagcccctttgccaacctcaaatcgtgctgtgtgcccaccaagctgagacccatgtccatgttgtactatgatgatggtcaaaacatcatcaaaaaggacattcagaacatgatcgtggaggagtgtgggtgctcatagagttgcccagcccagggggaaagggagcaagagttgtccagagaagacagtggcaaaatgaagaaatttttaaggtttctgagttaaccagaaaaatagaaattaaaaacaaaacaaaaaaaaaaacaaaaaaaaacaaaagtaaattaaaaacaaaacctgatgaaacagatgaaggaagatgtggaaaaaatccttagccagggctcagagatgaagcagtgaaagagacaggaattgggagggaaagggagaatggtgtaccctttatttcttctgaaatcacactgatgacatcagttgtttaaacggggtattgtcctttccccccttgaggttcccttgtgagccttgaatcaaccaatctagtctgcagtagtgtggactagaacaacccaaatagcatctagaaagccatgagtttgaaagggcccatcacaggcactttcctacccaattacccaggtcataaggtatgtctgtgtgacacttatctctgtgtatatcagcatacacacacacacacacacacacacacacacacacaggcatttccacacattacatatatacacatactggtaaaagaacaatcgtgtgcaggtggtcacacttcctttttctgtaccacttttgcaacaaaacaaaacaaacaacattaaaaaattgagaacaagtatggaaagaatgaaagatcaaggaaaaaagaataccaagttacatttcgttaaggtgcttatgatcttagaactatgcaacctaataggtttgaaactgtttacctgagagagaacaaaaagagagacttttttgtattggaagtaatctgattaatttttattttcttcaaggagagatacttgaaaggaatatgtttgtccatctgttggatccaaacatttctatattttgtaaatgttgttgttgttttttttttaatcgtttactatttgcactacaatggtgtttgacctgtctaatccttatttaacaagtattttctttggttgggggtgggggtggggtttaagagctgcacttaatgtgagctataaaagaactgctacagcacacaaaatagctatttttattattataattataattattattattattttgtaccttaaaaaatagacacatacaccaaagacatttgtgtgagcctttaaacagtctgtctgtggttggtatcattcaccatcaatgagtcaggggttgggattcaaggttgagtagtgtggattgtgttcaggcttaaaagacctgagaagtttggtttttgactccttttacatccatgaaacaggacatttcatactggatgtacagtagttgtacactgttggatatcaagttcaatcaaattcatggaactacatgcttgtatgtgtatatatacattgcttgtgcatatgcatatctgtatgtatatatacatgtattgtaccatgtccatacacattttaagcacttcaggctgtcattttttaatgttcttaaagcaatgaatgtttgtgtgcaaaacacagtatttttaagaaggataggctatagtttttgcttttactctgaactaggtgggcgcatttcaaaaattcggatgggaaaaagcctggaaattccagtgaatattcagcaaggccctctttcattgtacagggatcaaatttcctcctcttttttgtgccccctcccacttctacaagttatcccctgtggggaaaacaggatgataatcaaaactctgggctgatgtttttccaacttagtgtctattggaatcaatcttaaatcagaagctttttcagaaaaataatatttaggccagaattagagttgagtgtattttttaaaaatgattaaggcttggttgtgagaaatattacctgtaccagctgggaaaaataatgtcatcactaactaaaagataattaatttgagagaaagtgttaagagagggagagtaaggaagagaacagttaagaggaggcagaggtgagggcagtagtaaaaatctctaaaattttaatttacagccaaaattcttcatgtgtaaatttgtattgattcagatgcagaaatgaaaaaaaaacacctttgttttataaatatcaaagtacatgcttaaagccaagtttttatctagtttattctagtacttagcttgcctggaatagctaataaattattcatgtatgtgcttttgaaaatccagagccctatttttacacacttgtgtgaagttggcaaacattttgaaaaatggaaaaaagtttctaataattgggaacaattacattaattaatattttgtaaaatattgaagcttttagccctatgtcaatttgtagattaaaataaattaattataggaaaggaagataacagtgagaaaccaaacattacaaaaggtggtttagctctccttgaaaaatatactaagttggtatactataacacttggctatatgtaggcaatgtcactactgggcaaatacacttactgtgttctagaggcagccctttcttatgcagaaaatacaatacgcactgcatgagaagcttgagagtggattctaatccaggtctgtcgaccttggatatcatgcatgtgggaaggtgggtgtggtgagaaaagttttaaggcaagagtagatggccatgttcaactttacaaaatttcttggaaaactggcagtattttgaactgcatcttctttggtaccggaacctgcagaaacagtgtgagaaattaagtcctggttcactgcgcagtagcaaagatggtcaaggccatggaaaaagcagaaatttaccaagaaagctgatacccatgtatagttcccactcatctcaaatacatctgctatctttttaagctaagtcctagacatatcggggataacatgggggttgattagtgaccacagttatcagaagcagagaaatgtaattccatattttatttgaaacttattccatattttaattggatattgagtgattgggttatcaaacacccacaaactttaattttgttaaatttatatggctttgaaatagaagtataagttgctaccattttttgataacattgaaagatagtattttaccatctttaatcatcttggaaaatacaagtcctgtgaacaaccactctttcacctagcagcatgaggccaaaagtaaaggctttaaattataacatatgggattcttagtagtatgtttttttcttgaaactcagtggctctatctaaccttactatctcctcactctttctctaagactaaactctaggctcttaaaaatctgcccacaccaatcttagaagctctgaaaagaatttgtctttaaatatcttttaatagtaacatgtattttatggaccaaattgacattttcgactattttttccaaaaaagtcaggtgaatttcagcacactgagttgggaatttcttatcccagaagaccaaccaatttcatatttatttaagattgattccatactccgttttcaaggagaatccctgcagtctccttaaaggtagaacaaatactttctatttttttttcaccattgtgggattggactttaagaggtgactctaaaaaaacagagaacaaatatgtctcagttgtattaagcacggacccatattatcatattcacttaaaaaaatgatttcctgtgcaccttttggcaacttctcttttcaatgtagggaaaaacttagtcaccctgaaaacccacaaaataaataaaacttgtagatgtgggcagaaggtttgggggtggacattgtatgtgtttaaattaaaccctgtatcactgagaagctgttgtatgggtcagagaaaatgaatgcttagaagctgttcacatcttcaagagcagaagcaaaccacatgtctcagctatattattatttattttttatgcataaagtgaatcatttcttctgtattaatttccaaagggttttaccctctatttaaatgctttgaaaaacagtgcattgacaatgggttgatatttttctttaaaagaaaaatataattatgaaagccaagataatctgaagcctgttttattttaaaactttttatgttctgtggttgatgttgtttgtttgtttgtttctattttgttggttttttactttgttttttgttttgttttgttttgttttgcatactacatgcagttctttaaccaatgtctgtttggctaatgtaattaaagttgttaatttatatgagtgcatttcaactatgtcaatggtttcttaatatttattgtgtagaagtactggtaatttttttatttacaatatgtttaaagagataacagtttgatatgttttcatgtgtttatagcagaagttatttatttctatggcattccagcggatattttggtgtttgcgaggcatgcagtcaatattttgtacagttagtggacagtattcagcaacgcctgatagcttctttggccttatgttaaataaaaagacctgtttgggatgta

SEQ ID NO: 142607 - DNA, 1632 bp, Homo sapiens
  Payload ID: 8179
  Gene Symbol: INHBA
  Gene Name: inhibin, beta A
  Uniprot ID: P08476
  ENST ID: ENST00000442711
  CDS Start-End: 236-1516
ctccctgacagccacaaacctacagcactgactgcattcagagaggaacctgcaaacaaaacttcacagaaaactttttgttcttgttccagagaatttgctgaagaggagaaggaaaaaaaaaacaccaaaaaaaaaaataaaaaaatccacacacacaaaaaaacctgcgcgtgaggggggaggaaaagcagggccttttaaaaaggcaatcacaacaacttttgctgccaggatgcccttgctttggctgagaggatttctgttggcaagttgctggattatagtgaggagttcccccaccccaggatccgaggggcacagcgcggcccccgactgtccgtcctgtgcgctggccgccctcccaaaggatgtacccaactctcagccagagatggtggaggccgtcaagaagcacattttaaacatgctgcacttgaagaagagacccgatgtcacccagccggtacccaaggcggcgcttctgaacgcgatcagaaagcttcatgtgggcaaagtcggggagaacgggtatgtggagatagaggatgacattggaaggagggcagaaatgaatgaacttatggagcagacctcggagatcatcacgtttgccgagtcaggaacagccaggaagacgctgcacttcgagatttccaaggaaggcagtgacctgtcagtggtggagcgtgcagaagtctggctcttcctaaaagtccccaaggccaacaggaccaggaccaaagtcaccatccgcctcttccagcagcagaagcacccgcagggcagcttggacacaggggaagaggccgaggaagtgggcttaaagggggagaggagtgaactgttgctctctgaaaaagtagtagacgctcggaagagcacctggcatgtcttccctgtctccagcagcatccagcggttgctggaccagggcaagagctccctggacgttcggattgcctgtgagcagtgccaggagagtggcgccagcttggttctcctgggcaagaagaagaagaaagaagaggagggggaagggaaaaagaagggcggaggtgaaggtggggcaggagcagatgaggaaaaggagcagtcgcacagacctttcctcatgctgcaggcccggcagtctgaagaccaccctcatcgccggcgtcggcggggcttggagtgtgatggcaaggtcaacatctgctgtaagaaacagttctttgtcagtttcaaggacatcggctggaatgactggatcattgctccctctggctatcatgccaactactgcgagggtgagtgcccgagccatatagcaggcacgtccgggtcctcactgtccttccactcaacagtcatcaaccactaccgcatgcggggccatagcccctttgccaacctcaaatcgtgctgtgtgcccaccaagctgagacccatgtccatgttgtactatgatgatggtcaaaacatcatcaaaaaggacattcagaacatgatcgtggaggagtgtgggtgctcatagagttgcccagcccagggggaaagggagcaagagttgtccagagaagacagtggcaaaatgaagaaatttttaaggtttctgagttaaccagaaaaatagaaattaaaaacaaaaca

SEQ ID NO: 142608 - DNA, 3204 bp, Homo sapiens
  Payload ID: 8180
  Gene Symbol: INHBB
  Gene Name: inhibin, beta B
  Uniprot ID: P09529
  ENST ID: ENST00000295228
  CDS Start-End: 47-1270
actcggctcgcctcgcggcgggcgccctcgtcgccagcggcgcaccatggacgggctgcccggtcgggcgctgggggccgcctgccttctgctgctggcggccggctggctggggcctgaggcctggggctcacccacgcccccgccgacgcctgccgcgccgccgccacccccgccacccggatccccgggtggctcgcaggacacctgtacgtcgtgcggcggcttccggcggccagaggagctcggccgagtggacggcgacttcctggaggcggtgaagcggcacatcttgagccgcctgcagatgcggggccggcccaacatcacgcacgccgtgcctaaggccgccatggtcacggccctgcgcaagctgcacgcgggcaaggtgcgcgaggacggccgcgtggagatcccgcacctcgacggccacgccagcccgggcgccgacggccaggagcgcgtttccgaaatcatcagcttcgccgagacagatggcctcgcctcctcccgggtccgcctatacttcttcatctccaacgaaggcaaccagaacctgtttgtggtccaggccagcctgtggctttacctgaaactcctgccctacgtcctggagaagggcagccggcggaaggtgcgggtcaaagtgtacttccaggagcagggccacggtgacaggtggaacatggtggagaagagggtggacctcaagcgcagcggctggcataccttcccactcacggaggccatccaggccttgtttgagcggggcgagcggcgactcaacctagacgtgcagtgtgacagctgccaggagctggccgtggtgccggtgttcgtggacccaggcgaagagtcgcaccggccctttgtggtggtgcaggctcggctgggcgacagcaggcaccgcattcgcaagcgaggcctggagtgcgatggccggaccaacctctgttgcaggcaacagttcttcattgacttccgcctcatcggctggaacgactggatcatagcacccaccggctactacgggaactactgtgagggcagctgcccagcctacctggcaggggtccccggctctgcctcctccttccacacggctgtggtgaaccagtaccgcatgcggggtctgaaccccggcacggtgaactcctgctgcattcccaccaagctgagcaccatgtccatgctgtacttcgatgatgagtacaacatcgtcaagcgggacgtgcccaacatgattgtggaggagtgcggctgcgcctgacagtgcaaggcaggggcacggtggtggggcacggagggcagtcccgggtgggcttcttccagcccccgcgggaacgggggtacacggtgggctgagtacagtcattctgttgggctgtggagatagtgccagggtgcggcctgagatatttttctacagcttcatagagcaaccagtcaaaaccagagcgagaaccctcaactgacatgaaatactttaaaatgcacacgtagccacgcacagccagacgcatcctgccacccacacagcagcctccaggataccagcaaatggatgcggtgacaaatggcagcttagctacaaatgcctgtcagtcggagagaatggggtgagcagccaccattcccaccagctggcccggccactctgaattgcgccttccgagcacacataaaagcacaaagacagagacgcagagagagagagagagccacggagaggaaaagcagatgcaggggtggggagcgcagctcggcggaggctgcgtgtgccccgtggcttttaccaggcctgctctgcctggctcgatgtctgcttcttccccagcctgggatccttcgtgcttcaaggcctggggagcctgtccttccatgcccttgtcgagggaaagagacccagaaaggacacaacccgtcagagacctgggagcaggggcaatgaccgtttgactgtttgtggcttgggcctctgacatgacttatgtgtgtgtgtgtttttggggtggggagggagggagagaagagggggctaaatttgatgctttaactgatctccaacagttgacaggtcatccttgccagttgtataactgaaaaaggacttttctaccaggtatgaccttttaagtgaaaatctgaattgttctaaatggaaagaaaaaaagttgcaatctgtgcccttcattggggacattcctctaggactggtttggggacgggtgggaatgacccctaggcaaggggatgagaccgcaggaggaaatggcggggaggaggcattcttgaactgctgaggatggggggtgtcccctcagcggaggccaagggaggggagcagcctagttggtcttggagagatggggaaggctttcagctgatttgcagaagttgcccatgtgggccccagccatcagggctggccgtggacgtggcccctgcccactcacctgcccgcctgcccgcccgcccgcatagcacttgcagacctgcctgaacgcacatgacatagcacttgccgatctgcgtgtgtccagaagtggcccttggccgagcgccgaactcgctcgccctctagatgtccaagtgccacgtgaactatgcaatttaaagggttgacccacactagacgaaactggactcgtacgactctttttatattttttatacttgaaatgaaatcctttgcttcttttttaagcgaatgattgcttttaatgtttgcactgatttagttgcatgattagtcagaaactgccatttgaaaaaaagttatttttatagcagcaaaaaaaaaaaaaaaagaatacagttaaatgtattatacataattttggaaccaaagaggccaacagatcagttttaattttattagacggtgaggccatctgagatgaggtggacgttctgagcagtcccttgagtggcctgccaacgtttcagggtatgaatggattttgtttattcggtttgatgtgtcttttccatccttacacacccagaaggtagagtaaaaatgactatgatagaatgcaggtgtgtatccttaaatcctcatctttatgtttatttaataaagctccccttagattctgtttcataataatttaaaaccaaacaattttcccatagacttgctgttaaagtattgtacgtttgtgtacagtttaagaaaataaaagattgagtgccacgggc

SEQ ID NO: 142609 - DNA, 1992 bp, Homo sapiens
  Payload ID: 8181
  Gene Symbol: INHBC
  Gene Name: inhibin, beta C
  Uniprot ID: P55103
  ENST ID: ENST00000309668
  CDS Start-End: 128-1186
caaggagccatgccagctggacacacacttcttccagggcctctggcagccaggacagagttgagaccacagctgttgagaccctgagccctgagtctgtattgctcaagaagggccttccccagcaatgacctcctcattgcttctggcctttctcctcctggctccaaccacagtggccactcccagagctggcggtcagtgtccagcatgtggggggcccaccttggaactggagagccagcgggagctgcttcttgatctggccaagagaagcatcttggacaagctgcacctcacccagcgcccaacactgaaccgccctgtgtccagagctgctttgaggactgcactgcagcacctccacggggtcccacagggggcacttctagaggacaacagggaacaggaatgtgaaatcatcagctttgctgagacaggcctctccaccatcaaccagactcgtcttgattttcacttctcctctgatagaactgctggtgacagggaggtccagcaggccagtctcatgttctttgtgcagctcccttccaataccacttggaccttgaaagtgagagtccttgtgctgggtccacataataccaacctcaccttggctactcagtacctgctggaggtggatgccagtggctggcatcaactccccctagggcctgaagctcaagctgcctgcagccaggggcacctgaccctggagctggtacttgaaggccaggtagcccagagctcagtcatcctgggtggagctgcccataggccttttgtggcagcccgggtgagagttgggggcaaacaccagattcaccgacgaggcatcgactgccaaggagggtccaggatgtgctgtcgacaagagttttttgtggacttccgtgagattggctggcacgactggatcatccagcctgagggctacgccatgaacttctgcatagggcagtgcccactacacatagcaggcatgcctggtattgctgcctcctttcacactgcagtgctcaatcttctcaaggccaacacagctgcaggcaccactggagggggctcatgctgtgtacccacggcccggcgccccctgtctctgctctattatgacagggacagcaacattgtcaagactgacatacctgacatggtagtagaggcctgtgggtgcagttagtctatgtgtggtatgggcagcccaaggttgcatgggaaaacacgcccctacagaagtgcacttccttgagaggagggaatgacctcattctctgtccagaatgtggactccctcttcctgagcatcttatggaaattaccccacctttgacttgaagaaaccttcatctaaagcaagtcactgtgccatcttcctgaccactaccctctttcctagggcatagtccatcccgctagtccatcccgctagccccactccagggactcagacccatctccaaccatgagcaatgccatctggttcccaggcaaagacacccttagctcacctttaatagaccccataacccactatgccttcctgtcctttctactcaatggtccccactccaagatgagttgacacaaccccttcccccaatttttgtggatctccagagaggcccttctttggattcaccaaagtttagatcactgctgcccaaaatagaggcttacctacccccctctttgttgtgagcccctgtccttcttagttgtccaggtgaactactaaagctctctttgcataccttcatccattttttgtccttctctgcctttctctatgcccttaagggctgacttgcctgagctctatcacctgagctcccctgccctctggcttcctgctgaggtcagggcatttcttatccctgttccctctctgtctaggtgtcatggttctgtgtaactgtggctattctgtgtccctacactacctggctacccccttccatggccccagctctgcctacattctgatat

SEQ ID NO: 142610 - DNA, 2429 bp, Homo sapiens
  Payload ID: 8182
  Gene Symbol: INHBE
  Gene Name: inhibin, beta E
  Uniprot ID: P58166
  ENST ID: ENST00000266646
  CDS Start-End: 217-1269
agctgtgagggtcaagcacagctatccatcagatgatctactttcagccttcctgagtcccagacaatagaagacaggtggctgtacccttggccaagggtaggtgtggcagtggtgtctgctgtcactgtgccctcattggcccccagcaatcagactcaacagacggagcaactgccatccgaggctcctgaaccagggccattcaccaggagcatgcggctccctgatgtccagctctggctggtgctgctgtgggcactggtgcgagcacaggggacagggtctgtgtgtccctcctgtgggggctccaaactggcaccccaagcagaacgagctctggtgctggagctagccaagcagcaaatcctggatgggttgcacctgaccagtcgtcccagaataactcatcctccaccccaggcagcgctgaccagagccctccggagactacagccagggagtgtggctccagggaatggggaggaggtcatcagctttgctactgtcacagactccacttcagcctacagctccctgctcacttttcacctgtccactcctcggtcccaccacctgtaccatgcccgcctgtggctgcacgtgctccccacccttcctggcactctttgcttgaggatcttccgatggggaccaaggaggaggcgccaagggtcccgcactctcctggctgagcaccacatcaccaacctgggctggcataccttaactctgccctctagtggcttgaggggtgagaagtctggtgtcctgaaactgcaactagactgcagacccctagaaggcaacagcacagttactggacaaccgaggcggctcttggacacagcaggacaccagcagcccttcctagagcttaagatccgagccaatgagcctggagcaggccgggccaggaggaggacccccacctgtgagcctgcgacccccttatgttgcaggcgagaccattacgtagacttccaggaactgggatggcgggactggatactgcagcccgaggggtaccagctgaattactgcagtgggcagtgccctccccacctggctggcagcccaggcattgctgcctctttccattctgccgtcttcagcctcctcaaagccaacaatccttggcctgccagtacctcctgttgtgtccctactgcccgaaggcccctctctctcctctacctggatcataatggcaatgtggtcaagacggatgtgccagatatggtggtggaggcctgtggctgcagctagcaagaggacctggggctttggagtgaagagaccaagatgaagtttcccaggcacagggcatctgtgactggaggcatcagattcctgatccacaccccaacccaacaaccacctggcaatatgactcacttgacccctatgggacccaaatgggcactttcttgtctgagactctggcttattccaggttggctgatgtgttgggagatgggtaaagcgtttcttctaaaggggtctacccagaaagcatgatttcctgccctaagtcctgtgagaagatgtcagggactagggagggagggagggaaggcagagaaaaattacttagcctctcccaagatgagaaagtcctcaagtgaggggaggaggaagcagatagatggtccagcaggcttgaagcagggtaagcaggctggcccagggtaagggctgttgaggtaccttaagggaaggtcaagagggagatgggcaaggcgctgagggaggatgcttaggggacccccagaaacaggagtcaggaaaatgaggcactaagcctaagaagttccctggtttttcccaggggacaggacccactgggagacaagcatttatactttctttcttcttttttatttttttgagatcgagtctcgctctgtcaccaggctggagtgcagtgacacgatcttggctcactgcaacctccgtctcctgggttcaagtgattcttctgcctcagcctcccgagcagctgggattacaggcgcccactaatttttgtattcttagtagaaacgaggtttcaacatgttggccaggatggtctcaatctcttgacctcttgatccacccgacttggcctcccgaagtgatgagattataggcgtgagccaccgcgcctggcttatactttcttaataaaaaggagaaagaaaatcaacaaatgtgagtcataaagaagggttagggtgatggtccagagcaacagttcttcaagtgtactctgtaggcttctgggaggtcccttttcaggggtgtccacaaagtcaaagctattttcataataatactaacatgttatttgccttttgaattctcattatcttaaaattgtattgtggagttttccagaggccgtgtgacatgtgattacatcatctttctgacatcattgttaa

SEQ ID NO: 142611 - DNA, 1056 bp, Homo sapiens
  Payload ID: 8182
  Gene Symbol: INHBE
  Gene Name: inhibin, beta E
  ENST ID: ENST00000547970
  CDS Start-End: 235-1056
tccacatcatgctccaggccaactggactctgggcggccagcacaggcagggtcagggggtgacttctgtgcctcgtggcactgccacctgggcctgagcaagagggctccattctcctacccgcccaaaccctcatccctgtcctagccccagtgctagaaataaagagaccagaattttccttctggcctaagggccccagaggaatacccactggaactcacagctgcctcatggaaactgctgcagcagtggtgaagctagaaagactagaggcagcgctgaccagagccctccggagactacagccagggagtgtggctccagggaatggggaggaggtcatcagctttgctactgtcacagactccacttcagcctacagctccctgctcacttttcacctgtccactcctcggtcccaccacctgtaccatgcccgcctgtggctgcacgtgctccccacccttcctggcactctttgcttgaggatcttccgatggggaccaaggaggaggcgccaagggtcccgcactctcctggctgagcaccacatcaccaacctgggctggcataccttaactctgccctctagtggcttgaggggtgagaagtctggtgtcctgaaactgcaactagactgcagacccctagaaggcaacagcacagttactggacaaccgaggcggctcttggacacagcaggacaccagcagcccttcctagagcttaagatccgagccaatgagcctggagcaggccgggccaggaggaggacccccacctgtgagcctgcgacccccttatgttgcaggcgagaccattacgtagacttccaggaactgggatggcgggactggatactgcagcccgaggggtaccagctgaattactgcagtgggcagtgccctccccacctggctggcagcccaggcattgctgcctctttccattctgccgtcttcagcctcctcaaagccaacaatccttggcctgccagtacctcctgttgtgtccctactgcccgaaggcccctctctctcctctacctggat

SEQ ID NO: 142612 - DNA, 6054 bp, Homo sapiens
  Payload ID: 8183
  Gene Symbol: IBTK
  Gene Name: inhibitor of Bruton agammaglobulinemia tyrosine kinase
  Uniprot ID: Q9P2D0
  ENST ID: ENST00000306270
  CDS Start-End: 551-4612
cttcctctacatccccgttcccgattcctgtagtagcggctgtattgcagccgcctgccgaactgacccgggtctggggactggcccctctggcgccgttcggtttctcttattgccttcactgaggatgagtccctttgtggctctatgtggaccctgcggaatccaccggcgcagtttcatctagcgactggtcacccttgcaattatggatatttaaaagggtcagacagtgtggagggggagttcccctcctcactcccccttggtgcttgactccaggaataatttataaactgtggaatttttttaaatgaagaacttgtatttgatatgaactttatagagctatttataatttttttgatttaagtgccaaaaaattgtataaagatatatagttttatactattgtcaggaggatttaaattatcctaaaaaggtaatttattctctgtaacttcctcaatagcacctttgtgtcctggctttttcattttttaaaattagttttcacgattctgaagtaagtggtataaaaacagttaggatgagttcacccatgcctgactgcacatcaaagtgtcgatccctgaagcatgctttggatgtcctttctgtggtaacaaaggggagcgaaaaccagattaaggcctttctctccagtcattgttacaatgctgcaactatcaaggatgtttttggcaggaatgccctccaccttgtttcctcctgtggaaagaaaggagtgttagattggcttattcagaaaggagtggatctgttggtgaaagacaaagagtctggatggacagcattgcacagaagcattttttatggacatattgattgtgtttggtctctattgaagcatggtgttagtctgtatattcaagataaagaaggcttgtcagctttggatcttgtaatgaaggatagaccaactcatgtagtattcaagaatactgatcctacagatgtttatacttggggcgataatacaaattttaccctgggtcatggaagccagaatagcaaacatcatccagagttggtggatctgttctccaggagtgggatttatatcaagcaggtggtgctttgtaaatttcactccgtgtttctgtctcagaaagggcaggtttatacctgtggtcatggtcctggagggcgattaggacatggagatgaacagacatgcttggtccctcggcttgtggaaggactgaatggtcataattgttcccaagtggcagctgctaaggatcatactgttgtattaactgaagatggatgtgtttatacatttggtctaaacatttttcatcaattaggaattattccaccgccttccagttgtaatgtacccagacagatacaggcaaaatatctgaaaggaaggacaatcattggcgttgcagcaggcaggtttcatacagtcctatggactagagaagctgtttacactatgggactaaatggtggacaactgggttgtttgctagatcccaatggagaaaagtgtgtaactgctcctcgtcaggtctctgcccttcaccataaagacattgctctgtctttggttgctgcaagtgatggagctacagtctgtgttaccacaaggggagatatttacttacttgcagactatcagtgcaagaagatggcttctaaacagttgaacttgaaaaaagttcttgtgtctgggggtcatatggaatacaaggttgatcctgaacatttgaaagaaaatgggggtcaaaaaatttgcattcttgcaatggatggagctggaagggtgttttgctggagatcagtcaacagttctctgaagcagtgtcgatgggcctatccacgtcaggtcttcatttctgatattgctttaaatagaaatgaaattctatttgttacgcaagatggagaaggatttagagggagatggtttgaagagaaaagaaagagttctgaaaagaaagagattttatcaaaccttcacaattcctcatcagatgtgtcttatgtctctgatataaatagtgtgtatgaaagaattcgacttgagaaacttacctttgcacatagagctgttagtgtcagcacagatccaagtggatgcaactttgcaatcctgcagtcagatcctaaaacaagcctttatgaaattccagctgtgtcctcatcatccttttttgaagagtttggcaaactgttgagggaagcagatgaaatggacagcattcatgatgtgacatttcaagttggcaatagactcttccctgcacataaatatattttggcagtgcattctgatttttttcagaaattgtttctttcagatggtaatacttcagaatttacagatatttaccagaaagatgaagattctgcagggtgccatctctttgtggtagagaaggttcatcctgacatgtttgaataccttttacaatttatatacacagatacttgtgactttttaactcatggcttcaaaccaagaatacacttaaacaaaaacccagaagaatatcagggaactctgaattctcatttgaataaagtgaatttccatgaagatgataaccagaagtctgcatttgaagtttacaaaagtaatcaagctcaaacagttagtgagaggcagaagagcaaacctaaatcttgtaaaaaaggaaaaaatattagggaagatgatcctgtaagaatgttgcaaactgttgcaaagaaattcgacttcagtaatttgagtagtaggttagatggagtcagatttgaaaatgaaaaaattaatgttattgccaagaacactggtaataaactgaagctaagtcagaaaaaatgttcatttctgtgtgacgtgaccatgaaatcagtggatggaaaggaatttccttgtcataaatgtgttctttgtgctagacttgaatattttcatagtatgctgagtagctcatggattgaggcttccagttgtgcagctctggaaatgccaatacattctgatatattaaaagttattttggactacctctatactgatgaagctgtggtgataaaagaatctcaaaatgtagattttatttgtagtgttcttgtggtggctgatcaacttctcataacccggttgaaagagatttgtgaagtagcattaactgaaaaacttaccctgaagaatgctgctatgctactggaatttgcagcaatgtatagtgcaaaacagttgaaactgtcttgtttacagtttataggattgaatatggcagctttacttgaagcaaggtctcttgatgttttaagcgatggtgttttgaaggatctttctgagttttaccggaaaatgattccagcaatggatagaagagtcattacaccatatcaagatggaccagatattagctatttggaagtagaagatggagatatcttcttgaaagaagaaataaatatggaacaaaatcattcggaaactatgttcaagaaagcaaaaacaaaagctaaaaagaagccacgtaaacgttcagatagttctggaggttataacctttcagatattattcagagtccatcatctacaggattattaaagtctggtaagaccaattctgtggaatctcttccagaactgttgacatcagactctgaaggaagctatgcaggagtgggtagtcctagagatttacagtcccctgatttcacaacaggatttcattcagataagattgaggcgaaagtcaaaccgtatgttaatggtacatctcctgtgtattctagggaagatttaaaaccatgggaaaagtcaccaatacttaaaatatctgctccacagcctattcccagtaacagaattgatactaccagctctgccagttgggttgctggttctttcagtcctgtcagccctcctgttgtggatctcagaactatcatggaaatagaagaaagtagacaaaaatgtggagctacaccaaagtcacatttaggcaaaacagtttctcatggagttaaactttctcagaagcaacgaaaaatgattgcattgactaccaaggaaaacaattcaggaatgaatagcatggaaacagttttattcactccttcaaaagcccccaaaccagtgaatgcatgggcatcttctctgcattcagtttcatccaagtcattccgggatttcttactagaagaaaaaaagtctgttactagccatagttcaggcgatcatgtcaaaaaagtttcttttaaaggaattgaaaattctcaggcaccaaaaattgtcagatgctctacccatggtaccccaggaccagaaggcaaccatatttcagatttaccacttctagacagtcccaatccctggctatcttcttcagtgactgctccatccatggtagccccagtcacttttgcatctattgtagaagaagaactacaacaagaagcagctcttattagaagtcgagaaaaaccgttggctctgattcagattgaggagcatgccatacaagatttattggttttctatgaggcatttggcaaccctgaagagtttgtcattgttgaaaggacaccgcagggaccactggcagtacctatgtggaataagcatggatgctagttcactgtggagttgagatgcattttacataattatgagtttgttcatataaagaaaagctgtggaaaagagtcttagagattttgtaatatcattctaaatagattaagaaaagatataatttctttactgcagttaaatcatataatgtttgtatgattaaaaataaatttctcagaattgtgattttagtaactttatataaaatgtgtgagacaaaaacttattaaggttaaatagaattgtttcttctgaataatctaacaaaggaaaatataagtgattgaatcataagatataaggggggtaaagtattaaaaataacttttttgtttgataacttgagaatttagaagattttgccaagtatgtgttgttgcttgacttcttaaatatggcattgatgaatttaaagtaggagcatcagttattacttctgattcattaatggccagaattttgtgtttggtgtaatagttgtgtcaccattcttgttgctttttaaaaatcaggctaatcatgtggtccatgtctcttcaaagcttgacctgcacaaatgccatatttctatttggaccacatattctccattttgcattgagcagtagagtacagtggaaagggaataagaatactgattattctgaacagtttagtcccaagagaatagcgttttaaaaaagaaaaacaagatttggagtcattgtgggttatttttggtgggatggaggatcttaaaaatgcctaattgtgagagaatcaattgctgaaagtgttaaaatttctgaaaataaatgcttaattacatatacaggaattaaatagtttggaagagggttggattatcattacctttacaatactgtataatcagaagttctctgaacctcaattgtatatctagacataaaaattgttttctgtataggatgttgtttggtttgtttctgagtgtttaaattttgcaaaaacaaatgttaaatttgtgcttcagtacctagataaattggaaaggttaatgttctagtttctggaaggtaagcctgggagacacataagcaattcactgctataatttagttgatgtaaaatgacggaaactgactcaatatgtcaggtttaactctgcccaaaagcagcagacatgtaagcagatgtgcaataaaaaatgatcttgatccatttcactaatgtgtgcttgacattttttactatattgacatttattatggaaagagttaataattattttttctgatgtgctacactagtggccagtatatggttaagttgatgctgtatttattctaagacggatttaaaaaggcagttttctaaatatgaacttgtgaatttttgtatgtgtgtttgagtaaattgagaaatgaattttataaatgttctattgatgttgcagtaaagaagccttttgaagtaattga

SEQ ID NO: 142613 - DNA, 5239 bp, Homo sapiens
  Payload ID: 8183
  Gene Symbol: IBTK
  Gene Name: inhibitor of Bruton agammaglobulinemia tyrosine kinase
  ENST ID: ENST00000503400
  CDS Start-End: 468-1184
gcccctctggcgccgttcggtttctcttattgccttcactgaggatgagtccctttgtggctctatgtggaccctgcggaatccaccggcgcagtttcatctagcgactggtcacccttgcaattatggatatttaaaagggtcagacagtgtggagggggagttcccctcctcactcccccttggtgcttgactccaggaataatttataaactgtggaatttttttaaatgaagaacttgtatttgatatgaactttatagagctatttataatttttttgatttaagtgccaaaaaattgtataaagatatatagttttatactattgtcaggaggatttaaattatcctaaaaaggtaatttattctctgtaacttcctcaatagcacctttgtgtcctggctttttcattttttaaaattagttttcacgattctgaagtaagtggtataaaaacagttaggatgagttcacccatgcctgactgcacatcaaagtgtcgatccctgaagcatgctttggatgtcctttctgtggtaacaaaggggagcgaaaaccagattaaggcctttctctccagtcattgttacaatgctgcaactatcaaggatgtttttggcaggaatgccctccaccttgtttcctcctgtggaaagaaaggagtgttagattggcttattcagaaaggagtggatctgttggtgaaagacaaagagtctggatggacagcattgcacagaagcattttttatggacatattgattgtgtttggtctctattgaagcatggtgttagtctgtatattcaagataaagaaggcttgtcagctttggatcttgtaatgaaggatagaccaactcatgtagtattcaagaatactgatcctacagatgtttatacttggggcgataatacaaattttaccctgggtcatggaagccagaatagcaaacatcatccagagttggtggatctgttctccaggagtgggatttatatcaagcaggtggtgctttgtaaatttcactccgtgtttctgtctcagaaagggcaggtttatacctgtggtcatggtcctggagggcgattaggacatggagatgaacagacatgcttggtaattgaaatgtcattacactatttaggtccctcggcttgtggaaggactgaatggtcataattgttcccaagtggcagctgctaaggatcatactgttgtattaactgaagatggatgtgtttatacatttggtctaaacatttttcatcaattaggaattattccaccgccttccagttgtaatgtacccagacagatacaggcaaaatatctgaaaggaaggacaatcattggcgttgcagcaggcaggtttcatacagtcctatggactagagaagctgtttacactatgggactaaatggtggacaactgggttgtttgctagatcccaatggagaaaagtgtgtaactgctcctcgtcaggtctctgcccttcaccataaagacattgctctgtctttggttgctgcaagtgatggagctacagtctgtgttaccacaaggggagatatttacttacttgcagactatcagtgcaagaagatggcttctaaacagttgaacttgaaaaaagttcttgtgtctgggggtcatatggaatacaaggttgatcctgaacatttgaaagaaaatgggggtcaaaaaatttgcattcttgcaatggatggagctggaagggtgttttgctggagatcagtcaacagttctctgaagcagtgtcgatgggcctatccacgtcaggtcttcatttctgatattgctttaaatagaaatgaaattctatttgttacgcaagatggagaaggatttagagggagatggtttgaagagaaaagaaagagttctgaaaagaaagagattttatcaaaccttcacaattcctcatcagatgtgtcttatgtctctgatataaatagtgtgtatgaaagaattcgacttgagaaacttacctttgcacatagagctgttagtgtcagcacagatccaagtggatgcaactttgcaatcctgcagtcagatcctaaaacaagcctttatgaaattccagctgtgtcctcatcatccttttttgaagagtttggcaaactgttgagggaagcagatgaaatggacagcattcatgatgtgacatttcaagttggcaatagactcttccctgcacataaatatattttggcagtgcattctgatttttttcagaaattgtttctttcagatggtaatacttcagaatttacagatatttaccagaaagatgaagattctgcagggtgccatctctttgtggtagagaaggttcatcctgacatgtttgaataccttttacaatttatatacacagatacttgtgactttttaactcatggcttcaaaccaagaatacacttaaacaaaaacccagaagaatatcagggaactctgaattctcatttgaataaagtgaatttccatgaagatgataaccagaagtctgcatttgaagtttacaaaagtaatcaagctcaaacagttagtgagaggcagaagagcaaacctaaatcttgtaaaaaaggaaaaaatattagggaagatgatcctgtaagaatgttgcaaactgttgcaaagaaattcgacttcagtaatttgagtagtaggttagatggagtcagatttgaaaatgaaaaaattaatgttattgccaagaacactggtaataaactgaagctaagtcagaaaaaatgttcatttctgtgtgacgtgaccatgaaatcagtggatggaaaggaatttccttgtcataaatgtgttctttgtgctagacttgaatattttcatagtatgctgagtagctcatggattgaggcttccagttgtgcagctctggaaatgccaatacattctgatatattaaaagttattttggactacctctatactgatgaagctgtggtgataaaagaatctcaaaatgtagattttatttgtagtgttcttgtggtggctgatcaacttctcataacccggttgaaagagatttgtgaagtagcattaactgaaaaacttaccctgaagaatgctgctatgctactggaatttgcagcaatgtatagtgcaaaacagttgaaactgtcttgtttacagtttataggattgaatatggcagctttacttgaagcaaggtctcttgatgttttaagcgatggtgttttgaaggatctttctgagttttaccggaaaatgattccagcaatggatagaagagtcattacaccatatcaagatggaccagatattagctatttggaagtagaagatggagatatcttcttgaaagaagaaataaatatggaacaaaatcattcggaaactatgttcaagaaagcaaaaacaaaagctaaaaagaagccacgtaaacgttcagatagttctggaggttataacctttcagatattattcagagtccatcatctacaggattattaaagtctggtaagaccaattctgtggaatctcttccagaactgttgacatcagactctgaaggaagctatgcaggagtgggtagtcctagagatttacagtcccctgatttcacaacaggatttcattcagataagattgaggcgaaagtcaaaccgtatgttaatggtacatctcctgtgtattctagggaagatttaaaaccatgggaaaagtcaccaatacttaaaatatctgctccacagcctattcccagtaacagaattgatactaccagctctgccagttgggttgctggttctttcagtcctgtcagccctcctgttgtggatctcagaactatcatggaaatagaagaaagtagacaaaaatgtggagctacaccaaagtcacatttaggcaaaacagtttctcatggagttaaactttctcagaagcaacgaaaaatgattgcattgactaccaaggaaaacaattcaggaatgaatagcatggaaacagttttattcactccttcaaaagcccccaaaccagtgaatgcatgggcatcttctctgcattcagtttcatccaagtcattccgggatttcttactagaagaaaaaaagtctgttactagccatagttcaggcgatcatgtcaaaaaagtttcttttaaaggaattgaaaattctcaggcaccaaaaattgtcagatgctctacccatggtaccccaggaccagaaggcaaccatatttcagatttaccacttctagacagtcccaatccctggctatcttcttcagtgactgctccatccatggtagccccagtcacttttgcatctattgtagaagaagaactacaacaagaagcagctcttattagaagtcgagaaaaaccgttggctctgattcagattgaggagcatgccatacaagatttattggttttctatgaggcatttggcaaccctgaagagtttgtcattgttgaaaggacaccgcagggaccactggcagtacctatgtggaataagcatggatgctagttcactgtggagttgagatgcattttacataattatgagtttgttcatataaagaaaagctgtggaaaagagtcttagagattttgtaatatcattctaaatagattaagaaaagatataatttctttactgcagttaaatcatataatgtttgtatgattaaaaataaatttctcagaattgtgattttagtaactttatataaaatgtgtgagacaaaaacttattaaggttaaatagaattgtttcttctgaataatctaacaaaggaaaatataagtgattgaatcataagatataaggggggtaaagtattaaaaataacttttttgtttgataacttgagaatttagaagattttgccaagtatgtgttgttgcttgacttcttaaatatggcattgatgaatttaaagtaggagcatcagttattacttctgattcattaatggccagaattttgtgtttggtgtaatagttgtgtcaccattcttgttgctttttaaaaatcaggctaatcatgtggtccatgtctcttcaaagcttgacctgcacaaatgccatatttctatttggaccacatattctccattttgcattgagcagtagagtacagtggaaagggaataagaatactgattattctgaacagtttagtcccaagagaatagcgttttaaaaaa

SEQ ID NO: 142614 - DNA, 3560 bp, Homo sapiens
  Payload ID: 8183
  Gene Symbol: IBTK
  Gene Name: inhibitor of Bruton agammaglobulinemia tyrosine kinase
  ENST ID: ENST00000503631
  CDS Start-End: 80-3538
gcacctttgtgtcctggctttttcattttttaaaattagttttcacgattctgaagtaagtggtataaaaacagttaggatgagttcacccatgcctgactgcacatcaaagtgtcgatccctgaagcatgctttggatgtcctttctgtggtaacaaaggggagcgaaaaccagattaaggcctttctctccagtcattgttacaatgctgcaactatcaaggatgtttttggcaggaatgccctccaccttgtttcctcctgtggaaagaaaggagtgttagattggcttattcagaaaggagtggatctgttggtgaaagacaaagagtctggatggacagcattgcacagaagcattttttatggacatattgattgtgtttggtctctattgaagcatggtgttagtctgtatattcaagataaagaaggcttgtcagctttggatcttgtaatgaaggatagaccaactcatgtagtattcaagaatactgatcctacagatgtttatacttggggcgataatacaaattttaccctgggtcatggaagccagaatagcaaacatcatccagagttggtggatctgttctccaggagtgggatttatatcaagcaggtggtgctttgtaaatttcactccgtgtttctgtctcagaaagggcaggtttatacctgtggtcatggtcctggagggcgattaggacatggagatgaacagacatgcttggtccctcggcttgtggaaggactgaatggtcataattgttcccaagtggcagctgctaaggatcatactgttgtattaactgaagatggatgtgtttatacatttggtctaaacatttttcatcaattaggaattattccaccgccttccagttgtaatgtacccagacagatacaggcaaaatatctgaaaggaaggacaatcattggcgttgcagcaggcaggtttcatacagtcctatggactagagaagctgtttacactatgggactaaatggtggacaactgggttgtttgctagatcccaatggagaaaagtgtgtaactgctcctcgtcaggtctctgcccttcaccataaagacattgctctgtctttggttgctgcaagtgatggagctacagtctgtgttaccacaaggggagatatttacttacttgcagactatcagtgcaagaagatggcttctaaacagttgaacttgaaaaaagttcttgtgtctgggggtcatatggaatacaaggttgatcctgaacatttgaaagaaaatgggggtcaaaaaatttgcattcttgcaatggatggagctggaagggtgttttgctggagatcagtcaacagttctctgaagcagtgtcgatgggcctatccacgtcaggtcttcatttctgatattgctttaaatagaaatgaaattctatttgttacgcaagatggagaaggatttagagggagatggtttgaagagaaaagaaagagttctgaaaagaaagagattttatcaaaccttcacaattcctcatcagatgtgtcttatgtctctgatataaatagtgtgtatgaaagaattcgacttgagaaacttacctttgcacatagagctgttagtgtcagcacagatccaagtggatgcaactttgcaatcctgcagtcagatcctaaaacaaggttagatggagtcagatttgaaaatgaaaaaattaatgttattgccaagaacactggtaataaactgaagctaagtcagaaaaaatgttcatttctgtgtgacgtgaccatgaaatcagtggatggaaaggaatttccttgtcataaatgtgttctttgtgctagacttgaatattttcatagtatgctgagtagctcatggattgaggcttccagttgtgcagctctggaaatgccaatacattctgatatattaaaagttattttggactacctctatactgatgaagctgtggtgataaaagaatctcaaaatgtagattttatttgtagtgttcttgtggtggctgatcaacttctcataacccggttgaaagagatttgtgaagtagcattaactgaaaaacttaccctgaagaatgctgctatgctactggaatttgcagcaatgtatagtgcaaaacagttgaaactgtcttgtttacagtttataggattgaatatggcagctttacttgaagcaaggtctcttgatgttttaagcgatggtgttttgaaggatctttctgagttttaccggaaaatgattccagcaatggatagaagagtcattacaccatatcaagatggaccagatattagctatttggaagtagaagatggagatatcttcttgaaagaagaaataaatatggaacaaaatcattcggaaactatgttcaagaaagcaaaaacaaaagctaaaaagaagccacgtaaacgttcagatagttctggaggttataacctttcagatattattcagagtccatcatctacaggattattaaagtctggtaagaccaattctgtggaatctcttccagaactgttgacatcagactctgaaggaagctatgcaggagtgggtagtcctagagatttacagtcccctgatttcacaacaggatttcattcagataagattgaggcgaaagtcaaaccgtatgttaatggtacatctcctgtgtattctagggaagatttaaaaccatgggaaaagtcaccaatacttaaaatatctgctccacagcctattcccagtaacagaattgatactaccagctctgccagttgggttgctggttctttcagtcctgtcagccctcctgttgtggatctcagaactatcatggaaatagaagaaagtagacaaaaatgtggagctacaccaaagtcacatttaggcaaaacagtttctcatggagttaaactttctcagaagcaacgaaaaatgattgcattgactaccaaggaaaacaattcaggaatgaatagcatggaaacagttttattcactccttcaaaagcccccaaaccagtgaatgcatgggcatcttctctgcattcagtttcatccaagtcattccgggatttcttactagaagaaaaaaagtctgttactagccatagttcaggcgatcatgtcaaaaaagtttcttttaaaggaattgaaaattctcaggcaccaaaaattgtcagatgctctacccatggtaccccaggaccagaaggcaaccatatttcagatttaccacttctagacagtcccaatccctggctatcttcttcagtgactgctccatccatggtagccccagtcacttttgcatctattgtagaagaagaactacaacaagaagcagctcttattagaagtcgagaaaaaccgttggctctgattcagattgaggagcatgccatacaagatttattggttttctatgaggcatttggcaaccctgaagagtttgtcattgttgaaaggacaccgcagggaccactggcagtacctatgtggaataagcatggatgctagttcactgtggagttgagatgca

SEQ ID NO: 142615 - DNA, 721 bp, Homo sapiens
  Payload ID: 8183
  Gene Symbol: IBTK
  Gene Name: inhibitor of Bruton agammaglobulinemia tyrosine kinase
  ENST ID: ENST00000471036
  CDS Start-End: 1-387
ctcagaactatcatggaaatagaagaaagtagacaaaaatgtggagctacaccaaagtcacatttaggcaaaacagtttctcatggagttaaactttctcagaagcaacgaaaaatgattgcattgactaccaaggaaaacaattcaggaatgaatagcatggaaacagttttattcactccttcaaaagcccccaaaccagtgaatgcatgggcatcttctctgcattcagtttcatccaagtcattccgggatttcttactagaagaaaaaaagtctgttactagccatagttcaggcgatcatgtcaaaaaagtttcttttaaaggaattgaaaattctcaggcaccaaaaattgtcagttttgtaggaggagagagaaggtgacatttgagccaactgtaaaagagtgagaagacatttgaagtggaatatattccagaataaggggaatagtaaaaataaagatgctctacccatggtaccccaggaccagaaggcaaccatatttcagatttaccacttctagacagtcccaatccctggctatcttcttcagtgactgctccatccatggtagccccagtcacttttgcatctattgtagaagaagaactacaacaagaagcagctcttattagaagtcgagaaaaaccgttggctctgattcagattgaggagcatgccatacaagatttattggttttctatgaggcatttg

SEQ ID NO: 142616 - DNA, 4109 bp, Homo sapiens
  Payload ID: 8183
  Gene Symbol: IBTK
  Gene Name: inhibitor of Bruton agammaglobulinemia tyrosine kinase
  ENST ID: ENST00000510291
  CDS Start-End: 80-4096
gcacctttgtgtcctggctttttcattttttaaaattagttttcacgattctgaagtaagtggtataaaaacagttaggatgagttcacccatgcctgactgcacatcaaagtgtcgatccctgaagcatgctttggatgtcctttctgtggtaacaaaggggagcgaaaaccagattaaggcctttctctccagtcattgttacaatgctgcaactatcaaggatgtttttggcaggaatgccctccaccttgtttcctcctgtggaaagaaaggagtgttagattggcttattcagaaaggagtggatctgttggtgaaagacaaagagtctggatggacagcattgcacagaagcattttttatggacatattgattgtgtttggtctctattgaagcatggtgttagtctgtatattcaagataaagaaggcttgtcagctttggatcttgtaatgaaggatagaccaactcatgtagtattcaagaatactgatcctacagatgtttatacttggggcgataatacaaattttaccctgggtcatggaagccagaatagcaaacatcatccagagttggtggatctgttctccaggagtgggatttatatcaagcaggtggtgctttgtaaatttcactccgtgtttctgtctcagaaagggcaggtttatacctgtggtcatggtcctggagggcgattaggacatggagatgaacagacatgcttggtccctcggcttgtggaaggactgaatggtcataattgttcccaagtggcagctgctaaggatcatactgttgtattaactgaagatggatgtgtttatacatttggtctaaacatttttcatcaattaggaattattccaccgccttccagttgtaatgtacccagacagatacaggcaaaatatctgaaaggaaggacaatcattggcgttgcagcaggcaggtttcatacagtcctatggactagagaagctgtttacactatgggactaaatggtggacaactgggttgtttgctagatcccaatggagaaaagtgtgtaactgctcctcgtcaggtctctgcccttcaccataaagacattgctctgtctttggttgctgcaagtgatggagctacagtctgtgttaccacaaggggagatatttacttacttgcagactatcagtgcaagaagatggcttctaaacagttgaacttgaaaaaagttcttgtgtctgggggtcatatggaatacaaggttgatcctgaacatttgaaagaaaatgggggtcaaaaaatttgcattcttgcaatggatggagctggaagggtgttttgctggagatcagtcaacagttctctgaagcagtgtcgatgggcctatccacgtcaggtcttcatttctgatattgctttaaatagaaatgaaattctatttgttacgcaagatggagaaggatttagagggagatggtttgaagagaaaagaaagagttctgaaaagaaagagattttatcaaaccttcacaattcctcatcagatgtgtcttatgtctctgatataaatagtgtgtatgaaagaattcgacttgagaaacttacctttgcacatagagctgttagtgtcagcacagatccaagtggatgcaactttgcaatcctgcagtcagatcctaaaacaagcctttatgaaattccagctgtgtcctcatcatccttttttgaagagtttggcaaactgttgagggaagcagatgaaatggacagcattcatgatgtgacatttcaagttggcaatagactcttccctgcacataaatatattttggcagtgcattctgatttttttcagaaattgtttctttcagatggtaatacttcagaatttacagatatttaccagaaagatgaagattctgcagggtgccatctctttgtggtagagaaggttcatcctgacatgtttgaataccttttacaatttatatacacagatacttgtgactttttaactcatggcttcaaaccaagaatacacttaaacaaaaacccagaagaatatcagggaactctgaattctcatttgaataaagtgaatttccatgaagatgataaccagaagtctgcatttgaagtttacaaaagtaatcaagctcaaacagttagtgagaggcagaagagcaaacctaaatcttgtaaaaaaggaaaaaatattagggaagatgatcctgtaagaatgttgcaaactgttgcaaagaaattcgacttcagtaatttgagtagtaggttagatggagtcagatttgaaaatgaaaaaattaatgttattgccaagaacactggtaataaactgaagctaagtcagaaaaaatgttcatttctgtgtgacgtgaccatgaaatcagtggatggaaaggaatttccttgtcataaatgtgttctttgtgctagacttgaatattttcatagtatgctgagtagctcatggattgaggcttccagttgtgcagctctggaaatgccaatacattctgatatattaaaagttattttggactacctctatactgatgaagctgtggtgataaaagaatctcaaaatgtagattttatttgtagtgttcttgtggtggctgatcaacttctcataacccggttgaaagagatttgtgaagtagcattaactgaaaaacttaccctgaagaatgctgctatgctactggaatttgcagcaatgtatagtgcaaaacagttgaaactgtcttgtttacagtttataggattgaatatggcagctttacttgaagcaaggtctcttgatgttttaagcgatggtgttttgaaggatctttctgagttttaccggaaaatgattccagcaatggatagaagagtcattacaccatatcaagatggaccagatattagctatttggaagtagaagatggagatatcttcttgaaagaagaaataaatatggaacaaaatcattcggaaactatgttcaagaaagcaaaaacaaaagctaaaaagaagccacgtaaacgttcagatagttctggaggttataacctttcagatattattcagagtccatcatctacagaactgttgacatcagactctgaaggaagctatgcaggagtgggtagtcctagagatttacagtcccctgatttcacaacaggatttcattcagataagattgaggcgaaagtcaaaccgtatgttaatggtacatctcctgtgtattctagggaagatttaaaaccatgggaaaagtcaccaatacttaaaatatctgctccacagcctattcccagtaacagaattgatactaccagctctgccagttgggttgctggttctttcagtcctgtcagccctcctgttgtggatctcagaactatcatggaaatagaagaaagtagacaaaaatgtggagctacaccaaagtcacatttaggcaaaacagtttctcatggagttaaactttctcagaagcaacgaaaaatgattgcattgactaccaaggaaaacaattcaggaatgaatagcatggaaacagttttattcactccttcaaaagcccccaaaccagtgaatgcatgggcatcttctctgcattcagtttcatccaagtcattccgggatttcttactagaagaaaaaaagtctgttactagccatagttcaggcgatcatgtcaaaaaagtttcttttaaaggaattgaaaattctcaggcaccaaaaattgtcagatgctctacccatggtaccccaggaccagaaggcaaccatatttcagatttaccacttctagacagtcccaatccctggctatcttcttcagtgactgctccatccatggtagccccagtcacttttgcatctattgtagaagaagaactacaacaagaagcagctcttattagaagtcgagaaaaaccgttggctctgattcagattgaggagcatgccatacaagatttattggttttctatgaggcatttggcaaccctgaagagtttgtcattgttgaaaggacaccgcagggaccactggcagtacctatgtggaataagcatggatgctagttcactgtggagt

SEQ ID NO: 142617 - DNA, 5195 bp, Homo sapiens
  Payload ID: 8183
  Gene Symbol: IBTK
  Gene Name: inhibitor of Bruton agammaglobulinemia tyrosine kinase
  ENST ID: ENST00000610980
  CDS Start-End: 551-4009
cttcctctacatccccgttcccgattcctgtagtagcggctgtattgcagccgcctgccgaactgacccgggtctggggactggcccctctggcgccgttcggtttctcttattgccttcactgaggatgagtccctttgtggctctatgtggaccctgcggaatccaccggcgcagtttcatctagcgactggtcacccttgcaattatggatatttaaaagggtcagacagtgtggagggggagttcccctcctcactcccccttggtgcttgactccaggaataatttataaactgtggaatttttttaaatgaagaacttgtatttgatatgaactttatagagctatttataatttttttgatttaagtgccaaaaaattgtataaagatatatagttttatactattgtcaggaggatttaaattatcctaaaaaggtaatttattctctgtaacttcctcaatagcacctttgtgtcctggctttttcattttttaaaattagttttcacgattctgaagtaagtggtataaaaacagttaggatgagttcacccatgcctgactgcacatcaaagtgtcgatccctgaagcatgctttggatgtcctttctgtggtaacaaaggggagcgaaaaccagattaaggcctttctctccagtcattgttacaatgctgcaactatcaaggatgtttttggcaggaatgccctccaccttgtttcctcctgtggaaagaaaggagtgttagattggcttattcagaaaggagtggatctgttggtgaaagacaaagagtctggatggacagcattgcacagaagcattttttatggacatattgattgtgtttggtctctattgaagcatggtgttagtctgtatattcaagataaagaaggcttgtcagctttggatcttgtaatgaaggatagaccaactcatgtagtattcaagaatactgatcctacagatgtttatacttggggcgataatacaaattttaccctgggtcatggaagccagaatagcaaacatcatccagagttggtggatctgttctccaggagtgggatttatatcaagcaggtggtgctttgtaaatttcactccgtgtttctgtctcagaaagggcaggtttatacctgtggtcatggtcctggagggcgattaggacatggagatgaacagacatgcttggtccctcggcttgtggaaggactgaatggtcataattgttcccaagtggcagctgctaaggatcatactgttgtattaactgaagatggatgtgtttatacatttggtctaaacatttttcatcaattaggaattattccaccgccttccagttgtaatgtacccagacagatacaggcaaaatatctgaaaggaaggacaatcattggcgttgcagcaggcaggtttcatacagtcctatggactagagaagctgtttacactatgggactaaatggtggacaactgggttgtttgctagatcccaatggagaaaagtgtgtaactgctcctcgtcaggtctctgcccttcaccataaagacattgctctgtctttggttgctgcaagtgatggagctacagtctgtgttaccacaaggggagatatttacttacttgcagactatcagtgcaagaagatggcttctaaacagttgaacttgaaaaaagttcttgtgtctgggggtcatatggaatacaaggttgatcctgaacatttgaaagaaaatgggggtcaaaaaatttgcattcttgcaatggatggagctggaagggtgttttgctggagatcagtcaacagttctctgaagcagtgtcgatgggcctatccacgtcaggtcttcatttctgatattgctttaaatagaaatgaaattctatttgttacgcaagatggagaaggatttagagggagatggtttgaagagaaaagaaagagttctgaaaagaaagagattttatcaaaccttcacaattcctcatcagatgtgtcttatgtctctgatataaatagtgtgtatgaaagaattcgacttgagaaacttacctttgcacatagagctgttagtgtcagcacagatccaagtggatgcaactttgcaatcctgcagtcagatcctaaaacaaggttagatggagtcagatttgaaaatgaaaaaattaatgttattgccaagaacactggtaataaactgaagctaagtcagaaaaaatgttcatttctgtgtgacgtgaccatgaaatcagtggatggaaaggaatttccttgtcataaatgtgttctttgtgctagacttgaatattttcatagtatgctgagtagctcatggattgaggcttccagttgtgcagctctggaaatgccaatacattctgatatattaaaagttattttggactacctctatactgatgaagctgtggtgataaaagaatctcaaaatgtagattttatttgtagtgttcttgtggtggctgatcaacttctcataacccggttgaaagagatttgtgaagtagcattaactgaaaaacttaccctgaagaatgctgctatgctactggaatttgcagcaatgtatagtgcaaaacagttgaaactgtcttgtttacagtttataggattgaatatggcagctttacttgaagcaaggtctcttgatgttttaagcgatggtgttttgaaggatctttctgagttttaccggaaaatgattccagcaatggatagaagagtcattacaccatatcaagatggaccagatattagctatttggaagtagaagatggagatatcttcttgaaagaagaaataaatatggaacaaaatcattcggaaactatgttcaagaaagcaaaaacaaaagctaaaaagaagccacgtaaacgttcagatagttctggaggttataacctttcagatattattcagagtccatcatctacaggattattaaagtctggtaagaccaattctgtggaatctcttccagaactgttgacatcagactctgaaggaagctatgcaggagtgggtagtcctagagatttacagtcccctgatttcacaacaggatttcattcagataagattgaggcgaaagtcaaaccgtatgttaatggtacatctcctgtgtattctagggaagatttaaaaccatgggaaaagtcaccaatacttaaaatatctgctccacagcctattcccagtaacagaattgatactaccagctctgccagttgggttgctggttctttcagtcctgtcagccctcctgttgtggatctcagaactatcatggaaatagaagaaagtagacaaaaatgtggagctacaccaaagtcacatttaggcaaaacagtttctcatggagttaaactttctcagaagcaacgaaaaatgattgcattgactaccaaggaaaacaattcaggaatgaatagcatggaaacagttttattcactccttcaaaagcccccaaaccagtgaatgcatgggcatcttctctgcattcagtttcatccaagtcattccgggatttcttactagaagaaaaaaagtctgttactagccatagttcaggcgatcatgtcaaaaaagtttcttttaaaggaattgaaaattctcaggcaccaaaaattgtcagatgctctacccatggtaccccaggaccagaaggcaaccatatttcagatttaccacttctagacagtcccaatccctggctatcttcttcagtgactgctccatccatggtagccccagtcacttttgcatctattgtagaagaagaactacaacaagaagcagctcttattagaagtcgagaaaaaccgttggctctgattcagattgaggagcatgccatacaagatttattggttttctatgaggcatttggcaaccctgaagagtttgtcattgttgaaaggacaccgcagggaccactggcagtacctatgtggaataagcatggatgctagttcactgtggagttgagatgcattttacataattatgagtttgttcatataaagaaaagctgtggaaaagagtcttagagattttgtaatatcattctaaatagattaagaaaagatataatttctttactgcagttaaatcatataatgtttgtatgattaaaaataaatttctcagaattgtgattttagtaactttatataaaatgtgtgagacaaaaacttattaaggttaaatagaattgtttcttctgaataatctaacaaaggaaaatataagtgattgaatcataagatataaggggggtaaagtattaaaaataacttttttgtttgataacttgagaatttagaagattttgccaagtatgtgttgttgcttgacttcttaaatatggcattgatgaatttaaagtaggagcatcagttattacttctgattcattaatggccagaattttgtgtttggtgtaatagttgtgtcaccattcttgttgctttttaaaaatcaggctaatcatgtggtccatgtctcttcaaagcttgacctgcacaaatgccatatttctatttggaccacatattctccattttgcattgagcagtagagtacagtggaaagggaataagaatactgattattctgaacagtttagtcccaagagaatagcgttttaaaaaagaaaaacaagatttggagtcattgtgggttatttttggtgggatggaggatcttaaaaatgcctaattgtgagagaatcaattgctgaaagtgttaaaatttctgaaaataaatgcttaattacatatacaggaattaaatagtttggaagagggttggattatcattacctttacaatactgtataatcagaagttctctgaacctcaattgtatatctagacataaaaattgttttctgtataggatgttgtttggtttgtttctgagtgtttaaattttgcaaaaacaaatgttaaatttgtgcttcagtacctagataaattggaaaggttaatgttctagtttctggaaggtaagcctgggagacacataagcaattcactgctataatttagttgatgtaaaatgacggaaactgactcaatatgtcaggtttaactctgcccaaaagcagcagacatgtaagcagatgtgcaataaaaaatgatcttgatccatttc

SEQ ID NO: 142618 - DNA, 721 bp, Homo sapiens; identical to SEQ ID NO: 142615
  Payload ID: 8183
  Gene Symbol: IBTK
  Gene Name: inhibitor of Bruton agammaglobulinemia tyrosine kinase
  ENST ID: ENST00000634571
  CDS Start-End: 1-387

SEQ ID NO: 142619 - DNA, 3560 bp, Homo sapiens; identical to SEQ ID NO: 142614
  Payload ID: 8183
  Gene Symbol: IBTK
  Gene Name: inhibitor of Bruton agammaglobulinemia tyrosine kinase
  ENST ID: ENST00000634695
  CDS Start-End: 80-3538

SEQ ID NO: 142620 - DNA, 5239 bp, Homo sapiens; identical to SEQ ID NO: 142613
  Payload ID: 8183
  Gene Symbol: IBTK
  Gene Name: inhibitor of Bruton agammaglobulinemia tyrosine kinase
  ENST ID: ENST00000634585
  CDS Start-End: 468-1184

SEQ ID NO: 142621 - DNA, 6054 bp, Homo sapiens; identical to SEQ ID NO: 142612
  Payload ID: 8183
  Gene Symbol: IBTK
  Gene Name: inhibitor of Bruton agammaglobulinemia tyrosine kinase
  ENST ID: ENST00000635454
  CDS Start-End: 551-4612

SEQ ID NO: 142622 - DNA, 4109 bp, Homo sapiens; identical to SEQ ID NO: 142616
  Payload ID: 8183
  Gene Symbol: IBTK
  Gene Name: inhibitor of Bruton agammaglobulinemia tyrosine kinase
  ENST ID: ENST00000635384
  CDS Start-End: 80-4096

SEQ ID NO: 142623 - DNA, 5195 bp, Homo sapiens; identical to SEQ ID NO: 142617
  Payload ID: 8183
  Gene Symbol: IBTK
  Gene Name: inhibitor of Bruton agammaglobulinemia tyrosine kinase
  ENST ID: ENST00000635314
  CDS Start-End: 551-4009

SEQ ID NO: 142624 - DNA, 1383 bp, Homo sapiens
  Payload ID: 8184
  Gene Symbol: INCA1
  Gene Name: inhibitor of CDK, cyclin A1 interacting protein 1
  Uniprot ID: Q0VD86
  ENST ID: ENST00000355025
  CDS Start-End: 443-1108
gctcaggccccgccctcagacgagcaccgcccgccggctcctcccgcggctcgaatcgccgtctctctcctccccgccccgccgagttctagaattcgccgcgcagctgcttcagcccctcagccccagccggaccctcgggtcctcatccaccctcgcaggcgcaggccgtggctaccccgaagtcaactgtggaggatccttcctggcttccttcagctccatcctgcccttggatctaggtcacccgcttggacccaactatctgaggcccgaatgccccgcagctcccgctgctccctcgcgttctgctgacccccctccgagtcaggacatcccctttagaccccactttaggccctttcagcccaactccaactagccccatctgccgcttccgcacgcaccaaaaaggagactaactacccagccccgtccagtcatgcaggtgcaggatgatggagtcaacctcatcccctttgccaagtgttccagggtggtcagccgatctccacccccaaggttgccttcccagagcctcagacccatgccccagcgttatggagatgtcttctggaagaaccttaatcaaaggcccacccccacttggctggaggagcagcacattccacccatgctgctcccaccccctgaaatgctttggagaagaaagaagaggaggccatgtttggaaggaatgcagcagcagggccttgggggagtccccgcccgggtgagggctgtcacttaccacctggaggacctaagaaggcgtcagagcatcatcaacgaactgaagaaggcccagtggggcagctctggggctgcatctgagccagtggtgcttggcgaagagggctgtggattccccagcaccaatgaataccctgatctggaagaggagagagcaacctatccacaggaagaggaccgttttctcactcctggcagggcccagctgctttggtctccctggagccccctggatcaggaggaggcttgtgcctccaggcagctgcactctctggcctcgttcagcactgtcacagccagaaggaacccccttcacaatccctgggggatggagttggcagcgtctgaagagtaaggagaaaccaccgatgccgagaggctagtggtgccccagggacccaagactagttccgtcactagagtcaccctcattgctgacatgaaggcgtttccccttccttcgtctctccaactgcctttcccatcctctgaactaggcattaacagcccccgtgggctcccatctcaacccaccgctctcacaggagcaccccaagtcctgttttcctccaggccccgctcctggccttgtattctctctgctctgttattaaaaagcaagcaagtgga

SEQ ID NO: 142625 - DNA, 1260 bp, Homo sapiens
  Payload ID: 8184
  Gene Symbol: INCA1
  Gene Name: inhibitor of CDK, cyclin A1 interacting protein 1
  Uniprot ID: Q0VD86
  ENST ID: ENST00000574617
  CDS Start-End: 357-1067
tccttcagctccatcctgcccttggatctaggtcacccgcttggacccaactatctgaggcccgaatgccccgcagctcccgctgctccctcgcgttctgctgacccccctccgagtcaggacatcccctttagaccccactttaggccctttcagcccaactccaactagccccatctgccgcttccgcacgagacagagtttcactcttgttgcacagactggagtgcaatggcgcgatctcaactcaccgcaacctctgcctccctggttcaagcaattctcctgcctcagcctcctgagtagctgggattacagcaccaaaaaggagactaactacccagccccgtccagtcatgcaggtgcaggatgatggagtcaacctcatcccctttgccaagtgttccagggtggtcagccgatctccacccccaaggttgccttcccagagcctcagacccatgccccagcgttatggagatgtcttctggaagaaccttaatcaaaggcccacccccacttggctggaggagcagcacattccacccatgctgagagccactggttgctcccagcttggtctgtatcctcctgagcagctcccaccccctgaaatgctttggagaagaaagaagaggaggccatgtttggaaggaatgcagcagcagggccttgggggagtccccgcccgggtgagggctgtcacttaccacctggaggacctaagaaggcgtcagagcatcatcaacgaactgaagaaggcccagtggggcagctctggggctgcatctgagccagtggtgcttggcgaagagggctgtggattccccagcaccaatgaataccctgatctggaagaggagagagcaacctatccacaggaagaggaccgttttctcactcctggcagggcccagctgctttggtctccctggagccccctggatcaggaggaggcttgtgcctccaggcagctgcactctctggcctcgttcagcactgtcacagccagaaggaacccccttcacaatccctgggggatggagttggcagcgtctgaagagtaaggagaaaccaccgatgccgagaggctagtggtgccccagggacccaagactagttccgtcactagagtcaccctcattgctgacatgaaggcgtttccccttccttcgtctctccaactgcctttcccatcctctgaactaggcattaacagcccccgtgggctcccatctcaacccaccgctctcacaggag

SEQ ID NO: 142626 - DNA, 973 bp, Homo sapiens
  Payload ID: 8184
  Gene Symbol: INCA1
  Gene Name: inhibitor of CDK, cyclin A1 interacting protein 1
  Uniprot ID: Q0VD86
  ENST ID: ENST00000576820
  CDS Start-End: 70-780
tccttcagctccatcctgcccttggatctagcaccaaaaaggagactaactacccagccccgtccagtcatgcaggtgcaggatgatggagtcaacctcatcccctttgccaagtgttccagggtggtcagccgatctccacccccaaggttgccttcccagagcctcagacccatgccccagcgttatggagatgtcttctggaagaaccttaatcaaaggcccacccccacttggctggaggagcagcacattccacccatgctgagagccactggttgctcccagcttggtctgtatcctcctgagcagctcccaccccctgaaatgctttggagaagaaagaagaggaggccatgtttggaaggaatgcagcagcagggccttgggggagtccccgcccgggtgagggctgtcacttaccacctggaggacctaagaaggcgtcagagcatcatcaacgaactgaagaaggcccagtggggcagctctggggctgcatctgagccagtggtgcttggcgaagagggctgtggattccccagcaccaatgaataccctgatctggaagaggagagagcaacctatccacaggaagaggaccgttttctcactcctggcagggcccagctgctttggtctccctggagccccctggatcaggaggaggcttgtgcctccaggcagctgcactctctggcctcgttcagcactgtcacagccagaaggaacccccttcacaatccctgggggatggagttggcagcgtctgaagagtaaggagaaaccaccgatgccgagaggctagtggtgccccagggacccaagactagttccgtcactagagtcaccctcattgctgacatgaaggcgtttccccttccttcgtctctccaactgcctttcccatcctctgaactaggcattaacagcccccgtgggctcccatctcaacccaccgctctcacaggag

SEQ ID NO: 142627 - DNA, 1221 bp, Homo sapiens
  Payload ID: 8184
  Gene Symbol: INCA1
  Gene Name: inhibitor of CDK, cyclin A1 interacting protein 1
  Uniprot ID: Q0VD86
  ENST ID: ENST00000575780
  CDS Start-End: 281-946
gctcaggccccgccctcagacgagcaccgcccgccggctcctcccgcggctcgaatcgccgtctctctcctccccgccccgccgagttctagaattcgccgcgcagctgcttcagcccctcagccccagccggaccctcgggtcctcatccaccctcgcaggcgcaggccgtggctaccccgaagtcaactgtggaggatccttcctggcttccttcagctccatcctgcccttggatctagcaccaaaaaggagactaactacccagccccgtccagtcatgcaggtgcaggatgatggagtcaacctcatcccctttgccaagtgttccagggtggtcagccgatctccacccccaaggttgccttcccagagcctcagacccatgccccagcgttatggagatgtcttctggaagaaccttaatcaaaggcccacccccacttggctggaggagcagcacattccacccatgctgctcccaccccctgaaatgctttggagaagaaagaagaggaggccatgtttggaaggaatgcagcagcagggccttgggggagtccccgcccgggtgagggctgtcacttaccacctggaggacctaagaaggcgtcagagcatcatcaacgaactgaagaaggcccagtggggcagctctggggctgcatctgagccagtggtgcttggcgaagagggctgtggattccccagcaccaatgaataccctgatctggaagaggagagagcaacctatccacaggaagaggaccgttttctcactcctggcagggcccagctgctttggtctccctggagccccctggatcaggaggaggcttgtgcctccaggcagctgcactctctggcctcgttcagcactgtcacagccagaaggaacccccttcacaatccctgggggatggagttggcagcgtctgaagagtaaggagaaaccaccgatgccgagaggctagtggtgccccagggacccaagactagttccgtcactagagtcaccctcattgctgacatgaaggcgtttccccttccttcgtctctccaactgcctttcccatcctctgaactaggcattaacagcccccgtgggctcccatctcaacccaccgctctcacaggagcaccccaagtcctgttttcctccaggccccgctcctggccttgtattctctctgctctgttattaaaaagcaagcaagtgga

SEQ ID NO: 142628 - DNA, 1233 bp, Homo sapiens
  Payload ID: 8185
  Gene Symbol: ID1
  Gene Name: inhibitor of DNA binding 1, dominant negative helix-loop-helix protein
  Uniprot ID: P41134
  ENST ID: ENST00000376105
  CDS Start-End: 106-555
actctcattccacgttcttaactgttccattttccgtatctgcttcgggcttccacctcatttttttcgctttgcccattctgtttcagccagtcgccaagaatcatgaaagtcgccagtggcagcaccgccaccgccgccgcgggccccagctgcgcgctgaaggccggcaagacagcgagcggtgcgggcgaggtggtgcgctgtctgtctgagcagagcgtggccatctcgcgctgcgccgggggcgccggggcgcgcctgcctgccctgctggacgagcagcaggtaaacgtgctgctctacgacatgaacggctgttactcacgcctcaaggagctggtgcccaccctgccccagaaccgcaaggtgagcaaggtggagattctccagcacgtcatcgactacatcagggaccttcagttggagctgaactcggaatccgaagttggaacccccgggggccgagggctgccggtccgggctccgctcagcaccctcaacggcgagatcagcgccctgacggccgaggtgagatccagatccgaccactagatcatccttataccgacggggaaacggaggccagagagggcgtgggcgcttgcaccacttccgtcccatccttgcgggtacctggctatgcgggggtgcctaaggagcctggaaaaagcgctcccccgtcgtgcttcctggggaagggggcgttcgctgcgctcggagcggcgtcccttccaacccgccggtctcatttcttctcgttttcacaggcggcatgcgttcctgcggacgatcgcatcttgtgtcgctgaagcgcctcccccagggaccggcggaccccagccatccagggggcaagaggaattacgtgctctgtgggtctcccccaacgcgcctcgccggatctgagggagaacaagaccgatcggcggccactgcgcccttaactgcatccagcctggggctgaggctgaggcactggcgaggagagggcgctcctctctgcacacctactagtcaccagagactttagggggtgggattccactcgtgtgtttctattttttgaaaagcagacattttaaaaaatggtcacgtttggtgcttctcagatttctgaggaaattgctttgtattgtatattacaatgatcaccgactgaaaatattgttttacaatagttctgtggggctgtttttttgttattaaacaaataatttagatggtggtaaa

SEQ ID NO: 142629 - DNA, 994 bp, Homo sapiens
  Payload ID: 8185
  Gene Symbol: ID1
  Gene Name: inhibitor of DNA binding 1, dominant negative helix-loop-helix protein
  Uniprot ID: P41134
  ENST ID: ENST00000376112
  CDS Start-End: 106-573
actctcattccacgttcttaactgttccattttccgtatctgcttcgggcttccacctcatttttttcgctttgcccattctgtttcagccagtcgccaagaatcatgaaagtcgccagtggcagcaccgccaccgccgccgcgggccccagctgcgcgctgaaggccggcaagacagcgagcggtgcgggcgaggtggtgcgctgtctgtctgagcagagcgtggccatctcgcgctgcgccgggggcgccggggcgcgcctgcctgccctgctggacgagcagcaggtaaacgtgctgctctacgacatgaacggctgttactcacgcctcaaggagctggtgcccaccctgccccagaaccgcaaggtgagcaaggtggagattctccagcacgtcatcgactacatcagggaccttcagttggagctgaactcggaatccgaagttggaacccccgggggccgagggctgccggtccgggctccgctcagcaccctcaacggcgagatcagcgccctgacggccgaggcggcatgcgttcctgcggacgatcgcatcttgtgtcgctgaagcgcctcccccagggaccggcggaccccagccatccagggggcaagaggaattacgtgctctgtgggtctcccccaacgcgcctcgccggatctgagggagaacaagaccgatcggcggccactgcgcccttaactgcatccagcctggggctgaggctgaggcactggcgaggagagggcgctcctctctgcacacctactagtcaccagagactttagggggtgggattccactcgtgtgtttctattttttgaaaagcagacattttaaaaaatggtcacgtttggtgcttctcagatttctgaggaaattgctttgtattgtatattacaatgatcaccgactgaaaatattgttttacaatagttctgtggggctgtttttttgttattaaacaaataatttagatggtggtaaa

SEQ ID NO: 142630 - DNA, 2041 bp, Homo sapiens
  Payload ID: 8186
  Gene Symbol: ID2
  Gene Name: inhibitor of DNA binding 2, dominant negative helix-loop-helix protein
  Uniprot ID: Q02363
  ENST ID: ENST00000234091
  CDS Start-End: 861-1265
gcgcgctgagtgacggcgcggttgccatggcagccgcctgagcggcgccgcgaggacaaggctgcagggcggcgtgaatgggcggcgtcacgcgcctggcgccagagagtctgctccggggctccggctccggccccgccgcggcctggcccgcgcgccgccgccgccgccaccgccgccgccaattcatcacctgtcagggatcactcgcggggtcacgggcggaatggacacagctgtgagaacaaaacccgggaaagaaaggcgaacgctccccattgcgccagatgtgcagggaggaccttgagacgcgccccccgcccccgcaggctcctcccgccccccggcgcatcacgcgggggtggcaaaggcggcctggccagcgcggagctcccggcccggagctgcttctgattaccgcgaggggcccggacgcgagagccgccgcggggcctgccctagaggcggagtgatgaactgtggcttcccccctgcggtgctgaactcgcccgtgtagctgtgattttagagctgccgacagctctaagctgggctcgcgccccgcccaccccgcggggattggctgcgaacgcggaagaaccaagcccacgccccgcgcccgcgcccaccaatggaagcgcccgctcgtcttgatagacgtgccaccttccgccaatggggacgaagggaagctccagcgtgtggccccggcgagtgcggataaaagccgccccgccgggctcgggcttcattctgagccgagcccggtgccaagcgcagctagctcagcaggcggcagcggcggcctgagcttcagggcagccagctccctcccggtctcgccttccctcgcggtcagcatgaaagccttcagtcccgtgaggtccgttaggaaaaacagcctgtcggaccacagcctgggcatctcccggagcaaaacccctgtggacgacccgatgagcctgctatacaacatgaacgactgctactccaagctcaaggagctggtgcccagcatcccccagaacaagaaggtgagcaagatggaaatcctgcagcacgtcatcgactacatcttggacctgcagatcgccctggactcgcatcccactattgtcagcctgcatcaccagagacccgggcagaaccaggcgtccaggacgccgctgaccaccctcaacacggatatcagcatcctgtccttgcaggcttctgaattcccttctgagttaatgtcaaatgacagcaaagcactgtgtggctgaataagcggtgttcatgatttcttttattctttgcacaacaacaacaacaacaaattcacggaatcttttaagtgctgaacttatttttcaaccatttcacaaggaggacaagttgaatggacctttttaaaaagaaaaaaaaaatggaaggaaaactaagaatgatcatcttcccagggtgttctcttacttggactgtgatattcgttatttatgaaaaagacttttaaatgccctttctgcagttggaaggttttctttatatactattcccaccatggggagcgaaaacgttaaaatcacaaggaattgcccaatctaagcagactttgccttttttcaaaggtggagcgtgaataccagaaggatccagtattcagtcacttaaatgaagtcttttggtcagaaattacctttttgacacaagcctactgaatgctgtgtatatatttatatataaatatatctatttgagtgaaaccttgtgaactctttaattagagttttcttgtatagtggcagagatgtctatttctgcattcaaaagtgtaatgatgtacttattcatgctaaactttttataaaagtttagttgtaaacttaacccttttatacaaaataaatcaagtgtgtttattgaatggtgattgcctgctttatttcagaggaccagtgctttgatttttattatgctatgttataactgaacccaaataaatacaagttcaaatttatgtagactgtataagattataataaaacatgtctgaagtcaa

SEQ ID NO: 142631 - DNA, 1362 bp, Homo sapiens
  Payload ID: 8186
  Gene Symbol: ID2
  Gene Name: inhibitor of DNA binding 2, dominant negative helix-loop-helix protein
  Uniprot ID: Q02363
  ENST ID: ENST00000396290
  CDS Start-End: 184-588
ggggacgaagggaagctccagcgtgtggccccggcgagtgcggataaaagccgccccgccgggctcgggcttcattctgagccgagcccggtgccaagcgcagctagctcagcaggcggcagcggcggcctgagcttcagggcagccagctccctcccggtctcgccttccctcgcggtcagcatgaaagccttcagtcccgtgaggtccgttaggaaaaacagcctgtcggaccacagcctgggcatctcccggagcaaaacccctgtggacgacccgatgagcctgctatacaacatgaacgactgctactccaagctcaaggagctggtgcccagcatcccccagaacaagaaggtgagcaagatggaaatcctgcagcacgtcatcgactacatcttggacctgcagatcgccctggactcgcatcccactattgtcagcctgcatcaccagagacccgggcagaaccaggcgtccaggacgccgctgaccaccctcaacacggatatcagcatcctgtccttgcaggcttctgaattcccttctgagttaatgtcaaatgacagcaaagcactgtgtggctgaataagcggtgttcatgatttcttttattctttgcacaacaacaacaacaacaaattcacggaatcttttaagtgctgaacttatttttcaaccatttcacaaggaggacaagttgaatggacctttttaaaaagaaaaaaaaaatggaaggaaaactaagaatgatcatcttcccagggtgttctcttacttggactgtgatattcgttatttatgaaaaagacttttaaatgccctttctgcagttggaaggttttctttatatactattcccaccatggggagcgaaaacgttaaaatcacaaggaattgcccaatctaagcagactttgccttttttcaaaggtggagcgtgaataccagaaggatccagtattcagtcacttaaatgaagtcttttggtcagaaattacctttttgacacaagcctactgaatgctgtgtatatatttatatataaatatatctatttgagtgaaaccttgtgaactctttaattagagttttcttgtatagtggcagagatgtctatttctgcattcaaaagtgtaatgatgtacttattcatgctaaactttttataaaagtttagttgtaaacttaacccttttatacaaaataaatcaagtgtgtttattgaatggtgattgcctgctttatttcagaggaccagtgctttgatttttattatgctatgttataactgaacccaaataaatacaagttcaaatttatgtagactgtataagattataataaaacatgtctgaagtc

SEQ ID NO: 142632 - DNA, 623 bp, Homo sapiens
  Payload ID: 8186
  Gene Symbol: ID2
  Gene Name: inhibitor of DNA binding 2, dominant negative helix-loop-helix protein
  Uniprot ID: Q02363
  ENST ID: ENST00000331129
  CDS Start-End: 111-515
attctgagccgagcccggtgccaagcgcagctagctcagcaggcggcagcggcggcctgagcttcagggcagccagctccctcccggtctcgccttccctcgcggtcagcatgaaagccttcagtcccgtgaggtccgttaggaaaaacagcctgtcggaccacagcctgggcatctcccggagcaaaacccctgtggacgacccgatgagcctgctatacaacatgaacgactgctactccaagctcaaggagctggtgcccagcatcccccagaacaagaaggtgagcaagatggaaatcctgcagcacgtcatcgactacatcttggacctgcagatcgccctggactcgcatcccactattgtcagcctgcatcaccagagacccgggcagaaccaggcgtccaggacgccgctgaccaccctcaacacggatatcagcatcctgtccttgcaggcttctgaattcccttctgagttaatgtcaaatgacagcaaagcactgtgtggctgaataagcggtgagtgtttgcttgtgccacccgtgggtaaactgcccctcggtgtgtgtgcgcgcgcgcgcatgtgtttttgcttgtgtatctataaaatgtctgatttg

SEQ ID NO: 142633 - DNA, 1251 bp, Homo sapiens
  Payload ID: 8187
  Gene Symbol: ID3
  Gene Name: inhibitor of DNA binding 3, dominant negative helix-loop-helix protein
  Uniprot ID: Q02535
  ENST ID: ENST00000374561
  CDS Start-End: 369-728
gatctggggtgctgccaggaaaaagcaaattctggaagttaatggttttgagtgatttttaaatccttgctggcggagaggcccgcctctccccggtatcagcgcttcctcattctttgaatccgcggctccgcggtcttcggcgtcagaccagccggaggaagcctgtttgcaatttaagcgggctgtgaacgcccagggccggcgggggcagggccgaggcgggccattttgaataaagaggcgtgccttccaggcaggctctataagtgaccgccgcggcgagcgtgcgcgcgttgcaggtcactgtagcgggacttcttttggttttctttctctttggggcacctctggactcactccccagcatgaaggcgctgagcccggtgcgcggctgctacgaggcggtgtgctgcctgtcggaacgcagtctggccatcgcccggggccgagggaagggcccggcagctgaggagccgctgagcttgctggacgacatgaaccactgctactcccgcctgcgggaactggtacccggagtcccgagaggcactcagcttagccaggtggaaatcctacagcgcgtcatcgactacattctcgacctgcaggtagtcctggccgagccagcccctggaccccctgatggcccccaccttcccatccagacagccgagctcactccggaacttgtcatctccaacgacaaaaggagcttttgccactgactcggccgtgtcctgacacctccagaacgcaggtgctggcgcccgttctgcctgggaccccgggaacctctcctgccggaagccggacggcagggatgggccccaacttcgccctgcccacttgacttcaccaaatcccttcctggagactaaacctggtgctcaggagcgaaggactgtgaacttgtggcctgaagagccagagctagctctggccaccagctgggcgacgtcaccctgctcccaccccacccccaagttctaaggtctcttcagagcgtggaggtgtggaaggagtggctgctctccaaactatgccaaggcggcggcagagctggtcttctggtctccttggagaaaggttctgttgccctgatttatgaactctataatagagtatataggttttgtaccttttttacaggaaggtgactttctgtaacaatgcgatgtatattaaactttttataaaagttaacattttgcataataaacgatttttaaacacttgtgtatatgatga

SEQ ID NO: 142634 - DNA, 1251 bp, Homo sapiens; identical to SEQ ID NO: 142633
  Payload ID: 8187
  Gene Symbol: ID3
  Gene Name: Inhibitor of DNA binding 3, dominant negative helix-loop-helix protein
  ENST ID: ENST00000634790
  CDS Start-End: 369-728

SEQ ID NO: 142635 - DNA, 2344 bp, Homo sapiens
  Payload ID: 8188
  Gene Symbol: ID4
  Gene Name: inhibitor of DNA binding 4, dominant negative helix-loop-helix protein
  Uniprot ID: P47928
  ENST ID: ENST00000378700
  CDS Start-End: 370-855
aggcgcggttgtgagtagtaccgggagtggggtgatcccgggctaggggagcgcggcggccgcgatcgggcttagtcggagctccgaagggagtgactaggacacccgggtgggctacttttcttccggtgcttttgctttttttttcctttgggctcgggctgagtgtcgcccactgagcaaagattccctcgtaaaacccagagcgaccctcccgtcaattgttgggctcgggagtgtcgcggtgccccgagcgcgccgggcgcggaggcaaagggagcggagccggccgcggacggggcccggagcttgcctgcctccctcgctcgccccagcgggttcgctcgcgtagagcgcagggcgcgcgcgatgaaggcggtgagcccggtgcgcccctcgggccgcaaggcgccgtcgggctgcggcggcggggagctggcgctgcgctgcctggccgagcacggccacagcctgggtggctccgcagccgcggcggcggcggcggcggcagcgcgctgtaaggcggccgaggcggcggccgacgagccggcgctgtgcctgcagtgcgatatgaacgactgctatagccgcctgcggaggctggtgcccaccatcccgcccaacaagaaagtcagcaaagtggagatcctgcagcacgttatcgactacatcctggacctgcagctggcgctggagacgcacccggccctgctgaggcagccaccaccgcccgcgccgccacaccacccggccgggacctgtccagccgcgccgccgcggaccccgctcactgcgctcaacaccgacccggccggcgcggtgaacaagcagggcgacagcattctgtgccgctgagccgcgctgtccaggtgtgcggccgcctgagcccgagccaggagcactagagagggagggggaagagcagaagttagagaaaaaaagccaccggaggaaaggaaaaaacatcggccaacctagaaacgttttcattcgtcattccaagagagagagaggaaagaaaaatacaactttcattctttctttgcacgttcataaacattctacatacgtattctcttttgtctcttcatttataactgctgtgaattgtacatttctgtgttttttggaggtgcagttaaacttttaagcttaagtgtgacaggactgataaatagaagatcaagagtagatccgactttagaagcctactttgtgaccaaggagctcaatttttgttttgaagctttactaatctaccagagcattgtagatattttttttttacatctattgtttaaaatagatgattataacggggcagagaactttcttttctctgcaagaatgttacatattgtatagataaatgagtgacatttcataccatgtatatatagagatgttctataagtgtgagaaagtatatgctttaatagatactgtaattataagatatttttaattaaatatttttttgtaaatattatgtgtgtgtttttttttaatctatgggaatatttcttttggaaaatcatttttcagctcaattacagagctcttgatatcttgaatgtcttttctgtttggcctggctcttaatttgcttttgttttgcccagtatagactcggaagtaacagttatagctagtggtcttgcatgattgcatgagatgtttaatcacaaattaaacttgttctgagtccattcaaatgtgtttttttaaatgtagattgaaatctttgtatttgaagcatacatgttgaaaatacaccttatcagtttttaagtacagggttttatagtgtaatatatacagagtaagtgtttgtttttgtttttcaactgaggtcaaaatggattctgaatgattttgcatatgggatgaggaaatgcttggatccttaaggagtttacgaaatctgctgttttatcaaagtgaaaaaaaattgcttattactcttcattttacactaaagcttaatgtcactaagtttcatgtctgtacagattatttaaatcatggaaatgaaaaaaatgttctctgcttgctaccaaaggacaaactcttggaaatgaacactttctgctttccttcctccaaagaattaataggcaacagtgggagaaaaaaaaggcataatggcaaatccttcaagcagggataaaagtcgatcttcaaacattaacttaagcagaccaaaaattctgatgaccgcatctagattatttttttataaaaatgattttcactatagctatgttacgctaagctactgtccaatctcttgtgatgtgtaacttttacatgtgaatattaaagtagatttctctgtcttgta

SEQ ID NO: 142636 - DNA, 1029 bp, Homo sapiens
  Payload ID: 8188
  Gene Symbol: ID4
  Gene Name: inhibitor of DNA binding 4, dominant negative helix-loop-helix protein
  ENST ID: ENST00000618493
  CDS Start-End: 315-794
gcggccgcgatcgggcttagtcggagctccgaagggagtgactaggacacccgggtgggctacttttcttccggtgcttttgctttttttttcctttgggctcgggctgagtgtcgcccactgagcaaagattccctcgtaaaacccagagcgaccctcccgtcaattgttgggctcgggagtgtcgcggtgccccgagcgcgccgggcgcggaggcaaagggagcggagccggccgcggacggggcccggagcttgcctgcctccctcgctcgccccagcgggttcgctcgcgtagagcgcagggcgcgcgcgatgaaggcggtgagcccggtgcgccctcgggccgcaaggccgtcgggctgcggcggcggggagctggcgctgcgctgcctggccgagcacggccacagcctgggtggctcccaggcggcggcggcggcggcggcagcgcgctgtaaggcggccgaggcggcggccgacgagccggcgctgtgcctgcagtgcgatatgaacgactgctatagccgcctgcggaggctggtgcccaccatcccgcccaacaagaaagtcagcaaagtggagatcctgcagcacgttatcgactacatcctggacctgcagctggcgctggagacgcacccggccctgctgaggcagccaccaccgcccgcgccgccacaccacccggccgggacctgtccagccgcgccgccgcggaccccgctcactgcgctcaacaccgacccggccggcgcggtgaacaagcagggcgacagcattctgtgccgctgagccgcgctgtccaggtgtgcggccgcctgagcccgagccaggagcactagagagggagggggaagagcagaagttagagaaaaaaagccaccggaggaaaggaaaaaacatcggccaacctagaaacgttttcattcgtcattccaagagagagagaggaaagaaaaatacaactttcattctttctttgcacgttcataaacattctacatacgtattctcttttgtctcttca

SEQ ID NO: 142637 - DNA, 5119 bp, Homo sapiens
  Payload ID: 8189
  Gene Symbol: ING1
  Gene Name: inhibitor of growth family, member 1
  Uniprot ID: Q9UK53
  ENST ID: ENST00000333219
  CDS Start-End: 873-1712
gcgagttgcggtagttgctgtgtaccatggtctcggaggtttctgtcccgcggcccgttaggtcctggtcgggttttcagcgaagcaggccgctcccctgcgtttcccagcgggcgtgctgtgccgcccaacaggctctgcctccaagtgccaaaaactcctagtaaagtttgcgcctcgcccgccgtccacaccccagcggccctgacgctgtcccctccgcgaccctcgcctctggaaaaagtgacaggcaaggccacgcccccgcgagggccggcctggagcccgcagcccccagggcctgggacggtgaggggcgtgaatgcggcggggggcggggccgttgccgggggagggggccggggcgcatgcgcgctgcgcagcggggctgaatgtttcccaagtgtttgaaactggtatttgggttttccacgttggacaagtgcggctcggcggccagcggagcgcgccccttcccgctgcccgctccgctcctctcttctacccagcccagtgggcgagtgggcagcggcggccgcggcgctgggccctctcccgccggtgtgtgcgcgctcgtacgcgcggcccccggcgccagccccgccgcctgagagggggcctgcgccgccggccggggcgtgcgcccgggagccaccgccaccgcggcccgcgccctcaggcgctggggtccccgcggacccggaggcggcggacgggctcggcagatgtagccgccgggccgaagcaggagccggcgggggggcgccgggagagcgagggctttgcattttgcagtgctattttttgaggggggcggggggtggaggaagcggaaagccgcgccgagtcgccggggacctccggggtgaaccatgttgagtcctgccaacggggagcagctccacctggtgaactatgtggaggactacctggactccatcgagtccctgcctttcgacttgcagagaaatgtctcgctgatgcgggagatcgacgcgaaataccaagagatcctgaaggagctagacgagtgctacgagcgcttcagtcgcgagacagacggggcgcagaagcggcggatgctgcactgtgtgcagcgcgcgctgatccgcagccaggagctgggcgacgagaagatccagatcgtgagccagatggtggagctggtggagaaccgcacgcggcaggtggacagccacgtggagctgttcgaggcgcagcaggagctgggcgacacagcgggcaacagcggcaaggctggcgcggacaggcccaaaggcgaggcggcagcgcaggctgacaagcccaacagcaagcgctcacggcggcagcgcaacaacgagaaccgtgagaacgcgtccagcaaccacgaccacgacgacggcgcctcgggcacacccaaggagaagaaggccaagacctccaagaagaagaagcgctccaaggccaaggcggagcgagaggcgtcccctgccgacctccccatcgaccccaacgaacccacgtactgtctgtgcaaccaggtctcctatggggagatgatcggctgcgacaacgacgagtgccccatcgagtggttccacttctcgtgcgtggggctcaatcataaacccaagggcaagtggtactgtcccaagtgccggggggagaacgagaagaccatggacaaagccctggagaaatccaaaaaagagagggcttacaacaggtagtttgtggacaggcgcctggtgtgaggaggacaaaataaaccgtgtatttattacattgctgcctttgttgaggtgcaaggagtgtaaaatgtatatttttaaagaatgttagtaaaggaaccattcctttcatagggatggcagtgattctgtttgccttttgttttcattggtacacgtgtaacaagaaagtggtctgtggatcagcattttagaaactacaaatataggtttgattcaacacttaagtctcagactgatttcttgcgggaggagggggactaaactcaacctaacacattaaatgtggaaggaaaatatttcatttagcttttttattttaatacaagtaatattattactttatgaacaattttttttaattggccatgtcgccaaaaatacagcctatagtaaatgtgtttcttgctgccatgatgtatatccatataacaattcagtaacaaaggtttaaagtttgaagattattttttaaaaaggtaaatggttaaattttacatgacagatattttatctattggcctgttccccaaatggccattttaaaatgcttgggtacacttctcttaagtggtctagtcaaggaacctcaagtcatgcttttgctatcaccaatcatagtgtacccatctttaatttatatcaggtgtataaatgtacatttccaaatgaacttgcacttgttatattataattggaagtgcagtcagcagatgctgttgtgaagctaatgtcacaattatgtgcaaaggtgtgcttcctgctgtatgtgagctgtaaaaatgttacgtgaagaaataaatgaaacttggccagtttgttcctctagtagtatatttaattttgacataagtaacttttaaaatttgtcttaaaaatttatacaccagcaatttagacaaagccttaagcaaattttgtattattgttctcacttattattaataatgaagtagaagttacttaattgccagcaaataaatacgtgtcaaaaaagaatctgtattcagaccctgggtcaggaaattactgcccacttgtcaagttcagcccaccatctgtttgaagattatatgaagtttaaattctagtgtccataaataaagtttcagcggaacacagccgtgcttatgtgcgtatgtattgtctgactgcttttgcaaaacggcagagttcaatagttgcacctgaaaccatttgacttgacaagccaaaactattttctggccctctgcagaaagggtttgctgacctctgatttagactagcatctaacattgatttgcccacatattgaaagggtcagtggagttttcatttattattttttatttttttgagattgagttccaggctggagtgcaatagcgcaatcttggctcaccgcaacctccgcctcccaggttcaagcgattgtcctgcctcagcctccccagtagctaggattacaggcatgcaccaccacgcctggctaattttgtattttcagtagagacgcggtttctccatgttggtcatggctggtctcgcactcccgacctcaggtgatccacctgcctcagccttccaaagtgctgggattacaggtgtgagccaccgtgcccggctggagttttcatttttttttttttttttttttctgagatggagtctcactctgtctccaggctagagtgcagtggcccagtcttggctcactgcaacctctgcctctcgggttcaagcgattctcttgcctcagcctcccgagtagctgggactacaggtgcgtgccaccatgcccagctaatttttgtatttttagtagagatgggttttcaccatgttggccagtatggtctcgagctcttgaccatgatccgcccacctcggcctcccacagtgctgggattacaggcgtgagccaccgtgcgctgagtgatacgtggttccctttaacttcgcacatggtaaaatcagtttctttccatgatctgtttcacagtctctgtgaagctacctaccacaaagaagtagtgagtgatgactttctagaatctaagtatatggcatgtatttattataagtaaaacattaagtttgctgattgtttacttgtgataaacaattattgtgaactttatttgtgctggacataagtgtctgttttacagtgaaattccattatagagggttacttggtagagaaatgcaaattgtagttggtcatatactaaaatttgaactttttacatatcaatacttacaaataggtgtttattttcccacaaaactccagaacatttaagagtctcgggtgtttaaatttgatgagatttacccaaacaaatagtgaacaaaaggtttatgaaaataagttatgaaactaaaatacttaataaacatccagtgacaataaaaatagcttgagtctttgcttatataaaatttcatgctaatttttcacttctatattaattggaggtaataatgcaaattaagttatagaaatgaagattcaatgaaatgcagttgctcatcctggatttcttcatattcagttttggtgtagacaactggtgaagagagatggctcagaggccaagccttgcaatctaggagcccagccctgtcctttaagggcttgatcttgaataaattgcttaacagttggtctatagttctacacttttaaagtatgtttcacagagggtggttccaataaataaatgcactggcatattcaaatgttggataatttttctctagctttcttcaagtttctcataaggacaggtgggtagccacttattctttaaaaaaaaatagatacaatacagagtcgtgttggactggcagtcttaaatcactcttgttatttccagtggacattaaaaaaaaatcacagataagtacttaaaacactcaagatttgggatttagatcatgattagatacaatagaaagatcctggaatcccgacatgaggacaaaaatggtactgaattctttttgaaaaatagattactgaaaagcgatctaatatagaacagttgcttttacttagatgttcaatgcatatttgttgtataataaccaagttattacagttcagataaagggtccaaagtgttttcgttatgatataatactttctattgtaaactggactaaagaaacgttgtatgttcaaggaagtgttgagcagccatggtgttcctgggacaggctccccaggtgctgagagaggtgctgcaggagtcacagacctgcaggcacgcacttgccagtgactgggacgttggctggtggttctcttttggtgtgattagagctatgtgagttgtctcaatacttgagactgtcggtggttgccaatgctgaataaagcatttatcaaagtaaaa

SEQ ID NO: 142638 - DNA, 1189 bp, Homo sapiens
  Payload ID: 8189
  Gene Symbol: ING1
  Gene Name: inhibitor of growth family, member 1
  Uniprot ID: Q9UK53
  ENST ID: ENST00000338450
  CDS Start-End: 239-946
cctccgagaacggtgtccatgacacagggcgggaagagataaggcctagggaaggcgcccctcgggcctatccacctcttctggggctcggcactaggaagcagcttccctctcaggcccctttgtctccaagccgttccaaactgagtaccgggagacgacacaaagggagggcggtgacggatggcgcaggcgcgggagccgcctaggctgctgggagtggtggtccggccgcggaatggagatcctgaaggagctagacgagtgctacgagcgcttcagtcgcgagacagacggggcgcagaagcggcggatgctgcactgtgtgcagcgcgcgctgatccgcagccaggagctgggcgacgagaagatccagatcgtgagccagatggtggagctggtggagaaccgcacgcggcaggtggacagccacgtggagctgttcgaggcgcagcaggagctgggcgacacagcgggcaacagcggcaaggctggcgcggacaggcccaaaggcgaggcggcagcgcaggctgacaagcccaacagcaagcgctcacggcggcagcgcaacaacgagaaccgtgagaacgcgtccagcaaccacgaccacgacgacggcgcctcgggcacacccaaggagaagaaggccaagacctccaagaagaagaagcgctccaaggccaaggcggagcgagaggcgtcccctgccgacctccccatcgaccccaacgaacccacgtactgtctgtgcaaccaggtctcctatggggagatgatcggctgcgacaacgacgagtgccccatcgagtggttccacttctcgtgcgtggggctcaatcataaacccaagggcaagtggtactgtcccaagtgccggggggagaacgagaagaccatggacaaagccctggagaaatccaaaaaagagagggcttacaacaggtagtttgtggacaggcgcctggtgtgaggaggacaaaataaaccgtgtatttattacattgctgcctttgttgaggtgcaaggagtgtaaaatgtatatttttaaagaatgttagtaaaggaaccattcctttcatagggatggcagtgattctgtttgccttttgttttcattggtacacgtgtaacaagaaagtggtctgtggatcagcattttagaaactacaaatataggtttgattcaaca

SEQ ID NO: 142639 - DNA, 2870 bp, Homo sapiens
  Payload ID: 8189
  Gene Symbol: ING1
  Gene Name: inhibitor of growth family, member 1
  ENST ID: ENST00000375774
  CDS Start-End: 463-1731
agcggaggcggggaaggcgcccatctgcgctgcgctcgggggggcgcgggcagatcgctggcttggagaggactgtggcaggtgagaggacctgtgcgtcgttctctgcagacctggccgccccgggtgtcagagagaggtggcgagttcgtgtccgccgggaattgttggctgttggggaaactttcctgcgaggtcagtcaaggctttgggggctctgttttgaatgtggatcaccactcggagtttactaatgtttacaaggctgcgcagtagggaaacggaagagttgggtgggggcaaaaaaaaaaattgaccgctatccccgaaagtactagacgcctctgccgggaaggcgcccctgcgcgttctatccgagacgtagcttcgcagcgaattttataggaacttcattagcatattatggaacgtcccgcctcagccccccagtagttggctgtgatgtccttcgtggaatgtccttatcattcccctgcggaacgattggtcgctgaggcggatgaaggcgggcctagcgcaataactggtatgggtctgtgtttccgctgtcttcttttttctttttcggggaggagcggggtggagggtggacgagttgatttgaacgtcttcgggtcgctcggcctccagccttggattggttcttctcgctgctggggcgggccgtgctcttccgccctgcggtgtggttggttctcctcctggcctccgccctccaaatcggcgattcccataggcggcggctctcggggtgcggggcgagtctcccgctggcctcctccccattggctggaggcctggcgggtgtcgccccggcccctctccccgctcagcccggccactttcgggcgcggatttatagcagtagcagtgatcccgggcctgtgggctcggggccggggctgcagttcggaccgcctcccgcgacccgcggggccggctcggagacagtttcaggccgcatctctgctgacccgagggtggggccgcgcgtggccgtggaaacagatcctgaaggagctagacgagtgctacgagcgcttcagtcgcgagacagacggggcgcagaagcggcggatgctgcactgtgtgcagcgcgcgctgatccgcagccaggagctgggcgacgagaagatccagatcgtgagccagatggtggagctggtggagaaccgcacgcggcaggtggacagccacgtggagctgttcgaggcgcagcaggagctgggcgacacagcgggcaacagcggcaaggctggcgcggacaggcccaaaggcgaggcggcagcgcaggctgacaagcccaacagcaagcgctcacggcggcagcgcaacaacgagaaccgtgagaacgcgtccagcaaccacgaccacgacgacggcgcctcgggcacacccaaggagaagaaggccaagacctccaagaagaagaagcgctccaaggccaaggcggagcgagaggcgtcccctgccgacctccccatcgaccccaacgaacccacgtactgtctgtgcaaccaggtctcctatggggagatgatcggctgcgacaacgacgagtgccccatcgagtggttccacttctcgtgcgtggggctcaatcataaacccaagggcaagtggtactgtcccaagtgccggggggagaacgagaagaccatggacaaagccctggagaaatccaaaaaagagagggcttacaacaggtagtttgtggacaggcgcctggtgtgaggaggacaaaataaaccgtgtatttattacattgctgcctttgttgaggtgcaaggagtgtaaaatgtatatttttaaagaatgttagtaaaggaaccattcctttcatagggatggcagtgattctgtttgccttttgttttcattggtacacgtgtaacaagaaagtggtctgtggatcagcattttagaaactacaaatataggtttgattcaacacttaagtctcagactgatttcttgcgggaggagggggactaaactcaacctaacacattaaatgtggaaggaaaatatttcatttagcttttttattttaatacaagtaatattattactttatgaacaattttttttaattggccatgtcgccaaaaatacagcctatagtaaatgtgtttcttgctgccatgatgtatatccatataacaattcagtaacaaaggtttaaagtttgaagattattttttaaaaaggtaaatggttaaattttacatgacagatattttatctattggcctgttccccaaatggccattttaaaatgcttgggtacacttctcttaagtggtctagtcaaggaacctcaagtcatgcttttgctatcaccaatcatagtgtacccatctttaatttatatcaggtgtataaatgtacatttccaaatgaacttgcacttgttatattataattggaagtgcagtcagcagatgctgttgtgaagctaatgtcacaattatgtgcaaaggtgtgcttcctgctgtatgtgagctgtaaaaatgttacgtgaagaaataaatgaaacttggccagtttgttcctctagtagtatatttaattttgacataagtaacttttaaaatttgtcttaaaaatttatacaccagcaatttagacaaagccttaagcaaattttgtattattgttctcacttattattaataatgaagtagaagttacttaattgccagcaaataaatacgtgtcaaaaaagaatctgtattcagaccctgggtcaggaaattactgcccacttgtcaagttcagcccaccatctgtttgaagattatatgaagtttaaattctagtgtccataaataaagtttcagcggaac

SEQ ID NO: 142640 - DNA, 1074 bp, Homo sapiens
  Payload ID: 8189
  Gene Symbol: ING1
  Gene Name: inhibitor of growth family, member 1
  Uniprot ID: Q9UK53
  ENST ID: ENST00000375775
  CDS Start-End: 199-831
cgccgtccacaccccagcggccctgacgctgtcccctccgcgaccctcgcctctggaaaaagtgacaggcaaggccacgcccccgcgagggccggcctggagcccgcagcccccagggcctgggacgagatcctgaaggagctagacgagtgctacgagcgcttcagtcgcgagacagacggggcgcagaagcggcggatgctgcactgtgtgcagcgcgcgctgatccgcagccaggagctgggcgacgagaagatccagatcgtgagccagatggtggagctggtggagaaccgcacgcggcaggtggacagccacgtggagctgttcgaggcgcagcaggagctgggcgacacagcgggcaacagcggcaaggctggcgcggacaggcccaaaggcgaggcggcagcgcaggctgacaagcccaacagcaagcgctcacggcggcagcgcaacaacgagaaccgtgagaacgcgtccagcaaccacgaccacgacgacggcgcctcgggcacacccaaggagaagaaggccaagacctccaagaagaagaagcgctccaaggccaaggcggagcgagaggcgtcccctgccgacctccccatcgaccccaacgaacccacgtactgtctgtgcaaccaggtctcctatggggagatgatcggctgcgacaacgacgagtgccccatcgagtggttccacttctcgtgcgtggggctcaatcataaacccaagggcaagtggtactgtcccaagtgccggggggagaacgagaagaccatggacaaagccctggagaaatccaaaaaagagagggcttacaacaggtagtttgtggacaggcgcctggtgtgaggaggacaaaataaaccgtgtatttattacattgctgcctttgttgaggtgcaaggagtgtaaaatgtatatttttaaagaatgttagtaaaggaaccattcctttcatagggatggcagtgattctgtttgccttttgttttcattggtacacgtgtaacaagaaagtggtctgtggatcagcattttagaaactacaaatataggtttgattcaaca

SEQ ID NO: 142641 - DNA, 340 bp, Homo sapiens
  Payload ID: 8189
  Gene Symbol: ING1
  Gene Name: inhibitor of growth family, member 1
  ENST ID: ENST00000464141
  CDS Start-End: 8-340
ggctgtgatgtccttcgtggaatgtccttatcattcccctgcggaacgattggtcgctgaggcggatgaaggcgggcctagcgcaataactgagatcctgaaggagctagacgagtgctacgagcgcttcagtcgcgagacagacggggcgcagaagcggcggatgctgcactgtgtgcagcgcgcgctgatccgcagccaggagctgggcgacgagaagatccagatcgtgagccagatggtggagctggtggagaaccgcacgcggcaggtggacagccacgtggagctgttcgaggcgcagcaggagctgggcgacacagcgggcaacagcggcaag

SEQ ID NO: 142642 - DNA, 1189 bp, Homo sapiens
  Payload ID: 8190
  Gene Symbol: ING2
  Gene Name: inhibitor of growth family, member 2
  Uniprot ID: Q9H160
  ENST ID: ENST00000302327
  CDS Start-End: 203-1045
cgcccctgggctggtgctgcgggggcggggagtgagggctgctctggggggagtggagatcggggagcgcggccgtgccctctcgagcggctgcggggtccccgcggcgccgggctgctgagctgagggcccgcggcggccgcggccggtgcatgtgcggctgctggatgcggaggcggcggcgacggcgcggatcggcaggatgttagggcagcagcagcagcaactgtactcgtcggccgcgctcctgaccggggagcggagccggctgctcacctgctacgtgcaggactaccttgagtgcgtggagtcgctgccccacgacatgcagaggaacgtgtctgtgctgcgagagctggacaacaaatatcaagaaacgttaaaggaaattgatgatgtctacgaaaaatataagaaagaagatgatttaaaccagaagaaacgtctacagcagcttctccagagagcactaattaatagtcaagaattgggagatgaaaaaatacagattgttacacaaatgctcgaattggtggaaaatcgggcaagacaaatggagttacactcacagtgtttccaagatcctgctgaaagtgaacgagcctcagataaagcaaagatggattccagccaaccagaaagatcttcaagaagaccccgcaggcagcggaccagtgaaagccgtgatttatgtcacatggcaaatgggattgaagactgtgatgatcagccacctaaagaaaagaaatccaagtcagcaaagaaaaagaaacgctccaaggccaagcaggaaagggaagcttcacctgttgagtttgcaatagatcctaatgaacctacatactgcttatgcaaccaagtgtcttatggggagatgataggatgtgacaatgaacagtgtccaattgaatggtttcacttttcatgtgtttcacttacctataaaccaaaggggaaatggtattgcccaaagtgcaggggagataatgagaaaacaatggacaaaagtactgaaaagacaaaaaaggatagaagatcgaggtagtaaaggccatccacattttaaagggttatttgtcttttatataattcgtttgctttcagaaaatgttttagggtaaatgcataagactatgcaataatttttaatcattagtattaatggtgtattaaaagttgttgtactttg

SEQ ID NO: 142643 - DNA, 599 bp, Homo sapiens
  Payload ID: 8190
  Gene Symbol: ING2
  Gene Name: inhibitor of growth family, member 2
  ENST ID: ENST00000412117
  CDS Start-End: 186-599
gtgggaggggcgcggcgcgcgttcccgcgggcctggaaaatggctggtcgcgagaggggcggtggcgagctggctgctggggagggagtcggggctgtgcgggggcgttggttcggccccagcggagtccgaatcggggtttgcagcatgttttgcggtgatgtttccaacctctttcccagtcaatggatcaggacggcgatcagcagctcggaccgtcgcggatcctggctccgcaaacgttaaaggaaattgatgatgtctacgaaaaatataagaaagaagatgatttaaaccagaagaaacgtctacagcagcttctccagagagcactaattaatagtcaagaattgggagatgaaaaaatacagattgttacacaaatgctcgaattggtggaaaatcgggcaagacaaatggagttacactcacagtgtttccaagatcctgctgaaagtgaacgagcctcagataaagcaaagatggattccagccaaccagaaagatcttcaagaagaccccgcaggcagcggaccagtgaaagccgtgatttatgtcacatggcaaatgggattgaagactgtgatgatcagccacct

SEQ ID NO: 142644 - DNA, 3777 bp, Homo sapiens
  Payload ID: 8191
  Gene Symbol: ING3
  Gene Name: inhibitor of growth family, member 3
  Uniprot ID: Q9NXR8
  ENST ID: ENST00000315870
  CDS Start-End: 149-1405
tttttttttttttctttttttttttttgccggagtcgagcgggtgctgctagcggaggcgccatattggaggggacaaaactccggcgacagcgagtgacacaaataaacccctggacccccttgttccctcagctctaagggccgcgatgttgtacctagaagactatctggaaatgattgagcagcttcctatggatctgcgggaccgcttcacggaaatgcgcgagatggacctgcaggtgcagaatgcaatggatcaactagaacaaagagtcagtgaattctttatgaatgcaaagaaaaataaacctgagtggagggaagagcaaatggcatccatcaaaaaagactactataaagctttggaagatgcagatgagaaggttcagttggcaaaccagatatatgacttggtagatcgacacttgagaaagctggatcaggaactggctaagtttaaaatggagctggaagctgataatgctggaattacagaaatattagagaggcgatctttggaattagacactccttcacagccagtgaacaatcaccatgctcattcacatactccagtggaaaaaaggaaatataatccaacttctcaccatacgacaacagatcatattcctgaaaagaaatttaaatctgaagctcttctatccacccttacgtcagatgcctctaaggaaaatacactaggttgtcgaaataataattccacagcctcttctaacaatgcctacaatgtgaattcctcccaacctctgggatcctataacattggctcgttatcttcaggaactggtgcaggggcaattaccatggcagctgctcaagcagttcaggctacagctcagatgaaggagggacgaagaacatcaagtttaaaagccagttatgaagcatttaagaataatgactttcagttgggaaaagaattttcaatggccagggaaacagttggctattcatcatcttcggcacttatgacaacattaacacagaatgccagttcatcagcagccgactcacggagtggtcgaaagagcaaaaacaacaacaagtcttcaagccagcagtcatcatcttcctcctcctcttcttccttatcatcgtgttcttcatcatcaactgttgtacaagaaatctctcaacaaacaactgtagtgccagaatctgattcaaatagtcaggttgattggacttacgacccaaatgaacctcgatactgcatttgtaatcaggtatcttatggtgagatggtgggatgtgataaccaagattgccctatagaatggttccattatggctgcgttggattgacagaggcaccaaaaggcaaatggtactgtccacagtgcactgctgcaatgaagagaagaggcagcagacacaaataaaggtggtccttttgtttgatgaagaaataaacttcagctgaagattttatataggactttaaaaagaagagaagagaaagaagaaacaatgcatttccaggcaaccacttaaaggatttacatagacaatcctataagatcttgaacttgaattttatgggttgtattttaataatgtaagtaaattatttatgcactcctggtgtgctatgaatattattccagttagccttggattatttcagtggccaacatatgcagacatttgtactcctcaaccattttctcaaagtaatgggcattctatgatttagacttcaaggaattccaatgatgaagattttaaggaaagtattttatattcaacaggtatattctgctgcatgtactgtactccagagctgttatgtaacactgtatataaatggttgcaaaaaaaaaaaaaagtcagtgcttctaaaaagaatttaagataatggtttttaaaatgcctttataataagctttgtttctttgtgaaactaattcagcaggctgaaggaaatggttcatgtgataatgtgggctggtatcctctagagtacctgggtacataaacagaaactcctgtaggtaaaaagtaatttgtgccattagtctttctatgtttctgcatccagatagagtgcagttcatgagggagggggcgggggactgaaggggaaagggcgttaaagtgatacatttttataccaaatgtgtttatttttttgtgcaagtaatccttaaaattgcaattgtattaggtgttaaaataaagtttttaaaaaattacttgtatttatactttacatacttaataatgaaaatttctgaattccaattaactttcaactttcataatctaaaaagaatcagagacccaggacacagaatactgtgtaatctgtgatgtctttaatgatgtttagagtttgtgatataagaatacaggaaagacatttttaatgtaaatttgaaatgccaatgtatttttttaagaacatcatctggcttttccttcagtctaaaagacatgaaagaagtgtaagtatagcagttaaaacgaaaataatggttatgggtgttttgactggaggcaatgtagccaaatagagtaaagagacccccctggtcgggagctccaaattgagctatttttgattctaccacttactgatatgacagttaattcaaattttgtatcactctgggccttactacaccagggtgatgctgactgcagaatagatcttattctaaggtgctatttaaattataaatttgcatagtggaggttttatttaaagtataatattgagtctggtcgatagaaaaatccttaacttttaagatacttaatatatcatatatattttatattgaaacttactgggtccatcagatttctgctttaattaaaccacttatgagcttcttagaacttattcagataacagtgtaaaatctatgcagtgctacccaaagggtgtgaggtagataggggatttcaaagatctcttccacctttgagatcccatgattctgagctgccacagtctgattatacaactctaccagctccctaaacaagttaggttcatttgtgagtactcatcatttcataatatcatgattatcacgatttcatgatactcaatattttgagattttataaccctttaagaagtgataaataatgtagtattcaattcgtttatcaaagtatattgcctggaaatgctcacatgtatcatttacatcctctatatattatgactattccaaactcattcattttatagaaatggtcaaaggaaaaagccttatgtacagccttatttgaagagaaagttctttgtctgagtcaggaacatcctgttatccagctgctacatcccctttcagtgtgaattccactccttaccaaatcacttagaaaacactttgacaagttttaaactcaaacactgaatattttatgaagcatgtgtaaagaaagaaaccaaaatttggtgcaggtatttagtaatgggtagaacctgttaatatctgagtcatatataatggggccaaacatggaactacctcatcaaccccccaaaaatgtggccaactattaatattctttgtgacatttacaccaaggggcatagtaagtatttttggtattataaaatacacattcaaaatctctgttgtacaaaactcatgtaacagttgggacaaaatatccaaatgtgggttcacagttcacaggtggtgaaaattgaggccttactgctatggagtgtatatcaaaatgttcatggtgacacatttgaagcaataaatggcttaattaaatgccaaaa

SEQ ID NO: 142645 - DNA, 1222 bp, Homo sapiens
  Payload ID: 8191
  Gene Symbol: ING3
  Gene Name: inhibitor of growth family, member 3
  Uniprot ID: Q9NXR8
  ENST ID: ENST00000339121
  CDS Start-End: 135-413
tttttttttttttgccggagtcgagcgggtgctgctagcggaggcgccatattggaggggacaaaactccggcgacagcgagtgacacaaataaacccctggacccccttgttccctcagctctaagggccgcgatgttgtacctagaagactatctggaaatgattgagcagcttcctatggatctgcgggaccgcttcacggaaatgcgcgagatggacctgcaggtgcagaatgcaatggatcaactagaacaaagagtcagtgaattctttatgaatgcaaagaaaaataaacctgagtggagggaagagcaaatggcatccatcaaaaaagactactataaagctttggaagatgcagatgagaaggttcagttggcaaaccagatatatgacttgcagcacttctaaaagattgaaaacaccaagaagatagatagaatattcactatttctcatattgatgcaattgtggtgctctttttcatttgaaacatcttctcctaaaatatacactttaagaaatagtcatttctgtttttgcattaaagtaaattaaagcagaaaacacatgctcacttttggctaacttcagtgtatagatttcatacttatgttgtctttcctgggtacagatttattactgaacaagtacgtgtaagtaaaatgtcattggtgagcaggacacaagataaaaggtgaacaccacatatggtgtgaattgtaaatgcttataccacaaacttgaaaatgtgtcatgtagagccatggaaaatgtctagttgtttttatgtagtacacacattttaatggtgctaacaacctgggctcttttgttcatagagttattctgaaaaaaatttcataaaagacactgcctaaagataggtagaataggctgtagcttgatttactgtggaataaaaaccaaaaaaaaaaaggtcttaattgtttcagtctttaattatgtctataaacttagaaaaaggcatttacatttgaatctagactaatttgtttagtaacattcttcctcatattcaatgactgtatgtatcagtccttatttagagactgcctgctttttaattcatatagctctttggttctattctttgttttgtttattattttgttgttttattgcttgttagacctttactaaagatattttgtgtatttagaaaaaatataacataaatatatgctttttaaatatg

SEQ ID NO: 142646 - DNA, 1447 bp, Homo sapiens
  Payload ID: 8191
  Gene Symbol: ING3
  Gene Name: inhibitor of growth family, member 3
  ENST ID: ENST00000431467
  CDS Start-End: 66-1277
gtatttcgccgttggccccgcccctctgacggactctccctttgacagtgattgagcagcttcctatggatctgcgggaccgcttcacggaaatgcgcgagatggacctgcaggtgcagaatgcaatggatcaactagaacaaagagtcagtgaattctttatgaatgcaaagaaaaataaacctgagtggagggaagagcaaatggcatccatcaaaaaagactactataaagctttggaagatgcagatgagaaggttcagttggcaaaccagatatatgacttggtagatcgacacttgagaaagctggatcaggaactggctaagtttaaaatggagctggaagctgataatgctggaattacagaaatattagagaggcgatctttggaattagacactccttcacagccagtgaacaatcaccatgctcattcacatactccagtggaaaaaaggaaatataatccaacttctcaccatacgacaacagatcatattcctgaaaagaaatttaaatctgaagctcttctatccacccttacgtcagatgcctctaaggaaaatacactaggttgtcgaaataataattccacagcctcttctaacaatgcctacaatgtgaattcctcccaacctctgggatcctataacattggctcgttatcttcaggaactggtgcaggggcaattaccatggcagctgctcaagcagttcaggctacagctcagatgaaggagggacgaagaacatcaagtttaaaagccagttatgaagcatttaagaataatgactttcagttgggaaaagaattttcaatggccagggaaacagttggctattcatcatcttcggcacttatgacaacattaacacagaatgccagttcatcagcagccgactcacggagtggtcgaaagagcaaaaacaacaacaagtcttcaagccagcagtcatcatcttcctcctcctcttcttccttatcatcgtgttcttcatcatcaactgttgtacaagaaatctctcaacaaacaactgtagtgccagaatctgattcaaatagtcaggttgattggacttacgacccaaatgaacctcgatactgcatttgtaatcaggtatcttatggtgagatggtgggatgtgataaccaagattgccctatagaatggttccattatggctgcgttggattgacagaggcaccaaaaggcaaatggtactgtccacagtgcactgctgcaatgaagagaagaggcagcagacacaaataaaggtggtccttttgtttgatgaagaaataaacttcagctgaagattttatataggactttaaaaagaagagaagagaaagaagaaacaatgcatttccaggcaaccacttaaaggatttacatagacaatcctataagatcttgaacttgaattttatgggttgtatttt

SEQ ID NO: 142647 - DNA, 1723 bp, Homo sapiens
  Payload ID: 8191
  Gene Symbol: ING3
  Gene Name: inhibitor of growth family, member 3
  ENST ID: ENST00000445699
  CDS Start-End: 103-402
tgctagcggaggcgccatattggaggggacaaaactccggcgacagcgagtgacacaaataaacccctggacccccttgttccctcagctctaagggccgcgatgttgtacctagaagactatctggaaatgattgagcagcttcctatggatctgcgggaccgcttcacggaaatgcgcgagatggacctgcaggtgcagaatgcaatggatcaactagaacaaagagtcagtgaattctttatgaatgcaaagaaaaataaacctgagtggagggaagagcaaatggcatccatcaaaaaagactactataaagctttggaagatgcagatgagaaggttcagttggcaaaccagatatatgacttggtaagtaaaagtaatgtgcatactgtgccataagtacttgaataacagattatatcttaaattgtattggcttaaatgtagtaggaagaagcaactaaaactgaagtattgctctcttgatcacatctaatttgacatttcagtgtccattttatggtttctttgtggaaaagtcagagtggttagttaatgtggtgagaactgtacattttagcaagtctatacggcggtaaggtggtttctgatgttagatattttttaaacaagaattaatgtttaactttattttactaatccttgtcttcttaaggtagtgtgtttacttgccttatacatcattttgagattgtttctgtggtaaaatacacctaagaagactgctttgacaagagttcttggtagtctgattaaaatgaagaagaatcatttgaatcagtgtttatgtgagtgatgttaaaagatcgtatgtaacagctgtgtcagttgtttaagcaatacaagatgacaaactttaaacaagattctttttttgcagcagcacttctaaaagattgaaaacaccaagaagatagatagaatattcactatttctcatattgatgcaattgtggtgctctttttcatttgaaacatcttctcctaaaatatacactttaagaaatagtcatttctgtttttgcattaaagtaaattaaagcagaaaacacatgctcacttttggctaacttcagtgtatagatttcatacttatgttgtctttcctgggtacagatttattactgaacaagtacgtgtaagtaaaatgtcattggtgagcaggacacaagataaaaggtgaacaccacatatggtgtgaattgtaaatgcttataccacaaacttgaaaatgtgtcatgtagagccatggaaaatgtctagttgtttttatgtagtacacacattttaatggtgctaacaacctgggctcttttgttcatagagttattctgaaaaaaatttcataaaagacactgcctaaagataggtagaataggctgtagcttgatttactgtggaataaaaaccaaaaaaaaaaaggtcttaattgtttcagtctttaattatgtctataaacttagaaaaaggcatttacatttgaatctagactaatttgtttagtaacattcttcctcatattcaatgactgtatgtatcagtccttatttagagactgcctgctttttaattcatatagctctttggttctattctttgttttgtttattattttgttgttttattgcttgttagacctttactaaagatattttgtgtatttagaaaaaatataacataaatatatgctttttaaata

SEQ ID NO: 142648 - DNA, 1718 bp, Homo sapiens
  Payload ID: 8191
  Gene Symbol: ING3
  Gene Name: inhibitor of growth family, member 3
  Uniprot ID: Q9NXR8
  ENST ID: ENST00000427726
  CDS Start-End: 113-394
gagcgggtgctgctagcggaggcgccatattggaggggacaaaactccggcgacagcgagtgacacaaataaacccctggacccccttgttccctcagctctaagggccgcgatgttgtacctagaagactatctggaaatgattgagcagcttcctatggatctgcgggaccgcttcacggaaatgcgcgagatggacctgcaggtgcagaatgcaatggatcaactagaacaaagagtcagtgaattctttatgaatgcaaagaaaaataaacctgagtggagggaagagcaaatggcatccatcaaaaaagactactataaagctttggaagatgcagatgagaaggttcagttggcaaaccagatatatgacttggatctttggaattagacactccttcacagccagtgaacaatcaccatgctcattcacatactccagtggaaaaaaggaaatataatccaacttctcaccatacgacaacagatcatattcctgaaaagaaatttaaatctgaagctcttctatccacccttacgtcagatgcctctaaggaaaatacactaggttgtcgaaataataattccacagcctcttctaacaatgcctacaatgtgaattcctcccaacctctgggatcctataacattggctcgttatcttcaggaactggtgcaggggcaattaccatggcagctgctcaagcagttcaggctacagctcagatgaaggagggacgaagaacatcaagtttaaaagccagttatgaagcatttaagaataatgactttcagttgggaaaagaattttcaatggccagggaaacagttggctattcatcatcttcggcacttatgacaacattaacacagaatgccagttcatcagcagccgactcacggagtggtcgaaagagcaaaaacaacaacaagtcttcaagccagcagtcatcatcttcctcctcctcttcttccttatcatcgtgttcttcatcatcaactgttgtacaagaaatctctcaacaaacaactgtagtgccagaatctgattcaaatagtcaggttgattggacttacgacccaaatgaacctcgatactgcatttgtaatcaggtatcttatggtgagatggtgggatgtgataaccaagattgccctatagaatggttccattatggctgcgttggattgacagaggcaccaaaaggcaaatggtactgtccacagtgcactgctgcaatgaagagaagaggcagcagacacaaataaaggtggtccttttgtttgatgaagaaataaacttcagctgaagattttatataggactttaaaaagaagagaagagaaagaagaaacaatgcatttccaggcaaccacttaaaggatttacatagacaatcctataagatcttgaacttgaattttatgggttgtattttaataatgtaagtaaattatttatgcactcctggtgtgctatgaatattattccagttagccttggattatttcagtggccaacatatgcagacatttgtactcctcaaccattttctcaaagtaatgggcattctatgatttagacttcaaggaattccaatgatgaagattttaaggaaagtattttatattcaacaggtatattctgctgcatgtactgtactccagagctgttatgtaacactgtatataaatggttgcaaaaaaaaaaaaaa

SEQ ID NO: 142649 - DNA, 1709 bp, Homo sapiens
  Payload ID: 8192
  Gene Symbol: ING4
  Gene Name: inhibitor of growth family, member 4
  Uniprot ID: Q9UNL4
  ENST ID: ENST00000341550
  CDS Start-End: 48-794
acagtcacttccggggcggatcggaagttgctttgttttgcttcgagatggctgcggggatgtatttggaacattatctggacagtattgaaaaccttccctttgaattacagagaaactttcagctcatgagggacctagaccaaagaacagaggacctgaaggctgaaattgacaagttggccactgagtatatgagtagtgcccgcagcctgagctccgaggaaaaattggcccttctcaaacagatccaggaagcctatggcaagtgcaaggaatttggtgacgacaaggtgcagcttgccatgcagacctatgagatggtggacaaacacattcggcggctggacacagacctggcccgttttgaggctgatctcaaggagaaacagattgagtcaagtgactatgacagctcttccagcaaaggcaaaaagagccggactcaaaaggagaagaaagctgctcgtgctcgttccaaagggaaaaactcggatgaagaagcccccaagactgcccagaagaagttaaagctcgtgcgcacaagtcctgagtatgggatgccctcagtgacctttggcagtgtccacccctctgatgtgttggatatgcctgtggatcccaacgaacccacctattgcctttgtcaccaggtctcctatggagagatgattggctgtgacaaccctgattgttccattgagtggttccattttgcctgtgtggggctgacaaccaagcctcgggggaaatggttttgcccacgctgctcccaagaacggaagaagaaatagataagggccttggattccaacacagtttcttccacatcccctgacttgggctagtgggcagaggaatgcctgtgctggggccaggggttcagggaggagtggatggcacagtgctgtcatcccttctcctcccctctccccactcccggtgctgaggctgcatcagaccctggtagggaggggtgccgcagccactaacggtatgtgctctccttcagccctctcccttcggagggacgtggtcttgcccactgtccttttgcctccatgctgaggtcggtgctgtatttcagagggagggtccttttcattctccttgctttgtatttaaggactggggcatagcatgggggcagtcccccagacctcttcattccccctcctgtggtgagggctaggtgtgatcaacacttttcttctccattcccttcctgcttttttcatggtgggggatccaccaggtcatctaggctctggccctagttgaaggggcaccccttcctctgtgccaagaggattcatcctgggagagggggcaaggtggaatgcagataactcacatgtaaaaggaacttgggtaggtaaataaaagctatacatgttggcctgctgtgtttattgtagagacactgttttagtaaacatgctgagcattcattttgcgtcctctgggttggatgcaatgtgagaggatggcatgccagaattaggacacgacatgaaaccagagtggtgcctctgtccgagaacttgtaagttctcaacttgggaaagacagaggtgctggagggtaggcctcagaccagggggtctccaaaactttgtaaatcatgcatcttttctccataaaacatctttcacttaatttccaataaatgatgtatttgtgctatacatacgtactgctatactata

SEQ ID NO: 142650 - DNA, 1393 bp, Homo sapiens
  Payload ID: 8192
  Gene Symbol: ING4
  Gene Name: inhibitor of growth family, member 4
  Uniprot ID: Q9UNL4
  ENST ID: ENST00000396807
  CDS Start-End: 40-789
ttccggggcggatcggaagttgctttgttttgcttcgagatggctgcggggatgtatttggaacattatctggacagtattgaaaaccttccctttgaattacagagaaactttcagctcatgagggacctagaccaaagaacagaggacctgaaggctgaaattgacaagttggccactgagtatatgagtagtgcccgcagcctgagctccgaggaaaaattggcccttctcaaacagatccaggaagcctatggcaagtgcaaggaatttggtgacgacaaggtgcagcttgccatgcagacctatgagatggtggacaaacacattcggcggctggacacagacctggcccgttttgaggctgatctcaaggagaaacagattgagtcaagtgactatgacagctcttccagcaaaggcaaaaagaaaggccggactcaaaaggagaagaaagctgctcgtgctcgttccaaagggaaaaactcggatgaagaagcccccaagactgcccagaagaagttaaagctcgtgcgcacaagtcctgagtatgggatgccctcagtgacctttggcagtgtccacccctctgatgtgttggatatgcctgtggatcccaacgaacccacctattgcctttgtcaccaggtctcctatggagagatgattggctgtgacaaccctgattgttccattgagtggttccattttgcctgtgtggggctgacaaccaagcctcgggggaaatggttttgcccacgctgctcccaagaacggaagaagaaatagataagggccttggattccaacacagtttcttccacatcccctgacttgggctagtgggcagaggaatgcctgtgctggggccaggggttcagggaggagtggatggcacagtgctgtcatcccttctcctcccctctccccactcccggtgctgaggctgcatcagaccctggtagggaggggtgccgcagccactaacggtatgtgctctccttcagccctctcccttcggagggacgtggtcttgcccactgtccttttgcctccatgctgaggtcggtgctgtatttcagagggagggtccttttcattctccttgctttgtatttaaggactggggcatagcatgggggcagtcccccagacctcttcattccccctcctgtggtgagggctaggtgtgatcaacacttttcttctccattcccttcctgcttttttcatggtgggggatccaccaggtcatctaggctctggccctagttgaaggggcaccccttcctctgtgccaagaggattcatcctgggagagggggcaaggtggaatgcagataactcacatgtaaaaggaacttgggtaggtaaataaaagctatacatgttg

SEQ ID NO: 142651 - DNA, 678 bp, Homo sapiens
  Payload ID: 8192
  Gene Symbol: ING4
  Gene Name: inhibitor of growth family, member 4
  Uniprot ID: Q9UNL4
  ENST ID: ENST00000444704
  CDS Start-End: 1-678
atggctgcggggatgtatttggaacattatctggacaacctgaaggctgaaattgacaagttggccactgagtatatgagtagtgcccgcagcctgagctccgaggaaaaattggcccttctcaaacagatccaggaagcctatggcaagtgcaaggaatttggtgacgacaaggtgcagcttgccatgcagacctatgagatggtggacaaacacattcggcggctggacacagacctggcccgttttgaggctgatctcaaggagaaacagattgagtcaagtgactatgacagctcttccagcaaaggcaaaaagaaaggccggactcaaaaggagaagaaagctgctcgtgctcgttccaaagggaaaaactcggatgaagaagcccccaagactgcccagaagaagttaaagctcgtgcgcacaagtcctgagtatgggatgccctcagtgacctttggcagtgtccacccctctgatgtgttggatatgcctgtggatcccaacgaacccacctattgcctttgtcaccaggtctcctatggagagatgattggctgtgacaaccctgattgttccattgagtggttccattttgcctgtgtggggctgacaaccaagcctcgggggaaatggttttgcccacgctgctcccaagaacggaagaagaaatag

SEQ ID NO: 142652 - DNA, 741 bp, Homo sapiens
  Payload ID: 8192
  Gene Symbol: ING4
  Gene Name: inhibitor of growth family, member 4
  Uniprot ID: Q9UNL4
  ENST ID: ENST00000412586
  CDS Start-End: 1-741
atggctgcggggatgtatttggaacattatctggacagtattgaaaaccttccctttgaattacagagaaactttcagctcatgagggacctagaccaaagaacagaggacctgaaggctgaaattgacaagttggccactgagtatatgagtagtgcccgcagcctgagctccgaggaaaaattggcccttctcaaacagatccaggaagcctatggcaagtgcaaggaatttggtgacgacaaggtgcagcttgccatgcagacctatgagatggtggacaaacacattcggcggctggacacagacctggcccgttttgaggctgatctcaaggagaaacagattgagtcaagtgactatgacagctcttccagcaaagaaggccggactcaaaaggagaagaaagctgctcgtgctcgttccaaagggaaaaactcggatgaagaagcccccaagactgcccagaagaagttaaagctcgtgcgcacaagtcctgagtatgggatgccctcagtgacctttggcagtgtccacccctctgatgtgttggatatgcctgtggatcccaacgaacccacctattgcctttgtcaccaggtctcctatggagagatgattggctgtgacaaccctgattgttccattgagtggttccattttgcctgtgtggggctgacaaccaagcctcgggggaaatggttttgcccacgctgctcccaagaacggaagaagaaatag

SEQ ID NO: 142653 - DNA, 602 bp, Homo sapiens
  Payload ID: 8192
  Gene Symbol: ING4
  Gene Name: inhibitor of growth family, member 4
  Uniprot ID: Q9UNL4
  ENST ID: ENST00000423703
  CDS Start-End: 1-540
atggctgcggggatgtatttggaacattatctggacagtattgaaaaccttccctttgaattacagagaaactttcagctcatgagggacctagaccaaagaacagaggacctgaaggctgaaattgacaagttggccactgagtatatgagtagtgcccgcagcctgagctccgaggaaaaattggcccttctcaaacagatccaggaagcctatggcaagtgcaaggaatttggtgacgacaaggtgcagcttgccatgcagacctatgagatggtggacaaacacattcggcggctggacacagacctggcccgttttgaggctgatctcaaggagaaacagattgagtcaagtgactatgacagctcttccagcaaaggcaaaaagaaaggccggactcaaaaggagaagaaagctgctcgtgctcgttccaaagggaaaaactcggatgaagaagcccccaagactgcccagaagaagttaaagctcgtgcgcactgttccattgagtggttccattttgcctgtgtggggctgacaaccaagcctcgggggaaatggttttgcccacgctgctcccaagaacggaagaagaaatag

SEQ ID NO: 142654 - DNA, 1348 bp, Homo sapiens
  Payload ID: 8192
  Gene Symbol: ING4
  Gene Name: inhibitor of growth family, member 4
  Uniprot ID: Q9UNL4
  ENST ID: ENST00000446105
  CDS Start-End: 42-779
acttccggggcggatcggaagttgctttgttttgcttcgagatggctgcggggatgtatttggaacattatctggacagtattgaaaaccttccctttgaattacagagaaactttcagctcatgagggacctagaccaaagaacagaggacctgaaggctgaaattgacaagttggccactgagtatatgagtagtgcccgcagcctgagctccgaggaaaaattggcccttctcaaacagatccaggaagcctatggcaagtgcaaggaatttggtgacgacaaggtgcagcttgccatgcagacctatgagatggtggacaaacacattcggcggctggacacagacctggcccgttttgaggctgatctcaaggagaaacagattgagtcaagtgactatgacagctcttccagcaaaggccggactcaaaaggagaagaaagctgctcgtgctcgttccaaagggaaaaactcggatgaagaagcccccaagactgcccagaagaagttaaagctcgtgcgcacaagtcctgagtatgggatgccctcagtgacctttggcagtgtccacccctctgatgtgttggatatgcctgtggatcccaacgaacccacctattgcctttgtcaccaggtctcctatggagagatgattggctgtgacaaccctgattgttccattgagtggttccattttgcctgtgtggggctgacaaccaagcctcgggggaaatggttttgcccacgctgctcccaagaacggaagaagaaatagataagggccttggattccaacacagtttcttccacatcccctgacttgggctagtgggcagaggaatgcctgtgctggggccaggggttcagggaggagtggatggcacagtgctgtcatcccttctcctcccctctccccactcccggtgctgaggctgcatcagaccctggtagggaggggtgccgcagccactaacggtatgtgctctccttcagccctctcccttcggagggacgtggtcttgcccactgtccttttgcctccatgctgaggtcggtgctgtatttcagagggagggtccttttcattctccttgctttgtatttaaggactggggcatagcatgggggcagtcccccagacctcttcattccccctcctgtggtgagggctaggtgtgatcaacacttttcttctccattcccttcctgcttttttcatggtgggggatccaccaggtcatctaggctctggccctagttgaaggggcaccccttcctctgtgccaagaggattcatcctgggagagggggcaaggtggaatgcagataactcacatgtaaaag

SEQ ID NO: 142655 - DNA, 1150 bp, Homo sapiens
  Payload ID: 8192
  Gene Symbol: ING4
  Gene Name: inhibitor of growth family, member 4
  ENST ID: ENST00000488381
  CDS Start-End: 29-172
atcggaagttgctttgttttgcttcgagatggctgcggggatgtatttggaacattatctggacagtattgaaaaccttccctttgaattacagagaaactttcagctcatgagggacctagaccaaagaacagaggaagcattagataccatctccagcctggaacattgagcaaatttggctgcattggggcattcacttggtttcttcaaagatgtctgttggagctattcccatacccactgaaggatctgtagtcttgtcttcattctatgtagccatgttcaaggatgtaacagactggttttgagatacatgaagctgtgtcttaagttactctgagtttacacatgaaaaggtgaacatcatcaaaaaccctggacacagttccctgagaactgcctgccgaatgacctgaaggctgaaattgacaagttggccactgagtatatgagtagtgcccgcagcctgagctccgaggaaaaattggcccttctcaaacagatccaggaagcctatggcaagtgcaaggaatttggtgacgacaaggtgcagcttgccatgcagacctatgagatggtggacaaacacattcggcggctggacacagacctggcccgttttgaggctgatctcaaggagaaacagattgagtcaagtgactatgacagctcttccagcaaaggcaaaaagagccggactcaaaaggagaagaaagctgctcgtgctcgttccaaagggaaaaactcggatgaagaagcccccaagactgcccagaagaagttaaagctcgtgcgcacaagtcctgagtatgggatgccctcagtgacctttggcagtgtccacccctctgatgtgttggatatgcctgtggatcccaacgaacccacctattgcctttgtcaccaggtctcctatggagagatgattggctgtgacaaccctgattgttccattgagtggttccattttgcctgtgtggggctgacaaccaagcctcgggggaaatggttttgcccacgctgctcccaagaacggaagaagaaatagataagggccttggattccaacacagtttcttccacatcccctgacttgggctagtgggcagaggaatgcctgtgctggggccaggggttcagggaggag

SEQ ID NO: 142656 - DNA, 776 bp, Homo sapiens
  Payload ID: 8192
  Gene Symbol: ING4
  Gene Name: inhibitor of growth family, member 4
  ENST ID: ENST00000469749
  CDS Start-End: 14-169
gttttgcttcgagatggctgcggggatgtatttggaacattatctggacagtattgaaaaccttccctttgaattacagagaaactttcagctcatgagggacctagaccaaagaacagagggtggacaaacacattcggcggctggacacagacctggcccgttttgaggctgatctcaaggagaaacagattgagtcaagtgactatgacagctcttccagcaaaggcaaaaagagccggactcaaaaggagaagaaagctgctcgtgctcgttccaaagggaaaaactcggatgaagaagcccccaagactgcccagaagaagttaaagctcgtgcgcacaagtcctgagtatgggatgccctcagtgacctttggcagtgtccacccctctgatgtgttggatatgcctgtggatcccaacgaacccacctattgcctttgtcaccaggtctcctatggagagatgattggctgtgacaaccctgattgttccattgagtggttccattttgcctgtgtggggctgacaaccaagcctcgggggaaatggttttgcccacgctgctcccaagaacggaagaagaaatagataagggccttggattccaacacagtttcttccacatcccctgacttgggctagtgggcagaggaatgcctgtgctggggccaggggttcagggaggagtggatggcacagtgctgtcatcccttctcctcccctctccccactcccggtgctgaggctgcatcagaccctggtagggagggg

SEQ ID NO: 142657 - DNA, 659 bp, Homo sapiens
  Payload ID: 8192
  Gene Symbol: ING4
  Gene Name: inhibitor of growth family, member 4
  ENST ID: ENST00000482489
  CDS Start-End: 1-111
aaccttccctttgaattacagagaaactttcagctcatgagggacctagaccaaagaacagagggtggacaaacacattcggcggctggacacagacctggcccgttttgaggctgatctcaaggagaaacagattgagtcaagtgactatgacagctcttccagcaaaggcaaaaagaaaggccggactcaaaaggagaagaaagctgctcgtgctcgttccaaagggaaaaactcggatgaagaagcccccaagactgcccagaagaagttaaagctcgtgcgcacgtctcctatggagagatgattggctgtgacaaccctgattgttccattgagtggttccattttgcctgtgtggggctgacaaccaagcctcgggggaaatggttttgcccacgctgctcccaagaacggaagaagaaatagataagggccttggattccaacacagtttcttccacatcccctgacttgggctagtgggcagaggaatgcctgtgctggggccaggggttcagggaggagtggatggcacagtgctgtcatcccttctcctcccctctccccactcccggtgctgaggctgcatcagaccctggtagggaggggtgccgcagccactaacggtatgtgctctccttcagccctctcccttc

SEQ ID NO: 142658 - DNA, 911 bp, Homo sapiens
  Payload ID: 8192
  Gene Symbol: ING4
  Gene Name: inhibitor of growth family, member 4
  ENST ID: ENST00000479301
  CDS Start-End: 29-172
atcggaagttgctttgttttgcttcgagatggctgcggggatgtatttggaacattatctggacagtattgaaaaccttccctttgaattacagagaaactttcagctcatgagggacctagaccaaagaacagaggaagcattagataccatctccagcctggaacattgagcaaatttggctgcattggggcattcacttggtttcttcaaagatgtctgttggagctattcccatacccactgaaggatctgtagtcttgtcttcattctatgtagccatgttcaaggatgtaacagactggttttgagatacatgaagctgtgtcttaagttactctgagtttacacatgaaaaggtgaacatcatcaaaaaccctggacacagttccctgagaactgcctgccgaatgacctgaaggctgaaattgacaagttggccactgagtatatgagtagtgcccgcagcctgagctccgaggaaaaattggcccttctcaaacagatccaggaagcctatggcaagtgcaaggaatttggtgacgacaaggtgcagcttgccatgcagacctatgagatggtggacaaacacattcggcggctggacacagacctggcccgttttgaggctgatctcaaggagaaacagattgagtcaagtgactatgacagctcttccagcaaaggcaaaaagaaaggccggactcaaaaggagaagaaagctgctcgtgctcgttccaaagggaaaaactcggatgaagaagcccccaagactgcccagaagaagttaaagctcgtgcgcacaagtcctgagtatgggatgccctcagtgacctttggcagtgtccacccctctgatgtgttggatatgcctgtggatcccaacgaacccacctattgcctttgtcacc

SEQ ID NO: 142659 - DNA, 397 bp, Homo sapiens
  Payload ID: 8192
  Gene Symbol: ING4
  Gene Name: inhibitor of growth family, member 4
  ENST ID: ENST00000493873
  CDS Start-End: 334-397
atttggaacattatctggacagtattgaaaaccttccctttgaattacagagaaactttcagctcatgagggacctagaccaaagaacagagggtggacaaacacattcggcggctggacacagacctggcccgttttgaggctgatctcaaggagaaacagattgagtcaagtgactatgacagctcttccagcaaaggcaaaaagaaaggccggactcaaaaggagaagaaagctgctcgtgctcgttccaaagggaaaaactcggatgaagaagcccccaagactgcccagaagaagttaaagctcgtgcgcacaagtcctgagtatgggatgccctcagtgacctttggcagtgtccacccctctgatgtgttggatatgcctgtggatccca

SEQ ID NO: 142660 - DNA, 529 bp, Homo sapiens
  Payload ID: 8192
  Gene Symbol: ING4
  Gene Name: inhibitor of growth family, member 4
  ENST ID: ENST00000467678
  CDS Start-End: 377-529
ttggaacattatctggacagttcaagtgattctcctgcctcagcctcctgaatagctgggattacaggtattgaaaaccttccctttgaattacagagaaactttcagctcatgagggacctagaccaaagaacagagggtggacaaacacattcggcggctggacacagacctggcccgttttgaggctgatctcaaggagaaacagattgagtcaagtgactatgacagctcttccagcaaaggcaaaaagagccggactcaaaaggagaagaaagctgctcgtgctcgttccaaagggaaaaactcggatgaagaagcccccaagactgcccagaagaagttaaagctcgtgcgcacaagtcctgagtatgggatgccctcagtgacctttggcagtgtccacccctctgatgtgttggatatgcctgtggatcccaacgaacccacctattgcctttgtcaccaggtctcctatggagagatgattggctgtgacaaccctgattgttccattgagtggttccat

SEQ ID NO: 142661 - DNA, 1280 bp, Homo sapiens
  Payload ID: 8192
  Gene Symbol: ING4
  Gene Name: inhibitor of growth family, member 4
  ENST ID: ENST00000619641
  CDS Start-End: 42-197
acttccggggcggatcggaagttgctttgttttgcttcgagatggctgcggggatgtatttggaacattatctggacagtattgaaaaccttccctttgaattacagagaaactttcagctcatgagggacctagaccaaagaacagagggtggacaaacacattcggcggctggacacagacctggcccgttttgaggctgatctcaaggagaaacagattgagtcaagtgactatgacagctcttccagcaaaggcaaaaagaaaggccggactcaaaaggagaagaaagctgctcgtgctcgttccaaagggaaaaactcggatgaagaagcccccaagactgcccagaagaagttaaagctcgtgcgcacaagtcctgagtatgggatgccctcagtgacctttggcagtgtccacccctctgatgtgttggatatgcctgtggatcccaacgaacccacctattgcctttgtcaccaggtctcctatggagagatgattggctgtgacaaccctgattgttccattgagtggttccattttgcctgtgtggggctgacaaccaagcctcgggggaaatggttttgcccacgctgctcccaagaacggaagaagaaatagataagggccttggattccaacacagtttcttccacatcccctgacttgggctagtgggcagaggaatgcctgtgctggggccaggggttcagggaggagtggatggcacagtgctgtcatcccttctcctcccctctccccactcccggtgctgaggctgcatcagaccctggtagggaggggtgccgcagccactaacggtatgtgctctccttcagccctctcccttcggagggacgtggtcttgcccactgtccttttgcctccatgctgaggtcggtgctgtatttcagagggagggtccttttcattctccttgctttgtatttaaggactggggcatagcatgggggcagtcccccagacctcttcattccccctcctgtggtgagggctaggtgtgatcaacacttttcttctccattcccttcctgcttttttcatggtgggggatccaccaggtcatctaggctctggccctagttgaaggggcaccccttcctctgtgccaagaggattcatcctgggagagggggcaaggtggaatgcagataactcacatgtaaaaggaacttgggtaggtaaataaaagctatacatgttggcctgctgtgtttattgtagagacactgttttagtaaacatgctgagcattc

SEQ ID NO: 142662 - DNA, 5196 bp, Homo sapiens
  Payload ID: 8193
  Gene Symbol: ING5
  Gene Name: inhibitor of growth family, member 5
  Uniprot ID: Q8WYH8
  ENST ID: ENST00000313552
  CDS Start-End: 27-749
gaccccgagcgcggccgcggacgaagatggcgaccgccatgtacttggagcactatctggacagtatcgagaaccttccctgcgaacttcagaggaacttccagctgatgcgagagctggaccagaggacggaagataagaaagcagagattgacatcctggctgcagagtacatctccacggtgaagacgctgtctccagaccagcgcgtggagcgcctgcagaagatccagaacgcctacagcaagtgcaaggaatacagtgacgacaaagtgcagctggccatgcagacctacgagatggtggataaacacattcgaaggcttgatgcagacctggcgcgctttgaagcagatctgaaggacaagatggagggcagtgattttgaaagctccggagggcgagggttaaaaaaaggccggggtcagaaagaaaaaagagggtcccggggccgaggcaggaggacatcagaggaagacacaccaaagaaaaagaagcacaaaggagggtctgagttcactgacaccatcctgtccgtgcacccctctgatgtgctggacatgcccgtggacccaaacgaacccacgtactgcctgtgccaccaggtctcctatggggagatgattggctgtgacaatccagactgtccaattgagtggtttcactttgcctgcgtggaccttaccacgaaacccaaaggaaaatggttctgtccacggtgtgtccaggaaaagaggaagaagaagtaggaggagctgtgtgcccggatccgaggagcaagttaatctgtcccttcattcgtgtcgcaatatttcccttccttttaaaactaccttgttcggttgatacttagtaactccgtggccagttgaagcgctggatgtttcctagaacaagaaccaccaaagcctgttcgcacagaagggcgaccttgcagggactcgccgccgcgacctcagtgtggcttttacaggactccccccgagcatcagcagggaccccggcggacgtgggcgggcgcgcgtgagctcgggctgcccggccgggcgtgcgggcggggacatggtaacctggtccacggagggcggccgccaccctcgcgtagctttcctgtggttttccaggactgtccggtacagcccgggctccgcgtgccccgcccgctggagcacctgccaccgaggcgcgcgtggggccactgccgtggcggcggctgccctcctcacactcggctccgcgccgcctccggccaccgtgcgctcccgcgtggggcgcctcggatgggcccgggagggctgggggctcttccctggaggaagcggcctccgcttcgctggcgccgcctttttagcttggacttcagtcctccctcggggactcacctccggagtaaacggctcttcattagcttggagtggccgcaggtcccgtgaccagcacccgcgagaccctgtgcgacagctgggctgatgctccgtttctctgggaattggtgattttttactgtgaagatgaaattaccctaatagcatgaagatcgtgggtctgtgtgtccgtgaagtgagtcccgtctgccaggagctgacgaaccacgaatgcttctgcctgtgctgtgcattcccaggcccgcagctcccggtcgaggggactccgatgtgaatttgttgtgaatttgttgtgccacaatagcagttctggaatgaagctaggaaactcgagtgtgctttttgtttaatgagcgttcaccaagctgagccggagccatcctttcggtggtagttggggaaggctatgcagatttgctctgttgtgacgcgttggtgacggtgcccagcctgcggttccccacagcatcgcaggcgctcggaaatcctctcccgtgcctttagaggaaggagaggattgctgaggaatgcagggacgcctgtttctgtcctcacaccacagaaagaaacctgagggaaaactgagacgtgaggttcctgatttaagaagcctgggtttcttcatggtggggggccatttggaatgacagcctcacttccttctgatggctacatctgtatcttttcctcctgtgtttaatgtttcactagggagaggaaataaagcagaaggaacgtgtgaagctctgtgtctcagacggggccctcccgtcgagaagctggtagtcagtgagtgagaacaagagaacaagaacaccctgaacagtcctggttgggatggtgtccacattcatgttctgcggttcttgaacacacggatgcctctgggccacctgtccttttccgagggtgtgggtgggagtggatcctccgggcgcaggtgccaggcaggtgcaggcgggcggtcggccactgctgctgctcgtccctgccagtgtctgggcctgaaggggctccctccaagcggtgccttcctgcggcttagaagggaaagcgccagagagggcaggctacagtgcttcacacccttcgccacggctgtgaaactggagatgggtgggttttgtatgttaatttttttttttgagacggagtcttgctctgtcacccaggctggagagcagtggcgtgatctcggctcactgcaagctccgcctcccgggttcacgccattctcctgcctcagcccccccgagtagctgggactacaggcgcccgccaccacgcctggctaattttttatatttttagtagagacagggtttcaccatgttaaccaggatggtctcgatctcctgacctcacgatttgcccgcctcggcttcccagagtgctgggattacaggcgtgagccaccgcgcctggccacccagctaagtttgtatttttgttggagacggggtttcaccatattggccagactggtctcaaactcctggggtcaaatgatccgcctgcgtcggcttcccagagtgctgggattacaggtgtcagccactgcgctcagctgggagatgaattttcatttaatgacttaactttttgttagcacaggttttgtgtgtgtgtgtgtgtgtgtgttttgttttttgttttgtgtttttgaaacggagttttgctctgtcacccaggctggaatgcaatggcaccatcttggctcactgcaacctctgcttcctgggttcaagtgattctcttgccttagcctcccgagcagctgggattataggcgtccaccaccacgcccagctaatttttgtatttttagtagaaatggggtttcaccatgtgtggccaggctggtctcgaactcctgacctgaagtgatccacccgcctcgacctcccaaagtgctgggatgacaggcatgagccaccgcacccggccaacacagatgtttattgatcgtggaggatacattgtggaaaatgtttttctctcttttaccatttttgggaagagggataggtaagtgcagggagtttgtgctgaaacagcgcctggcaatttttcagaaatgaatttgatattgcgctccacctttgagctgttcacacctgtggctacccctggaaagcgctggggttgttgatgcttttggctgcccggcttcctgaggtctcgctgctttttggggaaagatgactggcttccctgtgggacgcttttgtctgacacgtgatgatgtggtcctgcctgccactgtgcaccatcccaggtattgaattttgaccttttcttttcaagtttctgtgcttagtgtttttaatgtttacttttgccacttacaataatatcaccaaaataatatgcatagagttttggaagaaacatagaaaacatgagcagaatgagacaattccttgggctgtagtttggacccaactgaatcctgagtgctctgtggctgacgctgtctacccgtgggagagacacactcaggagtggccgtttggccagaaaagaaggtcatggcccctggcctggcccccgccctgcagggacacagaagccacaccatttgcaccatccacgccttgctccagaaggcctggccgccttctccctgggggtgattcaaggatttggtctcggaccagacccccctccacagctgcccggccccagacccatctcttggattgagggtgtgtgggctggaaccagtgggtcactgtggcagcttcatctgagccgaaggtgtgggtcctctgtggctgtgcgattgacctcgatgggaaggagcgttctacccattttccttgttttcagtgctgcggtatcagtcagtgatctgaggaaatcctgtaggggaaggcaggctgcagtgaaaacaggagctggtgaaaccgagccctctgcatctgcgaatgtgccctaggtgctgctgctggggacatggatgccaagcggaggcctgcgtggcctcctgagcagcagctgaccgcccgtctcatgctggacgggacccctgggcgggtggacatgagaccactgttggccagggacgccgtgcggaggcctacgtggctgcctgagcagcagctgaccgcccgtctcactgttggccagggctttgtggcgtgggtgttttccagtctgcctggagcagcgagaagcagctgtgcagactggtggcggtgggagggtttgctgggactgatggggacaccggccagcttgtctggtgtccagcagccctgccggacttggcctcctgtcctgtcgttgggagccctggctggggctgctttgagcaatgacgctggcccagagcagcttcccacatgaccccagagccgagggtctgccctgtcctaggttaggtcttcatggtttagagtaaaaccgtgagggatgttaattatgggcattgaagacttaaggttttcttaaatttttagtgagcagtgattggccttcaatacttgtgctgagaggaattttaagccaggggaagtgtaagaaaatgttcccattcaggagagattgtgttggagtttctttcttcctctgtatgtattttgtggtgtccacctttaaccacgtttcatccaaaacgatgatgcagctttaacatgaatgttacatttttattttcaaggaattattatctatgttccctttgtaaaggaaagataatgttgtaaatctttttattagataatgtaaagatgtatatcagtatttttggatcatgttatagattatggatatattgtttaataaataaagtattttttggaacaaa

SEQ ID NO: 142663 - DNA, 946 bp, Homo sapiens
  Payload ID: 8193
  Gene Symbol: ING5
  Gene Name: inhibitor of growth family, member 5
  Uniprot ID: Q8WYH8
  ENST ID: ENST00000406941
  CDS Start-End: 21-701
gagcgcggccgcggacgaagatggcgaccgccatgtacttggagcactatctggacagtatcgagaaccttccctgcgaacttcagaggaacttccagctgatgcgagagctggaccagaggacggaagataagaaagcagagattgacatcctggctgcagagtacatctccacggtgaagacgctgtctccagaccagcgcgtggagcgcctgcagaagatccagaacgcctacagcaagtgcaaggaatacagtgacgacaaagtgcagctggccatgcagacctacgagatggtggataaacacattcgaaggcttgatgcagacctggcgcgctttgaagcagatctgaaggacaagatggagggcagtgattttgaaagctccggagggcgagggttaaaaaaaggccggggtcagaaagaaaaaagagggtcccggggccgaggcaggaggacatcagaggaagacacaccaaagaaaaagaagcacaaaggagggtctgagttcactgacaccatcctgtccgtgcacccctctgatgtgctggacatgcccgtggacccaaacgaacccacgtactgcctgtgccaccaggtctcctatggggagatgattggctgtgacaatccagactgtccaattgagtggtttcactttgcctgcgtggaccttaccacgaaacccaaaggaaaatgatttcatttaaataaaaacctgtagtctgggcaacatcgggagaccccaactctacaaaaaatacaaaaattagctgggcgtggtggtgcgtgcctgtggtcccaactacctgggaggcggaggcgggaggatggcttgagcctggaagtccgaggcttcagtgagctgagatcgcgccactgcactccagcctgggcgagagagcaagaccctgtctcaaataaataaataaaaagataaaaacc

SEQ ID NO: 142664 - DNA, 662 bp, Homo sapiens
  Payload ID: 8193
  Gene Symbol: ING5
  Gene Name: inhibitor of growth family, member 5
  ENST ID: ENST00000445620
  CDS Start-End: 6-434
cgaagatggcgaccgccatgtacttggagcactatctggacagtatcgagaaccttccctgcgaacttcagaggaacttccagctgatgcgagagctggaccagaggacggaagataagaaagcagagattgacatcctggctgcagagtacatctccacggtgaagacgctgtctccagaccagcgcgtggagcgcctgcagaagatccagaacgcctacagcaagtgcaaggaatacagtgacgacaaagtgcagctggccatgcagacctacgagatggtggataaacacattcgaaggcttgatgcagacctggcgcgctttgaagcagatctgaaggacaagatggagggcagtgattttgaaagctccggagggcgagggttaaaaagcaagtctgttaattttttttctttattttattactgttaactatggagttttgaagagttttgtcacggtaaatcattaaagtatgatcactaggaaggccggggtcagaaagaaaaaagagggtcccggggccgaggcaggaggacatcagaggaagacacaccaaagaaaaagaagcacaaaggagggtctgagttcactgacaccatcctgtccgtgcacccctctgatgtgctggacatgcccgtggacccaaacgaacccacg

SEQ ID NO: 142665 - DNA, 3952 bp, Homo sapiens
  Payload ID: 8194
  Gene Symbol: IKBKB
  Gene Name: inhibitor of kappa light polypeptide gene enhancer in B-cells, kinase beta
  ENST ID: ENST00000342222
  CDS Start-End: 155-649
cgcgccgcgctgcccgcgttaagattcccgcattttaatgttttcaggggggtgtcatagccccgggtttggccgccccagccccgccttccccgccccggggagcccgccccctgccccgcgtccctgccgacagagttagcacgacatcagtatgagctggtcaccttccctgacaacgcagacatgtggggcctgggaaatgaaagagcgccttgggacagggggatttggaaatgtcatccgatggcacaatcaggaaacaggtgagcagattgccatcaagcagtgccggcaggagctcagcccccggaaccgagagcggtggtgcctggagatccagatcatgagaaggctgacccaccccaatgtggtggctgcccgagatgtccctgaggggatgcagaacttggcgcccaatgacctgcccctgctggccatggagtactgccaaggaggagatctccggaagtacctgaaccagtttgagaactgctgtggtctgcgggaaggtgccatcctcaccttgctgagtgacattggtaaatcccagtcccggaattcaggccgtgtccttcagggagagtgtggtgcccctcctctgcgcttagataccttcatgaaaacagaatcatccatcgggatctaaagccagaaaacatcgtcctgcagcaaggagaacagaggttaatacacaaaattattgacctaggatatgccaaggagctggatcagggcagtctttgcacatcattcgtggggaccctgcagtacctggccccagagctactggagcagcagaagtacacagtgaccgtcgactactggagcttcggcaccctggcctttgagtgcatcacgggcttccggcccttcctccccaactggcagcccgtgcagtggcattcaaaagtgcggcagaagagtgaggtggacattgttgttagcgaagacttgaatggaacggtgaagttttcaagctctttaccctaccccaataatcttaacagtgtcctggctgagcgactggagaagtggctgcaactgatgctgatgtggcacccccgacagaggggcacggatcccacgtatgggcccaatggctgcttcaaggccctggatgacatcttaaacttaaagctggttcatatcttgaacatggtcacgggcaccatccacacctaccctgtgacagaggatgagagtctgcagagcttgaaggccagaatccaacaggacacgggcatcccagaggaggaccaggagctgctgcaggaagcgggcctggcgttgatccccgataagcctgccactcagtgtatttcagacggcaagttaaatgagggccacacattggacatggatcttgtttttctctttgacaacagtaaaatcacctatgagactcagatctccccacggccccaacctgaaagtgtcagctgtatccttcaagagcccaagaggaatctcgccttcttccagctgaggaaggtgtggggccaggtctggcacagcatccagaccctgaaggaagattgcaaccggctgcagcagggacagcgagccgccatgatgaatctcctccgaaacaacagctgcctctccaaaatgaagaattccatggcttccatgtctcagcagctcaaggccaagttggatttcttcaaaaccagcatccagattgacctggagaagtacagcgagcaaaccgagtttgggatcacatcagataaactgctgctggcctggagggaaatggagcaggctgtggagctctgtgggcgggagaacgaagtgaaactcctggtagaacggatgatggctctgcagaccgacattgtggacttacagaggagccccatgggccggaagcaggggggaacgctggacgacctagaggagcaagcaagggagctgtacaggagactaagggaaaaacctcgagaccagcgaactgagggtgacagtcaggaaatggtacggctgctgcttcaggcaattcagagcttcgagaagaaagtgcgagtgatctatacgcagctcagtaaaactgtggtttgcaagcagaaggcgctggaactgttgcccaaggtggaagaggtggtgagcttaatgaatgaggatgagaagactgttgtccggctgcaggagaagcggcagaaggagctctggaatctcctgaagattgcttgtagcaaggtccgtggtcctgtcagtggaagcccggatagcatgaatgcctctcgacttagccagcctgggcagctgatgtctcagccctccacggcctccaacagcttacctgagccagccaagaagagtgaagaactggtggctgaagcacataacctctgcaccctgctagaaaatgccatacaggacactgtgagggaacaagaccagagtttcacggccctagactggagctggttacagacggaagaagaagagcacagctgcctggagcaggcctcatgatgtggggggactcgaccccctgacatggggcagcccatagcaggccttgtgcagtggggggactcgaccccctgacatggggctgcctggagcaggccgcgtgacgtggggctgcctggccgcggctctcacatggtggttcctgctgcactgatggcccaggggtctctggtatccagatggagctctcgcttcctcagcagctgtgactttcacccaggacccaggacgcagccctccgtgggcactgccggcgccttgtctgcacactggaggtcctccattacagaggcccagcgcacatcgctggccccacaaacgttcaggggtacagccatggcagctccttcctctgccgtgagaaaagtgcttggagtacggtttgccacacacgtgactggacagtgtccaattcaaatctttcagggcagagtccgagcagcgcttggtgacagcctgtcctctcctgctctccaaaggccctgctccctgtcctctctcactttacagcttgtgtttcttctggattcagcttctcctaaacagacagtttaattatagttgcggcctggccccatcctcacttcctctttttatttcactgctgctaaaattgtgtttttacctactactttggtggttgtcctcttttcggcaaagttggagcgagtgccaagctctccatctgtggtcctttctgccaagagcgactcatagtaaccaggatgggagagcagctgccttattctgaatcccaaaaattacttgggggtgattgtcacagaggagggacagaaagggtatctgctgaccaccagcctgcctacccatgcccatgtctccattcctgctcaagcgtgtgtgctgggccggggagtccctgtctctcacagcatctagcagtattattaaatggattcattttaaaaatagctcctatattttgtaacatgtctcaaacactcatactgggttccacaatccactgttagaatacctatggttagggcttctgaactaaaataatggaaaattttaacaatttgtatagtgcctggatcattactagtgccataaccctgcttcttcaacatttcacagaacttctcttttatataaaggcaagagcacaaaatgagttcagatgatcacaaacaggtgagttttgttggagaagaaagttggagtaggagactttcacaagtggtttccatggagatagaatgaagcattctgtggtcaagtaagtttagggagctattcatgtttcacttgctttgtggagattcacactatgcactgggaaagtatctgaaaagtcttataataaagaaacaggcttaactttgtgtaagaacactgtttatcaatgtcatttggctatagaaacattttctcctgctgattgtgtgtgtgaaacatgtattaacattccaatgaactagcatttaataaagcacaattttggaaa

SEQ ID NO: 142666 - DNA, 4036 bp, Homo sapiens
  Payload ID: 8194
  Gene Symbol: IKBKB
  Gene Name: inhibitor of kappa light polypeptide gene enhancer in B-cells, kinase beta
  Uniprot ID: O14920
  ENST ID: ENST00000416505
  CDS Start-End: 269-2362
gtgacgtcagagcaggaagtgtttgaggaagtcgcgccgcgctgcccgcgttaagattcccgcattttaatgttttcaggggggtgtcatagccccgggtttggccgccccagccccgccttccccgccccggggagcccgccccctgccccgcgtccctgccgacagagttagcacgacatcagtatgagctggtcaccttccctgacaacgcagacatgtggggcctgggaaatgaaagagcgccttgggacagggggatttggaaatgtcatccgatggcacaatcaggctgacccaccccaatgtggtggctgcccgagatgtccctgaggggatgcagaacttggcgcccaatgacctgcccctgctggccatggagtactgccaaggaggagatctccggaagtacctgaaccagtttgagaactgctgtggtctgcgggaaggtgccatcctcaccttgctgagtgacattgcctctgcgcttagataccttcatgaaaacagaatcatccatcgggatctaaagccagaaaacatcgtcctgcagcaaggagaacagaggttaatacacaaaattattgacctaggatatgccaaggagctggatcagggcagtctttgcacatcattcgtggggaccctgcagtacctggccccagagctactggagcagcagaagtacacagtgaccgtcgactactggagcttcggcaccctggcctttgagtgcatcacgggcttccggcccttcctccccaactggcagcccgtgcagtggcattcaaaagtgcggcagaagagtgaggtggacattgttgttagcgaagacttgaatggaacggtgaagttttcaagctctttaccctaccccaataatcttaacagtgtcctggctgagcgactggagaagtggctgcaactgatgctgatgtggcacccccgacagaggggcacggatcccacgtatgggcccaatggctgcttcaaggccctggatgacatcttaaacttaaagctggttcatatcttgaacatggtcacgggcaccatccacacctaccctgtgacagaggatgagagtctgcagagcttgaaggccagaatccaacaggacacgggcatcccagaggaggaccaggagctgctgcaggaagcgggcctggcgttgatccccgataagcctgccactcagtgtatttcagacggcaagttaaatgagggccacacattggacatggatcttgtttttctctttgacaacagtaaaatcacctatgagactcagatctccccacggccccaacctgaaagtgtcagctgtatccttcaagagcccaagaggaatctcgccttcttccagctgaggaaggtgtggggccaggtctggcacagcatccagaccctgaaggaagattgcaaccggctgcagcagggacagcgagccgccatgatgaatctcctccgaaacaacagctgcctctccaaaatgaagaattccatggcttccatgtctcagcagctcaaggccaagttggatttcttcaaaaccagcatccagattgacctggagaagtacagcgagcaaaccgagtttgggatcacatcagataaactgctgctggcctggagggaaatggagcaggctgtggagctctgtgggcgggagaacgaagtgaaactcctggtagaacggatgatggctctgcagaccgacattgtggacttacagaggagccccatgggccggaagcaggggggaacgctggacgacctagaggagcaagcaagggagctgtacaggagactaagggaaaaacctcgagaccagcgaactgagggtgacagtcaggaaatggtacggctgctgcttcaggcaattcagagcttcgagaagaaagtgcgagtgatctatacgcagctcagtaaaactgtggtttgcaagcagaaggcgctggaactgttgcccaaggtggaagaggtggtgagcttaatgaatgaggatgagaagactgttgtccggctgcaggagaagcggcagaaggagctctggaatctcctgaagattgcttgtagcaaggtccgtggtcctgtcagtggaagcccggatagcatgaatgcctctcgacttagccagcctgggcagctgatgtctcagccctccacggcctccaacagcttacctgagccagccaagaagagtgaagaactggtggctgaagcacataacctctgcaccctgctagaaaatgccatacaggacactgtgagggaacaagaccagagtttcacggccctagactggagctggttacagacggaagaagaagagcacagctgcctggagcaggcctcatgatgtggggggactcgaccccctgacatggggcagcccatagcaggccttgtgcagtggggggactcgaccccctgacatggggctgcctggagcaggccgcgtgacgtggggctgcctggccgcggctctcacatggtggttcctgctgcactgatggcccaggggtctctggtatccagatggagctctcgcttcctcagcagctgtgactttcacccaggacccaggacgcagccctccgtgggcactgccggcgccttgtctgcacactggaggtcctccattacagaggcccagcgcacatcgctggccccacaaacgttcaggggtacagccatggcagctccttcctctgccgtgagaaaagtgcttggagtacggtttgccacacacgtgactggacagtgtccaattcaaatctttcagggcagagtccgagcagcgcttggtgacagcctgtcctctcctgctctccaaaggccctgctccctgtcctctctcactttacagcttgtgtttcttctggattcagcttctcctaaacagacagtttaattatagttgcggcctggccccatcctcacttcctctttttatttcactgctgctaaaattgtgtttttacctactactttggtggttgtcctcttttcggcaaagttggagcgagtgccaagctctccatctgtggtcctttctgccaagagcgactcatagtaaccaggatgggagagcagctgccttattctgaatcccaaaaattacttgggggtgattgtcacagaggagggacagaaagggtatctgctgaccaccagcctgcctacccatgcccatgtctccattcctgctcaagcgtgtgtgctgggccggggagtccctgtctctcacagcatctagcagtattattaaatggattcattttaaaaatagctcctatattttgtaacatgtctcaaacactcatactgggttccacaatccactgttagaatacctatggttagggcttctgaactaaaataatggaaaattttaacaatttgtatagtgcctggatcattactagtgccataaccctgcttcttcaacatttcacagaacttctcttttatataaaggcaagagcacaaaatgagttcagatgatcacaaacaggtgagttttgttggagaagaaagttggagtaggagactttcacaagtggtttccatggagatagaatgaagcattctgtggtcaagtaagtttagggagctattcatgtttcacttgctttgtggagattcacactatgcactgggaaagtatctgaaaagtcttataataaagaaacaggcttaactttgtgtaagaacactgtttatcaatgtcatttggctatagaaacattttctcctgctgattgtgtgtgtgaaacatgtattaacattccaatgaactagcatttaataaagcacaattttggaaaccctggtaaatgacagtgggaaataacacccgaaaggcaaggacgggcagattggggagggaaaggatgttgggctaagggctgtgagcttatgttacaggcaactgagccactgaagaattttgacgaagaaaatgccaaccaaagcagtcattttaaaagtttatggctgttcagttacaggacaagttgtgaaaagaaag

SEQ ID NO: 142667 - DNA, 447 bp, Homo sapiens
  Payload ID: 8194
  Gene Symbol: IKBKB
  Gene Name: inhibitor of kappa light polypeptide gene enhancer in B-cells, kinase beta
  ENST ID: ENST00000518983
  CDS Start-End: 119-349
aatgttttcaggggggtgtcatagccccgggtttggccgccccagccccgccttccccgccccggggagcccgccccctgccccgcgtccctgccgacagagttagcacgacatcagtatgagctggtcaccttccctgacaacgcagacatgtggggcctgggaaatgaaagagcgccttgggacagggggatttggaaatgtcatccgatggcacaatcaggtaggccctctgtgcagcttggggaggggcggggagccaggccccctcctcactgcctccactttctctgatcctgctgggccaagggctcacctttggctttggtcatcttgggacagtgaatagggggactgggaagagggcttcaggacttctgagctgactccaggttagtggtctccatgctttattgactatgtcacctaaataaatagtaaaataaa

SEQ ID NO: 142668 - DNA, 2196 bp, Homo sapiens
  Payload ID: 8194
  Gene Symbol: IKBKB
  Gene Name: inhibitor of kappa light polypeptide gene enhancer in B-cells, kinase beta
  ENST ID: ENST00000521661
  CDS Start-End: 53-1741
gagcccgccccctgccccgcgtccctgccgacagagttagcacgacatcagtatgagctggtcaccttccctgacaacgcagacatgtggggcctgggaaatgaaagagcgccttgggacagggggatttggaaatgtcatccgatggcacaatcaggaaacaggtgagcagattgccatcaagcagtgccggcaggagctcagcccccggaaccgagagcggtggtgcctggagatccagatcatgagaaggctgacccaccccaatgtggtggctgcccgagatgtccctgaggggatgcagaacttggcgcccaatgacctgcccctgctggccatggagtactgccaaggaggagatctccggaagtacctgaaccagtttgagaactgctgtggtctgcgggaaggtgccatcctcaccttgctgagtgacattgcctctgcgcttagataccttcatgaaaacagaatcatccatcgggatctaaagccagaaaacatcgtcctgcagcaaggagaacagaggttaatacacaaaattattgacctaggatatgccaaggagctggatcagggcagtctttgcacatcattcgtggggaccctgcagtacctggccccagagctactggagcagcagaagtacacagtgaccgtcgactactggagcttcggcaccctggcctttgagtgcatcacgggcttccggcccttcctccccaactggcagcccgtgcagtggcattcaaaagtgcggcagaagagtgaggtggacattgttgttagcgaagacttgaatggaacggtgaagttttcaagctctttaccctaccccaataatcttaacagtgtcctggctgagcgactggagaagtggctgcaactgatgctgatgtggcacccccgacagaggggcacggatcccacgtatgggcccaatggctgcttcaaggccctggatgacatcttaaacttaaagctggttcatatcttgaacatggtcacgggcaccatccacacctaccctgtgacagaggatgagagtctgcagagcttgaaggccagaatccaacaggacacgggcatcccagaggaggaccaggagctgctgcaggaagcgggcctggcgttgatccccgataagcctgccactcagtgtatttcagacggcaagttaaatgagggccacacattggacatggatcttgtttttctctttgacaacagtaaaatcacctatgagactcagatctccccacggccccaacctgaaagtgtcagctgtatccttcaagagcccaagaggaatctcgccttcttccagctgaggaaggtgtggggccaggtctggcacagcatccagaccctgaaggaagattgcaaccggctgcagcagggacagcgagccgccatgatgaatctcctccgaaacaacagctgcctctccaaaatgaagaattccatggcttccatgtctcagcagctcaaggccaagttggatttcttcaaaaccagcatccagattgacctggagaagtacagcgagcaaaccgagtttgggatcagagaacgaagtgaaactcctggtagaacggatgatggctctgcagaccgacattgtggacttacagaggagccccatgggccggaagcaggggggaacgctggacgacctagaggagcaagcaagggagctgtacaggagactaagggaaaaacctcgagaccagcgaactgagggtgacagtcaggaaatggtacggctgctgcttcaggcaattcagagcttcgagaagaaagtgcgagtgatctatacgcagctcagtaaaactgtggtttgcaagcagaaggcgctggaactgttgcccaaggtggaagaggtggtgagcttaatgaatgaggatgagaagactgttgtccggctgcaggagaagcggcagaaggagctctggaatctcctgaagattgcttgtagcaaggtccgtggtcctgtcagtggaagcccggatagcatgaatgcctctcgacttagccagcctgggcagctgatgtctcagccctccacggcctccaacagcttacctgagccagccaagaagagtgaagaactggtggctgaagcacataacctctgcaccctgctagaaaatgccatacaggacactgtgagggaacaagaccagagtttcacgg

SEQ ID NO: 142669 - DNA, 2501 bp, Homo sapiens
  Payload ID: 8194
  Gene Symbol: IKBKB
  Gene Name: inhibitor of kappa light polypeptide gene enhancer in B-cells, kinase beta
  ENST ID: ENST00000517890
  CDS Start-End: 173-319
ggaagtgtttgaggaagtcgcgccgcgctgcccgcgttaagattcccgcattttaatgttttcaggggggtgtcatagccccgggtttggccgccccagccccgccttccccgccccggggagcccgccccctgccccgcgtccctgccgacagagttagcacgacatcagtatgagctggtcaccttccctgacaacgcagacatgtggggcctgggaaatgaaagagcgccttgggacagggggatttggaaatgtcatccgatggcacaatcaggctgacccaccccaatgtggtggctgcccgagatgtccctgaggggatgcagaacttggcgcccaatgacctgcccctgctggccatggagtactgccaaggaggagatctccggaagtacctgaaccagtttgagaactgctgtggtctgcgggaaggtgccatcctcaccttgctgagtgacattgcctctgcgcttagataccttcatgaaaacagaatcatccatcgggatctaaagccagaaaacatcgtcctgcagcaaggagaacagaggttaatacacaaaattattgacctaggatatgccaaggagctggatcagggcagtctttgcacatcattcgtggggaccctgcagtacctggccccagagctactggagcagcagaagtacacagtgaccgtcgactactggagcttcggcaccctggcctttgagtgcatcacgggcttccggcccttcctccccaactggcagcccgtgcagtggcattcaaaagtgcggcagaagagtgaggtggacattgttgttagcgaagacttgaatggaacggtgaagttttcaagctctttaccctaccccaataatcttaacagtgtcctggctgagcgactggagaagtggctgcaactgatgctgatgtggcacccccgacagaggggcacggatcccacgtatgggcccaatggctgcttcaaggccctggatgacatcttaaacttaaagctggttcatatcttgaacatggtcacgggcaccatccacacctaccctgtgacagaggatgagagtctgcagagcttgaaggccagaatccaacaggacacgggcatcccagaggaggaccaggagctgctgcaggaagcgggcctggcgttgatccccgataagcctgccactcagtgtatttcagacggcaagttaaatgagggccacacattggacatggatcttgtttttctctttgacaacagtaaaatcacctatgagactcagatctccccacggccccaacctgaaagtgtcagctgtatccttcaagagcccaagaggaatctcgccttcttccagctgaggaaggtgtggggccaggtctggcacagcatccagaccctgaaggaagattgcaaccggctgcagcagggacagcgagccgccatgatgaatctcctccgaaacaacagctgcctctccaaaatgaagaattccatggcttccatgtctcagcagctcaaggccaagttggatttcttcaaaaccagcatccagattgacctggagaagtacagcgagcaaaccgagtttgggatcacatcagataaactgctgctggcctggagggaaatggagcaggctgtggagctctgtgggcgggagaacgaagtgaaactcctggtagaacggatgatggctctgcagaccgacattgtggacttacagaggagccccatgggccggaagcaggggggaacgctggacgacctagaggagcaagcaagggagctgtacaggagactaagggaaaaacctcgagaccagcgaactgagggtgacagtcaggaaatggtacggctgctgcttcaggcaattcagagcttcgagaagaaagtgcgagtgatctatacgcagctcagtaaaactgtggtttgcaagcagaaggcgctggaactgttgcccaaggtggaagaggtggtgagcttaatgaatgaggatgagaagactgttgtccggctgcaggagaagcggcagaaggagctctggaatctcctgaagattgcttgtagcaaggtccgtggtcctgtcagtggaagcccggatagcatgaatgcctctcgacttagccagcctgggcagctgatgtctcagccctccacggcctccaacagcttacctgagccagccaagaagagtgaagaactggtggctgaagcacataacctctgcaccctgctagaaaatgccatacaggacactgtgagggaacaagaccagagtttcacggccctagactggagctggttacagacggaagaagaagagcacagctgcctggagcaggcctcatgatgtggggggactcgaccccctgacatggggcagcccatagcaggccttgtgcagtggggggactcgaccccctgacatggggctgcctggagcaggccgcgtgacgtggggctgcctggccgcggctctcacatggtggttcctgctgcactg

SEQ ID NO: 142670 - DNA, 954 bp, Homo sapiens
  Payload ID: 8194
  Gene Symbol: IKBKB
  Gene Name: inhibitor of kappa light polypeptide gene enhancer in B-cells, kinase beta
  ENST ID: ENST00000522147
  CDS Start-End: 19-348
agttagcacgacatcagtatgagctggtcaccttccctgacaacgcagacatgtggggcctgggaaatgaaagagcgccttgggacagggggatttggaaatgtcatccgatggcacaatcaggacgcagccctccgtgggcactgccggcgccttgtctgcacactggaggtcctccattacagaggcccagcgcacatcgctggccccacaaacgttcaggggtacagccatggcagctccttcctctgccgtgagaaaagtgcttggagtacggtttgccacacacgtgactggacagtgtccaattcaaatctttcagggcagagtccgagcagcgcttggtgacagcctgtcctctcctgctctccaaaggccctgctccctgtcctctctcactttacagcttgtgtttcttctggattcagcttctcctaaacagacagtttaattatagttgcggcctggccccatcctcacttcctctttttatttcactgctgctaaaattgtgtttttacctactactttggtggttgtcctcttttcggcaaagttggagcgagtgccaagctctccatctgtggtcctttctgccaagagcgactcatagtaaccaggatgggagagcagctgccttattctgaatcccaaaaattacttgggggtgattgtcacagaggagggacagaaagggtatctgctgaccaccagcctgcctacccatgcccatgtctccattcctgctcaagcgtgtgtgctgggccggggagtccctgtctctcacagcatctagcagtattattaaatggattcattttaaaaatagctcctatattttgtaacatgtctcaaacactcatactgggttccacaatccactgttagaatacctatggttagggcttctgaactaaaataatggaaaattttaacaatttgtatagtgcctgg

SEQ ID NO: 142671 - DNA, 3777 bp, Homo sapiens
  Payload ID: 8194
  Gene Symbol: IKBKB
  Gene Name: inhibitor of kappa light polypeptide gene enhancer in B-cells, kinase beta
  ENST ID: ENST00000520655
  CDS Start-End: 639-2327
ccgacaggtgagtccccctcgtgggtgcggcccgggtgccacctgcaggccccgccgccccgctgcctgcaaggcccggaagacccctctgtgccgctgggaagtcgcagcttgcggactggggagcgtttcacttgtgcgggttggagttcgggaagccgggagaaacagctctccctggggtggcttcttgggggtgggtggctttgaggggaacctgcgatttatgggaacattgtaaagaaacacgtgacctcggcgatgctcagaagtaggttctgcccctgccacctcgggcagaaggcgggcaggcccgggcgcccctggtggagtcagctggggatcccctcgctagggcaagggcgtgggcatcgcctccctcggtgactttcttccttgcctgatgccacagcaaccggatgggggagggtgagagggacaaaagtttgccacaaagtttggaccaaccaaacacattggtttctttacaaaataaaaaaccagttgtatttttcttctctcccattcaagagcagtggtatctcttgccttctccatccctttgagctccatttttttcttaatcctaaccttttttccccatcccaaattgcttatagagttagcacgacatcagtatgagctggtcaccttccctgacaacgcagacatgtggggcctgggaaatgaaagagcgccttgggacagggggatttggaaatgtcatccgatggcacaatcaggaaacaggtgagcagattgccatcaagcagtgccggcaggagctcagcccccggaaccgagagcggtggtgcctggagatccagatcatgagaaggctgacccaccccaatgtggtggctgcccgagatgtccctgaggggatgcagaacttggcgcccaatgacctgcccctgctggccatggagtactgccaaggaggagatctccggaagtacctgaaccagtttgagaactgctgtggtctgcgggaaggtgccatcctcaccttgctgagtgacattgcctctgcgcttagataccttcatgaaaacagaatcatccatcgggatctaaagccagaaaacatcgtcctgcagcaaggagaacagaggttaatacacaaaattattgacctaggatatgccaaggagctggatcagggcagtctttgcacatcattcgtggggaccctgcagtacctggccccagagctactggagcagcagaagtacacagtgaccgtcgactactggagcttcggcaccctggcctttgagtgcatcacgggcttccggcccttcctccccaactggcagcccgtgcagtggcattcaaaagtgcggcagaagagtgaggtggacattgttgttagcgaagacttgaatggaacggtgaagttttcaagctctttaccctaccccaataatcttaacagtgtcctggctgagcgactggagaagtggctgcaactgatgctgatgtggcacccccgacagaggggcacggatcccacgtatgggcccaatggctgcttcaaggccctggatgacatcttaaacttaaagctggttcatatcttgaacatggtcacgggcaccatccacacctaccctgtgacagaggatgagagtctgcagagcttgaaggccagaatccaacaggacacgggcatcccagaggaggaccaggagctgctgcaggaagcgggcctggcgttgatccccgataagcctgccactcagtgtatttcagacggcaagttaaatgagggccacacattggacatggatcttgtttttctctttgacaacagtaaaatcacctatgagactcagatctccccacggccccaacctgaaagtgtcagctgtatccttcaagagcccaagaggaatctcgccttcttccagctgaggaaggtgtggggccaggtctggcacagcatccagaccctgaaggaagattgcaaccggctgcagcagggacagcgagccgccatgatgaatctcctccgaaacaacagctgcctctccaaaatgaagaattccatggcttccatgtctcagcagctcaaggccaagttggatttcttcaaaaccagcatccagattgacctggagaagtacagcgagcaaaccgagtttgggatcagagaacgaagtgaaactcctggtagaacggatgatggctctgcagaccgacattgtggacttacagaggagccccatgggccggaagcaggggggaacgctggacgacctagaggagcaagcaagggagctgtacaggagactaagggaaaaacctcgagaccagcgaactgagggtgacagtcaggaaatggtacggctgctgcttcaggcaattcagagcttcgagaagaaagtgcgagtgatctatacgcagctcagtaaaactgtggtttgcaagcagaaggcgctggaactgttgcccaaggtggaagaggtggtgagcttaatgaatgaggatgagaagactgttgtccggctgcaggagaagcggcagaaggagctctggaatctcctgaagattgcttgtagcaaggtccgtggtcctgtcagtggaagcccggatagcatgaatgcctctcgacttagccagcctgggcagctgatgtctcagccctccacggcctccaacagcttacctgagccagccaagaagagtgaagaactggtggctgaagcacataacctctgcaccctgctagaaaatgccatacaggacactgtgagggaacaagaccagagtttcacggccctagactggagctggttacagacggaagaagaagagcacagctgcctggagcaggcctcatgatgtggggggactcgaccccctgacatggggcagcccatagcaggccttgtgcagtggggggactcgaccccctgacatggggctgcctggagcaggccgcgtgacgtggggctgcctggccgcggctctcacatggtggttcctgctgcactgatggcccaggggtctctggtatccagatggagctctcgcttcctcagcagctgtgactttcacccaggacccaggacgcagccctccgtgggcactgccggcgccttgtctgcacactggaggtcctccattacagaggcccagcgcacatcgctggccccacaaacgttcaggggtacagccatggcagctccttcctctgccgtgagaaaagtgcttggagtacggtttgccacacacgtgactggacagtgtccaattcaaatctttcagggcagagtccgagcagcgcttggtgacagcctgtcctctcctgctctccaaaggccctgctccctgtcctctctcactttacagcttgtgtttcttctggattcagcttctcctaaacagacagtttaattatagttgcggcctggccccatcctcacttcctctttttatttcactgctgctaaaattgtgtttttacctactactttggtggttgtcctcttttcggcaaagttggagcgagtgccaagctctccatctgtggtcctttctgccaagagcgactcatagtaaccaggatgggagagcagctgccttattctgaatcccaaaaattacttgggggtgattgtcacagaggagggacagaaagggtatctgctgaccaccagcctgcctacccatgcccatgtctccattcctgctcaagcgtgtgtgctgggccggggagtccctgtctctcacagcatctagcagtattattaaatggattcattttaaaaa

SEQ ID NO: 142672 - DNA, 1966 bp, Homo sapiens
  Payload ID: 8194
  Gene Symbol: IKBKB
  Gene Name: inhibitor of kappa light polypeptide gene enhancer in B-cells, kinase beta
  ENST ID: ENST00000523105
  CDS Start-End: 171-317
aagtgtttgaggaagtcgcgccgcgctgcccgcgttaagattcccgcattttaatgttttcaggggggtgtcatagccccgggtttggccgccccagccccgccttccccgccccggggagcccgccccctgccccgcgtccctgccgacagagttagcacgacatcagtatgagctggtcaccttccctgacaacgcagacatgtggggcctgggaaatgaaagagcgccttgggacagggggatttggaaatgtcatccgatggcacaatcaggctgacccaccccaatgtggtggctgcccgagatgtccctgaggggatgcagaacttggcgcccaatgacctgcccctgctggccatggagtactgccaaggaggagatctccggaagtacctgaaccagtttgagaactgctgtggtctgcgggaaggtgccatcctcaccttgctgagtgacattgcctctgcgcttagataccttcatgaaaacagaatcatccatcgggatctaaagccagaaaacatcgtcctgcagcaaggagaacagaggttaatacacaaaattattgacctaggatatgccaaggagctggatcagggcagtctttgcacatcattcgtggggaccctgcagtacctggccccagagctactggagcagcagaagtacacagtgaccgtcgactactggagcttcggcaccctggcctttgagtgcatcacgggcttccggcccttcctccccaactggcagcccgtgcagtggcattcaaaagtgcggcagaagagtgaggtggacattgttgttagcgaagacttgaatggaacggtgaagttttcaagctctttaccctaccccaataatcttaacagtgtcctggctgagcgactggagaagtggctgcaactgatgctgatgtggcacccccgacagaggggcacggatcccacgtatgggcccaatggctgcttcaaggccctggatgacatcttaaacttaaagctggttcatatcttgaacatggtcacgggcaccatccacacctaccctgtgacagaggatgagagtctgcagagcttgaaggccagaatccaacaggacacgggcatcccagaggaggaccaggagctgctgcaggaagcgggcctggcgttgatccccgataagcctgccactcagtgtatttcagacggcaagttaaatgagggccacacattggacatggatcttgtttttctctttgacaacagtaaaatcacctatgagactcagatctccccacggccccaacctgaaagtgtcagctgtatccttcaagagcccaagaggaatctcgccttcttccagctgaggaaggtgtggggccaggtctggcacagcatccagaccctgaaggaagattgcaaccggctgcagcagggacagcgagccgccatgatgaatctcctccgaaacaacagctgcctctccaaaatgaagaattccatggcttccatgtctcagcagctcaaggccaagttggatttcttcaaaaccagcatccagattgacctggagaagtacagcgagcaaaccgagtttgggatcagagaacgaagtgaaactcctggtagaacggatgatggctctgcagaccgacattgtggacttacagaggagccccatgggccggaagcaggggggaacgctggacgacctagaggagcaagcaagggagctgtacaggagactaagggaaaaacctcgagaccagcgaactgagggtgacagtcaggaaatggtacggctgctgcttcaggcaattcagagcttcgagaagaaagtgcgagtgatctatacgcagctcagtaaaactgtggtttgcaagcagaaggcgctggaactgttgcccaaggtggaagaggtggtgagcttaatgaatgaggatgagaagactgttgtccggctgcaggagaagcggcag

SEQ ID NO: 142673 - DNA, 527 bp, Homo sapiens
  Payload ID: 8194
  Gene Symbol: IKBKB
  Gene Name: inhibitor of kappa light polypeptide gene enhancer in B-cells, kinase beta
  ENST ID: ENST00000519733
  CDS Start-End: 171-326
aagtgtttgaggaagtcgcgccgcgctgcccgcgttaagattcccgcattttaatgttttcaggggggtgtcatagccccgggtttggccgccccagccccgccttccccgccccggggagcccgccccctgccccgcgtccctgccgacagagttagcacgacatcagtatgagctggtcaccttccctgacaacgcagacatgtggggcctgggaaatgaaagagcgccttgggacagggggatttggaaatgtcatccgatggcacaatcagcctctgcgcttagataccttcatgaaaacagaatcatccatcgggatctaaagccagaaaacatcgtcctgcagcaaggagaacagagggatatgccaaggagctggatcagggcagtctttgcacatcattcgtggggaccctgcagtacctggccccagagctactggagcagcagaagtacacagtgaccgtcgactactggagcttcggcaccctggcctttgagtgcatcacgggcttccggccctt

SEQ ID NO: 142674 - DNA, 523 bp, Homo sapiens
  Payload ID: 8194
  Gene Symbol: IKBKB
  Gene Name: inhibitor of kappa light polypeptide gene enhancer in B-cells, kinase beta
  ENST ID: ENST00000517812
  CDS Start-End: 181-327
gcttgcggactggggagcgtttcacttgtgcgggttggagttcgggaagccgggagaaacagctctccctggggtggcttcttgggggtgggtggctttgaggggaacctgcgatttatgggaacattgtaaagaaacacgtgacctcggcgatgctcagaaagttagcacgacatcagtatgagctggtcaccttccctgacaacgcagacatgtggggcctgggaaatgaaagagcgccttgggacagggggatttggaaatgtcatccgatggcacaatcaggctgacccaccccaatgtggtggctgcccgagatgtccctgaggggatgcagaacttggcgcccaatgacctgcccctgctggccatggagtactgccaaggaggagatctccggaagtacctgaaccagtttgagaactgctgtggtctgcgggaaggtgccatcctcaccttgctgagtgacattgcctctgcgcttagataccttcatgaaaacagaatcatccatcgggatcta

SEQ ID NO: 142675 - DNA, 628 bp, Homo sapiens
  Payload ID: 8194
  Gene Symbol: IKBKB
  Gene Name: inhibitor of kappa light polypeptide gene enhancer in B-cells, kinase beta
  ENST ID: ENST00000520320
  CDS Start-End: 179-325
agagcaggaagtgtttgaggaagtcgcgccgcgctgcccgcgttaagattcccgcattttaatgttttcaggggggtgtcatagccccgggtttggccgccccagccccgccttccccgccccggggagcccgccccctgccccgcgtccctgccgacagagttagcacgacatcagtatgagctggtcaccttccctgacaacgcagacatgtggggcctgggaaatgaaagagcgccttgggacagggggatttggaaatgtcatccgatggcacaatcaggctgacccaccccaatgtggtggctgcccgagatgtccctgaggggatgcagaacttggcgcccaatgacctgcccctgctggccatggagtactgccaaggaggagatctccggaagtacctgaaccagtttgagaactgctgtggtctgcgggaaggtgccatcctcaccttgctgagtgacattggtaaatcccagtcccggaattcaggccgtgtccttcagggagagtgtggtgcccctcctctgcgcttagataccttcatgaaaacagaatcatccatcgggatctaaagccagaaaacatcgtcctgcagcaaggagaacagaggttaatacacaaa

SEQ ID NO: 142676 - DNA, 577 bp, Homo sapiens
  Payload ID: 8194
  Gene Symbol: IKBKB
  Gene Name: inhibitor of kappa light polypeptide gene enhancer in B-cells, kinase beta
  ENST ID: ENST00000517388
  CDS Start-End: 99-245
atagccccgggtttggccgccccagccccgccttccccgccccggggagcccgccccctgccccgcgtccctgccgacagagttagcacgacatcagtatgagctggtcaccttccctgacaacgcagacatgtggggcctgggaaatgaaagagcgccttgggacagggggatttggaaatgtcatccgatggcacaatcaggctgacccaccccaatgtggtggctgcccgagatgtccctgaggggatgcagaacttggcgcccaatgacctgcccctgctggccatggagtactgccaaggaggagatctccggaagtacctgaaccagtttgagaactgctgtggtctgcgggaaggtgccatcctcaccttgctgagtgacattgcctctgcgcttagataccttcatgaaaacagaatcatccatcgggatctaaagccagaaaacatcgtcctgcagcaaggagaacagagggatatgccaaggagctggatcagggcagtctttgcacatcattcgtggggaccctgcagtacctggccccagagctactggagcagcagaagtacac

SEQ ID NO: 142677 - DNA, 2378 bp, Homo sapiens
  Payload ID: 8194
  Gene Symbol: IKBKB
  Gene Name: inhibitor of kappa light polypeptide gene enhancer in B-cells, kinase beta
  ENST ID: ENST00000523517
  CDS Start-End: 19-1146
agttagcacgacatcagtatgagctggtcaccttccctgacaacgcagacatgtggggcctgggaaatgaaagagcgccttgggacagggggatttggaaatgtcatccgatggcacaatcaggaaacaggtgagcagattgccatcaagcagtgccggcaggagctcagcccccggaaccgagagcggtggtgcctggagatccagatcatgagaaggctgacccaccccaatgtggtggctgcccgagatgtccctgaggggatgcagaacttggcgcccaatgacctgcccctgctggccatggagtactgccaaggaggagatctccggaagtacctgaaccagtttgagaactgctgtggtctgcgggaaggtgccatcctcaccttgctgagtgacattgcctctgcgcttagataccttcatgaaaacagaatcatccatcgggatctaaagccagaaaacatcgtcctgcagcaaggagaacagaggttaatacacaaaattattgacctaggatatgccaaggagctggatcagggcagtctttgcacatcattcgtggggaccctgcagtacctggccccagagctactggagcagcagaagtacacagtgaccgtcgactactggagcttcggcaccctggcctttgagtgcatcacgggcttccggcccttcctccccaactggcagcccgtgcagtggcattcaaaagtgcggcagaagagtgaggtggacattgttgttagcgaagacttgaatggaacggtgaagttttcaagctctttaccctaccccaataatcttaacagtgtcctggctgagcgactggagaagtggctgcaactgatgctgatgtggcacccccgacagaggggcacggatcccacgtatgggcccaatggctgcttcaaggccctggatgacatcttaaacttaaagctggttcatatcttgaacatggtcacgggcaccatccacacctaccctgtgacagaggatgagagtctgcagagcttgaaggccagaatccaacaggacacgggcatcccagaggaggaccaggagctgctgcaggaagcgggcctggcgttgatccccgataagcctgccactcagtgtatttcagacggcaagtaaaatcacctatgagactcagatctccccacggccccaacctgaaagtgtcagctgtatccttcaagagcccaagaggaatctcgccttcttccagctgaggaaggtgtggggccaggtctggcacagcatccagaccctgaaggaagattgcaaccggctgcagcagggacagcgagccgccatgatgaatctcctccgaaacaacagctgcctctccaaaatgaagaattccatggcttccatgtctcagcagctcaaggccaagttggatttcttcaaaaccagcatccagattgacctggagaagtacagcgagcaaaccgagtttgggatcacatcagataaactgctgctggcctggagggaaatggagcaggctgtggagctctgtgggcgggagaacgaagtgaaactcctggtagaacggatgatggctctgcagaccgacattgtggacttacagaggagccccatgggccggaagcaggggggaacgctggacgacctagaggagcaagcaagggagctgtacaggagactaagggaaaaacctcgagaccagcgaactgagggtgacagtcaggaaatggtacggctgctgcttcaggcaattcagagcttcgagaagaaagtgcgagtgatctatacgcagctcagtaaaactgtggtttgcaagcagaaggcgctggaactgttgcccaaggtggaagaggtggtgagcttaatgaatgaggatgagaagactgttgtccggctgcaggagaagcggcagaaggagctctggaatctcctgaagattgcttgtagcaaggtccgtggtcctgtcagtggaagcccggatagcatgaatgcctctcgacttagccagcctgggcagctgatgtctcagccctccacggcctccaacagcttacctgagccagccaagaagagtgaagaactggtggctgaagcacataacctctgcaccctgctagaaaatgccatacaggacactgtgagggaacaagaccagagtttcacggccctagactggagctggttacagacggaagaagaagagcacagctgcctggagcaggcctcatgatgtggggggactcgaccccctgacatggggcagcccatagcaggccttgtgcagtggggggactcgaccccctgacatggggctgcctggagcaggccgcgtgacgtggggctgcctggccgcggctctcacatggtggttc

SEQ ID NO: 142678 - DNA, 1166 bp, Homo sapiens
  Payload ID: 8194
  Gene Symbol: IKBKB
  Gene Name: inhibitor of kappa light polypeptide gene enhancer in B-cells, kinase beta
  Uniprot ID: O14920
  ENST ID: ENST00000519735
  CDS Start-End: 171-941
aagtgtttgaggaagtcgcgccgcgctgcccgcgttaagattcccgcattttaatgttttcaggggggtgtcatagccccgggtttggccgccccagccccgccttccccgccccggggagcccgccccctgccccgcgtccctgccgacagagttagcacgacatcagtatgagctggtcaccttccctgacaacgcagacatgtggggcctgggaaatgaaagagcgccttgggacagggggatttggaaatgtcatccgatggcacaatcaggaaacaggtgagcagattgccatcaagcagtgccggcaggagctcagcccccggaaccgagagcggtggtgcctggagatccagatcatgagaaggctgacccaccccaatgtggtggctgcccgagatgtccctgaggggatgcagaacttggcgcccaatgacctgcccctgctggccatggagtactgccaaggaggagatctccggaagtacctgaaccagtttgagaactgctgtggtctgcgggaaggtgccatcctcaccttgctgagtgacattgcctctgcgcttagataccttcatgaaaacagaatcatccatcgggatctaaagccagaaaacatcgtcctgcagcaaggagaacagaggttaatacacaaaattattgacctaggatatgccaaggagctggatcagggcagtctttgcacatcattcgtggggaccctgcagtacctggccccagagctactggagcagcagaagtacacagtgaccgtcgactactggagcttcggcaccctggcctttgagtgcatcacgggcttccggcccttcctccccaactggcagcccgtgcagtgcgtaagaatgtggccgggtacagtggctcactcctgtaatcccagcactttgggaggccgaggcaggtggatcagttgaggccagcagttccagaccagcctggccaacatggcaaaaccctgtctctactaaaaaccctagccaggtgtggtggcgggcgcctgtaatcccagctactcggaaggctgaggtgggagaattgcttaaacccaggaggcagaggtcgcatcactgcaatccagcctgggcgacagagtgagactctgtctcaaaacaaaaaaagtttaaaaaaaaaaaaaacaa

SEQ ID NO: 142679 - DNA, 2784 bp, Homo sapiens
  Payload ID: 8194
  Gene Symbol: IKBKB
  Gene Name: inhibitor of kappa light polypeptide gene enhancer in B-cells, kinase beta
  ENST ID: ENST00000518679
  CDS Start-End: 170-301
agtgtttgaggaagtcgcgccgcgctgcccgcgttaagattcccgcattttaatgttttcaggggggtgtcatagccccgggtttggccgccccagccccgccttccccgccccggggagcccgccccctgccccgcgtccctgccgacagagttagcacgacatcagtatgagctggtcaccttccctgacaacgcagacatgtggggcctgggaaatgaaagagcgccttgggacagggggatttggaaatgtcatccgatggcacaatcaggcattcaaaagtgcggcagaagagtgaggtggacattgttgttagcgaagacttgaatggaacggtgaagttttcaagctctttaccctaccccaataatcttaacagtgtcctggctgagcgactggagaagtggctgcaactgatgctgatgtggcacccccgacagaggggcacggatcccacgtatgggcccaatggctgcttcaaggccctggatgacatcttaaacttaaagctggttcatatcttgaacatggtcacgggcaccatccacacctaccctgtgacagaggatgagagtctgcagagcttgaaggccagaatccaacaggacacgggcatcccagaggaggaccaggagctgctgcaggaagcgggcctggcgttgatccccgataagcctgccactcagtgtatttcagacggcaagttaaatgagggccacacattggacatggatcttgtttttctctttgacaacagtaaaatcacctatgagactcagatctccccacggccccaacctgaaagtgtcagctgtatccttcaagagcccaagaggaatctcgccttcttccagctgaggaaggtgtggggccaggtctggcacagcatccagaccctgaaggaagattgcaaccggctgcagcagggacagcgagccgccatgatgaatctcctccgaaacaacagctgcctctccaaaatgaagaattccatggcttccatgtctcagcagctcaaggccaagttggatttcttcaaaaccagcatccagattgacctggagaagtacagcgagcaaaccgagtttgggatcacatcagataaactgctgctggcctggagggaaatggagcaggctgtggagctctgtgggcgggagaacgaagtgaaactcctggtagaacggatgatggctctgcagaccgacattgtggacttacagaggagccccatgggccggaagcaggggggaacgctggacgacctagaggagcaagcaagggagctgtacaggagactaagggaaaaacctcgagaccagcgaactgagggtgacagtcaggaaatggtacggctgctgcttcaggcaattcagagcttcgagaagaaagtgcgagtgatctatacgcagctcagtaaaactgtggtttgcaagcagaaggcgctggaactgttgcccaaggtggaagaggtggtgagcttaatgaatgaggatgagaagactgttgtccggctgcaggagaagcggcagaaggagctctggaatctcctgaagattgcttgtagcaaggtccgtggtcctgtcagtggaagcccggatagcatgaatgcctctcgacttagccagcctgggcagctgatgtctcagccctccacggcctccaacagcttacctgagccagccaagaagagtgaagaactggtggctgaagcacataacctctgcaccctgctagaaaatgccatacaggacactgtgagggaacaagaccagagtttcacggccctagactggagctggttacagacggaagaagaagagcacagctgcctggagcaggcctcatgatgtggggggactcgaccccctgacatggggcagcccatagcaggccttgtgcagtggggggactcgaccccctgacatggggctgcctggagcaggccgcgtgacgtggggctgcctggccgcggctctcacatggtggttcctgctgcactgatggcccaggggtctctggtatccagatggagctctcgcttcctcagcagctgtgactttcacccaggacccaggacgcagccctccgtgggcactgccggcgccttgtctgcacactggaggtcctccattacagaggcccagcgcacatcgctggccccacaaacgttcaggggtacagccatggcagctccttcctctgccgtgagaaaagtgcttggagtacggtttgccacacacgtgactggacagtgtccaattcaaatctttcagggcagagtccgagcagcgcttggtgacagcctgtcctctcctgctctccaaaggccctgctccctgtcctctctcactttacagcttgtgtttcttctggattcagcttctcctaaacagacagtttaattatagttgcggcctggccccatcctcacttcctctttttatttcactgctgctaaaattgtgtttttacctactactttggtggttgtcctcttttcggcaaagttggagcgagtgccaagctctccatctgtggtcctttctgccaagagcgactcatagtaaccaggatgggagagcagctgccttattctgaatcccaaaaattacttgggggtgattgtcacagaggagggacagaaagggtatctgctgaccaccagcctgcctacccatgcccatgtctccattcctgctcaagcgtgtgtgctgggccggggagtccctgtctctcacagcatctagcagtattattaaatggattcattttaaaaat

SEQ ID NO: 142680 - DNA, 3086 bp, Homo sapiens
  Payload ID: 8194
  Gene Symbol: IKBKB
  Gene Name: inhibitor of kappa light polypeptide gene enhancer in B-cells, kinase beta
  Uniprot ID: O14920
  ENST ID: ENST00000520810
  CDS Start-End: 187-2457
gtgacgtcagagcaggaagtgtttgaggaagtcgcgccgcgctgcccgcgttaagattcccgcattttaatgttttcaggggggtgtcatagccccgggtttggccgccccagccccgccttccccgccccggggagcccgccccctgccccgcgtccctgccgacagagttagcacgacatcagtatgagctggtcaccttccctgacaacgcagacatgtggggcctgggaaatgaaagagcgccttgggacagggggatttggaaatgtcatccgatggcacaatcaggaaacaggtgagcagattgccatcaagcagtgccggcaggagctcagcccccggaaccgagagcggtggtgcctggagatccagatcatgagaaggctgacccaccccaatgtggtggctgcccgagatgtccctgaggggatgcagaacttggcgcccaatgacctgcccctgctggccatggagtactgccaaggaggagatctccggaagtacctgaaccagtttgagaactgctgtggtctgcgggaaggtgccatcctcaccttgctgagtgacattgcctctgcgcttagataccttcatgaaaacagaatcatccatcgggatctaaagccagaaaacatcgtcctgcagcaaggagaacagaggttaatacacaaaattattgacctaggatatgccaaggagctggatcagggcagtctttgcacatcattcgtggggaccctgcagtacctggccccagagctactggagcagcagaagtacacagtgaccgtcgactactggagcttcggcaccctggcctttgagtgcatcacgggcttccggcccttcctccccaactggcagcccgtgcagtggcattcaaaagtgcggcagaagagtgaggtggacattgttgttagcgaagacttgaatggaacggtgaagttttcaagctctttaccctaccccaataatcttaacagtgtcctggctgagcgactggagaagtggctgcaactgatgctgatgtggcacccccgacagaggggcacggatcccacgtatgggcccaatggctgcttcaaggccctggatgacatcttaaacttaaagctggttcatatcttgaacatggtcacgggcaccatccacacctaccctgtgacagaggatgagagtctgcagagcttgaaggccagaatccaacaggacacgggcatcccagaggaggaccaggagctgctgcaggaagcgggcctggcgttgatccccgataagcctgccactcagtgtatttcagacggcaagttaaatgagggccacacattggacatggatcttgtttttctctttgacaacagtaaaatcacctatgagactcagatctccccacggccccaacctgaaagtgtcagctgtatccttcaagagcccaagaggaatctcgccttcttccagctgaggaaggtgtggggccaggtctggcacagcatccagaccctgaaggaagattgcaaccggctgcagcagggacagcgagccgccatgatgaatctcctccgaaacaacagctgcctctccaaaatgaagaattccatggcttccatgtctcagcagctcaaggccaagttggatttcttcaaaaccagcatccagattgacctggagaagtacagcgagcaaaccgagtttgggatcacatcagataaactgctgctggcctggagggaaatggagcaggctgtggagctctgtgggcgggagaacgaagtgaaactcctggtagaacggatgatggctctgcagaccgacattgtggacttacagaggagccccatgggccggaagcaggggggaacgctggacgacctagaggagcaagcaagggagctgtacaggagactaagggaaaaacctcgagaccagcgaactgagggtgacagtcaggaaatggtacggctgctgcttcaggcaattcagagcttcgagaagaaagtgcgagtgatctatacgcagctcagtaaaactgtggtttgcaagcagaaggcgctggaactgttgcccaaggtggaagaggtggtgagcttaatgaatgaggatgagaagactgttgtccggctgcaggagaagcggcagaaggagctctggaatctcctgaagattgcttgtagcaaggtccgtggtcctgtcagtggaagcccggatagcatgaatgcctctcgacttagccagcctgggcagctgatgtctcagccctccacggcctccaacagcttacctgagccagccaagaagagtgaagaactggtggctgaagcacataacctctgcaccctgctagaaaatgccatacaggacactgtgagggaacaagaccagagtttcacggccctagactggagctggttacagacggaagaagaagagcacagctgcctggagcaggcctcatgatgtggggggactcgaccccctgacatggggcagcccatagcaggccttgtgcagtggggggactcgaccccctgacatggggctgcctggagcaggccgcgtgacgtggggctgcctggccgcggctctcacatggtggttcctgctgcactgatggcccaggggtctctggtatccagatggagctctcgcttcctcagcagctgtgactttcacccaggacccaggacgcagccctccgtgggcactgccggcgccttgtctgcacactggaggtcctccattacagaggcccagcgcacatcgctggccccacaaacgttcaggggtacagccatggcagctccttcctctgccgtgagaaaagtgcttggagtacggtttgccacacacgtgactggacagtgtccaattcaaatctttcagggcagagtccgagcagcgcttggtgacagcctgtcctctcctgctctccaaaggccctgctccctgtcctctctcactttacagcttgtgtttcttctggattcagcttctcctaaacagacagtttaattatagttgcggcctggccccatcctcacttcctctttttatttcactgctgctaaaattgtgtttttacctac

SEQ ID NO: 142681 - DNA, 2403 bp, Homo sapiens
  Payload ID: 8194
  Gene Symbol: IKBKB
  Gene Name: inhibitor of kappa light polypeptide gene enhancer in B-cells, kinase beta
  Uniprot ID: O14920
  ENST ID: ENST00000520835
  CDS Start-End: 54-2318
aagtgtttgaggaagtcgcgccgcgctgcccgcgttaagattcccgcattttaatgttttcaggggggtgtcatagccccgggtttggccgccccagccccgccttccccgccccggggagcccgccccctgccccgcgtccctgccgacaggaaacaggtgagcagattgccatcaagcagtgccggcaggagctcagcccccggaaccgagagcggtggtgcctggagatccagatcatgagaaggctgacccaccccaatgtggtggctgcccgagatgtccctgaggggatgcagaacttggcgcccaatgacctgcccctgctggccatggagtactgccaaggaggagatctccggaagtacctgaaccagtttgagaactgctgtggtctgcgggaaggtgccatcctcaccttgctgagtgacattgcctctgcgcttagataccttcatgaaaacagaatcatccatcgggatctaaagccagaaaacatcgtcctgcagcaaggagaacagaggttaatacacaaaattattgacctaggatatgccaaggagctggatcagggcagtctttgcacatcattcgtggggaccctgcagtacctggccccagagctactggagcagcagaagtacacagtgaccgtcgactactggagcttcggcaccctggcctttgagtgcatcacgggcttccggcccttcctccccaactggcagcccgtgcagtggcattcaaaagtgcggcagaagagtgaggtggacattgttgttagcgaagacttgaatggaacggtgaagttttcaagctctttaccctaccccaataatcttaacagtgtcctggctgagcgactggagaagtggctgcaactgatgctgatgtggcacccccgacagaggggcacggatcccacgtatgggcccaatggctgcttcaaggccctggatgacatcttaaacttaaagctggttcatatcttgaacatggtcacgggcaccatccacacctaccctgtgacagaggatgagagtctgcagagcttgaaggccagaatccaacaggacacgggcatcccagaggaggaccaggagctgctgcaggaagcgggcctggcgttgatccccgataagcctgccactcagtgtatttcagacggcaagttaaatgagggccacacattggacatggatcttgtttttctctttgacaacagtaaaatcacctatgagactcagatctccccacggccccaacctgaaagtgtcagctgtatccttcaagagcccaagaggaatctcgccttcttccagctgaggaaggtgtggggccaggtctggcacagcatccagaccctgaaggaagattgcaaccggctgcagcagggacagcgagccgccatgatgaatctcctccgaaacaacagctgcctctccaaaatgaagaattccatggcttccatgtctcagcagctcaaggccaagttggatttcttcaaaaccagcatccagattgacctggagaagtacagcgagcaaaccgagtttgggatcacatcagataaactgctgctggcctggagggaaatggagcaggctgtggagctctgtgggcgggagaacgaagtgaaactcctggtagaacggatgatggctctgcagaccgacattgtggacttacagaggagccccatgggccggaagcaggggggaacgctggacgacctagaggagcaagcaagggagctgtacaggagactaagggaaaaacctcgagaccagcgaactgagggtgacagtcaggaaatggtacggctgctgcttcaggcaattcagagcttcgagaagaaagtgcgagtgatctatacgcagctcagtaaaactgtggtttgcaagcagaaggcgctggaactgttgcccaaggtggaagaggtggtgagcttaatgaatgaggatgagaagactgttgtccggctgcaggagaagcggcagaaggagctctggaatctcctgaagattgcttgtagcaaggtccgtggtcctgtcagtggaagcccggatagcatgaatgcctctcgacttagccagcctgggcagctgatgtctcagccctccacggcctccaacagcttacctgagccagccaagaagagtgaagaactggtggctgaagcacataacctctgcaccctgctagaaaatgccatacaggacactgtgagggaacaagaccagagtttcacggccctagactggagctggttacagacggaagaagaagagcacagctgcctggagcaggcctcatgatgtggggggactcgaccccctgacatggggcagcccatagcaggccttgtgcagtggggggactcgaccccctgacatggggctg

SEQ ID NO: 142682 - DNA, 4069 bp, Homo sapiens
  Payload ID: 8194
  Gene Symbol: IKBKB
  Gene Name: inhibitor of kappa light polypeptide gene enhancer in B-cells, kinase beta
  ENST ID: ENST00000629753
  CDS Start-End: 187-1875
gtgacgtcagagcaggaagtgtttgaggaagtcgcgccgcgctgcccgcgttaagattcccgcattttaatgttttcaggggggtgtcatagccccgggtttggccgccccagccccgccttccccgccccggggagcccgccccctgccccgcgtccctgccgacagagttagcacgacatcagtatgagctggtcaccttccctgacaacgcagacatgtggggcctgggaaatgaaagagcgccttgggacagggggatttggaaatgtcatccgatggcacaatcaggaaacaggtgagcagattgccatcaagcagtgccggcaggagctcagcccccggaaccgagagcggtggtgcctggagatccagatcatgagaaggctgacccaccccaatgtggtggctgcccgagatgtccctgaggggatgcagaacttggcgcccaatgacctgcccctgctggccatggagtactgccaaggaggagatctccggaagtacctgaaccagtttgagaactgctgtggtctgcgggaaggtgccatcctcaccttgctgagtgacattgcctctgcgcttagataccttcatgaaaacagaatcatccatcgggatctaaagccagaaaacatcgtcctgcagcaaggagaacagaggttaatacacaaaattattgacctaggatatgccaaggagctggatcagggcagtctttgcacatcattcgtggggaccctgcagtacctggccccagagctactggagcagcagaagtacacagtgaccgtcgactactggagcttcggcaccctggcctttgagtgcatcacgggcttccggcccttcctccccaactggcagcccgtgcagtggcattcaaaagtgcggcagaagagtgaggtggacattgttgttagcgaagacttgaatggaacggtgaagttttcaagctctttaccctaccccaataatcttaacagtgtcctggctgagcgactggagaagtggctgcaactgatgctgatgtggcacccccgacagaggggcacggatcccacgtatgggcccaatggctgcttcaaggccctggatgacatcttaaacttaaagctggttcatatcttgaacatggtcacgggcaccatccacacctaccctgtgacagaggatgagagtctgcagagcttgaaggccagaatccaacaggacacgggcatcccagaggaggaccaggagctgctgcaggaagcgggcctggcgttgatccccgataagcctgccactcagtgtatttcagacggcaagttaaatgagggccacacattggacatggatcttgtttttctctttgacaacagtaaaatcacctatgagactcagatctccccacggccccaacctgaaagtgtcagctgtatccttcaagagcccaagaggaatctcgccttcttccagctgaggaaggtgtggggccaggtctggcacagcatccagaccctgaaggaagattgcaaccggctgcagcagggacagcgagccgccatgatgaatctcctccgaaacaacagctgcctctccaaaatgaagaattccatggcttccatgtctcagcagctcaaggccaagttggatttcttcaaaaccagcatccagattgacctggagaagtacagcgagcaaaccgagtttgggatcagagaacgaagtgaaactcctggtagaacggatgatggctctgcagaccgacattgtggacttacagaggagccccatgggccggaagcaggggggaacgctggacgacctagaggagcaagcaagggagctgtacaggagactaagggaaaaacctcgagaccagcgaactgagggtgacagtcaggaaatggtacggctgctgcttcaggcaattcagagcttcgagaagaaagtgcgagtgatctatacgcagctcagtaaaactgtggtttgcaagcagaaggcgctggaactgttgcccaaggtggaagaggtggtgagcttaatgaatgaggatgagaagactgttgtccggctgcaggagaagcggcagaaggagctctggaatctcctgaagattgcttgtagcaaggtccgtggtcctgtcagtggaagcccggatagcatgaatgcctctcgacttagccagcctgggcagctgatgtctcagccctccacggcctccaacagcttacctgagccagccaagaagagtgaagaactggtggctgaagcacataacctctgcaccctgctagaaaatgccatacaggacactgtgagggaacaagaccagagtttcacggccctagactggagctggttacagacggaagaagaagagcacagctgcctggagcaggcctcatgatgtggggggactcgaccccctgacatggggcagcccatagcaggccttgtgcagtggggggactcgaccccctgacatggggctgcctggagcaggccgcgtgacgtggggctgcctggccgcggctctcacatggtggttcctgctgcactgatggcccaggggtctctggtatccagatggagctctcgcttcctcagcagctgtgactttcacccaggacccaggacgcagccctccgtgggcactgccggcgccttgtctgcacactggaggtcctccattacagaggcccagcgcacatcgctggccccacaaacgttcaggggtacagccatggcagctccttcctctgccgtgagaaaagtgcttggagtacggtttgccacacacgtgactggacagtgtccaattcaaatctttcagggcagagtccgagcagcgcttggtgacagcctgtcctctcctgctctccaaaggccctgctccctgtcctctctcactttacagcttgtgtttcttctggattcagcttctcctaaacagacagtttaattatagttgcggcctggccccatcctcacttcctctttttatttcactgctgctaaaattgtgtttttacctactactttggtggttgtcctcttttcggcaaagttggagcgagtgccaagctctccatctgtggtcctttctgccaagagcgactcatagtaaccaggatgggagagcagctgccttattctgaatcccaaaaattacttgggggtgattgtcacagaggagggacagaaagggtatctgctgaccaccagcctgcctacccatgcccatgtctccattcctgctcaagcgtgtgtgctgggccggggagtccctgtctctcacagcatctagcagtattattaaatggattcattttaaaaatagctcctatattttgtaacatgtctcaaacactcatactgggttccacaatccactgttagaatacctatggttagggcttctgaactaaaataatggaaaattttaacaatttgtatagtgcctggatcattactagtgccataaccctgcttcttcaacatttcacagaacttctcttttatataaaggcaagagcacaaaatgagttcagatgatcacaaacaggtgagttttgttggagaagaaagttggagtaggagactttcacaagtggtttccatggagatagaatgaagcattctgtggtcaagtaagtttagggagctattcatgtttcacttgctttgtggagattcacactatgcactgggaaagtatctgaaaagtcttataataaagaaacaggcttaactttgtgtaagaacactgtttatcaatgtcatttggctatagaaacattttctcctgctgattgtgtgtgtgaaacatgtattaacattccaatgaactagcatttaataaagcacaattttggaaaccctggtaaatgacagtgggaaataacacccgaaaggcaaggacgggcagattggggagggaaaggatgttgggctaagggctgtgagcttatgttacaggcaactgagccactgaagaattttgacgaagaaaatgccaaccaaagcagtcattttaaaagtttatggctgttcagttacaggacaagttgtgaaaagaaag

SEQ ID NO: 142683 - DNA, 5905 bp, Homo sapiens
  Payload ID: 8195
  Gene Symbol: IKBKAP
  Gene Name: inhibitor of kappa light polypeptide gene enhancer in B-cells, kinase complex-associated protein
  Uniprot ID: O95163
  ENST ID: ENST00000374647
  CDS Start-End: 309-4307
agtgctgcggctgcctagttgacgcacccattgagtcgctggcttctttgcagcgcttcagcgttttcccctggagggcgcctccatccttggaggcctagtgccgtcggagagagagcgggagccgcggacagagacgcgtgcgcaattcggagccgactctgggtgcggactgtgggagctgactctgggtagccggctgcgcgtggctggggaggcgaggccggacgcacctctgtttgggggtcctcagagattaatgattcatcaagggatagttgtacttgtctcgtgggaatcacttcatcatgcgaaatctgaaattatttcggaccctggagttcagggatattcaaggtccagggaatcctcagtgcttctctctccgaactgaacaggggacggtgctcattggttcagaacatggcctgatagaagtagaccctgtctcaagagaagtgaaaaatgaagtttctttggtggcagaaggctttctcccagaggatggaagtggccgcattgttggtgttcaggacttgctggatcaggagtctgtgtgtgtggccacagcctctggagacgtcatactctgcagtctcagcacacaacagctggagtgtgttgggagtgtagccagtggtatctctgttatgagttggagtcctgaccaagagctggtgcttcttgccacaggtcaacagaccctgattatgatgacaaaagattttgagccaatcctggagcagcagatccatcaggatgattttggtgaaagcaagtttatcactgttggatggggtaggaaggagacacagttccatggatcagaaggcagacaagcagcttttcagatgcaaatgcatgagtctgctttgccctgggatgaccatagaccacaagttacctggcggggggatggacagttttttgctgtgagtgttgtttgcccagaaacaggggctcggaaggtcagagtgtggaaccgagagtttgctttgcagtcaaccagtgagcctgtggcaggactgggaccagccctggcttggaaaccctcaggcagtttgattgcatctacacaagataaacccaaccagcaggatattgtgttttttgagaaaaatggactccttcatggacactttacacttcccttccttaaagatgaggttaaggtaaatgacttgctctggaatgcagattcctctgtgcttgcagtctggctggaagaccttcagagagaagaaagctccattccgaaaacctgtgttcagctctggactgttggaaactatcactggtatctcaagcaaagtttatccttcagcacctgtgggaagagcaagattgtgtctctgatgtgggaccctgtgaccccataccggctgcatgttctctgtcagggctggcattacctcgcctatgattggcactggacgactgaccggagcgtgggagataattcaagtgacttgtccaatgtggctgtcattgatggaaacagggtgttggtgacagtcttccggcagactgtggttccgcctcccatgtgcacctaccaactgctgttcccacaccctgtgaatcaagtcacattcttagcacaccctcaaaagagtaatgaccttgctgttctagatgccagtaaccagatttctgtttataaatgtggtgattgtccaagtgctgaccctacagtgaaactgggagctgtgggtggaagtggatttaaagtttgccttagaactcctcatttggaaaagagatacaaaatccagtttgagaataatgaagatcaagatgtaaacccgctgaaactaggccttctcacttggattgaagaagacgtcttcctggctgtaagccacagtgagttcagcccccggtctgtcattcaccatttgactgcagcttcttctgagatggatgaagagcatggacagctcaatgtcagttcatctgcagcggtggatggggtcataatcagtctatgttgcaattccaagaccaagtcagtagtattacagctggctgatggccagatatttaagtacctttgggagtcaccttctctggctattaaaccatggaagaactctggtggatttcctgttcggtttccttatccatgcacccagaccgaattggccatgattggagaagaggaatgtgtccttggtctgactgacaggtgtcgctttttcatcaatgacattgaggttgcgtcaaatatcacgtcatttgcagtatatgatgagtttttattgttgacaacccattcccatacctgccagtgtttttgcctgagggatgcttcatttaaaacattacaggccggcctgagcagcaatcatgtgtcccatggggaagttctgcggaaagtggagaggggttcacggattgtcactgttgtgccccaggacacaaagcttgtattacagatgccaaggggaaacttagaagttgttcatcatcgagccctggttttagctcagattcggaagtggttggacaaacttatgtttaaagaggcatttgaatgcatgagaaagctgagaatcaatctcaatctgatttatgatcataaccctaaggtgtttcttggaaatgtggaaaccttcattaaacagatagattctgtgaatcatattaacttgttttttacagaattgaaagaagaagatgtcacgaagaccatgtaccctgcaccagttaccagcagtgtctacctgtccagggatcctgacgggaataaaatagaccttgtctgcgatgctatgagagcagtcatggagagcataaatcctcataaatactgcctatccatacttacatctcatgtaaagaagacaaccccagaactggaaattgtactgcaaaaagtacacgagcttcaaggaaatgctccctctgatcctgatgctgtgagtgctgaagaggccttgaaatatttgctgcatctggtagatgttaatgaattatatgatcattctcttggcacctatgactttgatttggtcctcatggtagctgagaagtcacagaaggatcccaaagaatatcttccatttcttaatacacttaagaaaatggaaactaattatcagcggtttactatagacaaatacttgaaacgatatgaaaaagccattggccacctcagcaaatgtggacctgagtacttcccagaatgcttaaacttgataaaagataaaaacttgtataacgaagctctgaagttatattcaccaagctcacaacagtaccaggatatcagcattgcttatggggagcacctgatgcaggagcacatgtatgagccagcggggctcatgtttgcccgttgcggtgcccacgagaaagctctctcagcctttctgacatgtggcaactggaagcaagccctctgtgtggcagcccagcttaactttaccaaagaccagctggtgggcctcggcagaactctggcaggaaagctggttgagcagaggaagcacattgatgcggccatggttttggaagagtgtgcccaggattatgaagaagctgtgctcttgctgttagaaggagctgcctgggaagaagctttgaggctggtatacaaatataacagactggatattatagaaaccaacgtaaagccttccattttagaagcccagaaaaattatatggcatttctggactctcagacagccacattcagtcgccacaagaaacgtttattggtagttcgagagctcaaggagcaagcccagcaggcaggtctggatgatgaggtaccccacgggcaagagtcagacctcttctctgaaactagcagtgtcgtgagtggcagtgagatgagtggcaaatactcccatagtaactccaggatatcagcgagatcatccaagaatcgccgaaaagcggagcggaagaagcacagcctcaaagaaggcagtccgctggaggacctggccctcctggaggcactgagtgaagtggtgcagaacactgaaaacctgaaagatgaagtataccatattttaaaggtactctttctctttgagtttgatgaacaaggaagggaattacagaaggcctttgaagatacgctgcagttgatggaaaggtcacttccagaaatttggactcttacttaccagcagaattcagctaccccggttctaggtcccaattctactgcaaatagtatcatggcatcttatcagcaacagaagacttcggttcctgttcttgatgctgagctttttataccaccaaagatcaacagaagaacccagtggaagctgagcctgctagactgagtgactgcagttaggagggatccgacagagaagaccatttccactcattcctgttgtcctaccaccccttgctctttgagggctggctattgagaactggaaagagtaaaatgataacttaccttagcattgccaagaacttcagcagacaacaagcaattctatttattttatgttgtgtatacatcttgatcattagcaagacattaagctttaaccattatggcaccattttgtgagaatgattgttctttcacttgggctgtttgagagcataattatggtaatcatgagattaatgtttcatgatttctacctccaaagtgtgaagacaagtaaaacaatgtttctaaattgtcttattttgttggcggagaagattacaatggctattagtgctacatttggtcaaatgtaatcacttaaatagcttcttgtcaccttaaactaaagcagaataaaaagtatcctttgaaattataagccctcctttgctgacagctattattttgtaacatcttaccaggtcatgtgctttcagttataactgggctgagcctcctataattacaatgtctatagggactgttttactgcctgtgtattttctgctagagagttagcaatgttagagctagaacagattagaatttctaaacagtatcatgcacagttggtgtgagtgatcagtgtgcattgtatggcatgcatggttgtgaattattctctgttctccaaatactgtttctttaactcagatatttttgttagtgtctaggccacttcatttatttttcgtcatggtactttactgacttctctttattcaattctccacgccctcaccaaaaaaaactgtctcaaaatgagaatattttattttcatggtgagtctagaaaacgcccacttcattctgattaaaaattcttccatgttttaaatatcagaaccagacctttcttactgtgtatcttagcccatttgtgtctctataacaacaaccagctttcaaaggaactaatagagtgaaaactcactcattaccacgaggatggcacaagcgattcacgtaggatctgcccctgtgaccaaaacacctcccattgggccccacttccaacactggtgatcacatttcaacatgaggtttagggaaacaaatgcctaaactacagcactgtacataaactaacaggaaatgctgcttttgatcctcaaagaagtgatatagccaaaattgtaatttaagaagcctttcccagtatagcaagatgttaactatagaatcaatctaggagtattcactgtaaaattcaacttttctgtatgtttgaacattttcacaatctcataggagtttttaaaaagaagagaaagaagatatactttgctttggagaaatctactttttgacttacatgggtttgctgtaattaagtgcccaatattgaaaggctgcaagtactttgtaatcactctttggcatgggtaaataagcatggtaacttatattgaaatatagtgctcttgctttggataactgtaaagggacccatgctgatagactggaaatagaagtaaatgtgtttattgataa

SEQ ID NO: 142684 - DNA, 2840 bp, Homo sapiens
  Payload ID: 8195
  Gene Symbol: IKBKAP
  Gene Name: inhibitor of kappa light polypeptide gene enhancer in B-cells, kinase complex-associated protein
  ENST ID: ENST00000495759
  CDS Start-End: 1-1040
gacctgagtacttcccagaatgcttaaacttgataaaagataaaaacttgtataacgaagctctgaagttatattcaccaagctcacaacagtaccaggatatcagcattgcttatggggagcacctgatgcaggagcacatgtatgagccagcggggctcatgtttgcccgttgcggtgcccacgagaaagctctctcagcctttctgacatgtggcaactggaagcaagccctctgtgtggcagcccagcttaactttaccaaagaccagctggtgggcctcggcagaactctggcaggaaagctggttgagcagaggaagcacattgatgcggccatggttttggaagagtgtgcccaggattatgaagaagctgtgctcttgctgttagaaggagctgcctgggaagaagctttgaggctggtatacaaatataacagactggatattatagaaaccaacgtaaagccttccattttagaagcccagaaaaattatatggcatttctggactctcagacagccacattcagtcgccacaagaaacgtttattggtagttcgagagctcaaggagcaagcccagcaggcaggtctggatgatgaggtaccccacgggcaagagtcagacctcttctctgaaactagcagtgtcgtgagtggcagtgagatgagtggcaaatactcccatagtaactccaggatatcagcgagatcatccaagaatcgccgaaaagcggagcggaagaagcacagcctcaaagaaggcagtccgctggaggacctggccctcctggaggcactgagtgaagtggtgcagaacactgaaaacctgaaagatgaagtataccatattttaaaggtactctttctctttgagtttgatgaacaaggaagggaattacagaaggcctttgaagatacgctgcagttgatggaaaggtcacttccagaaatttggactcttacttaccagcagaattcagctaccccgacatggggagagggagtcttgctgtgttgcccaagctggtcttgaactcctggcctcaagtgatcctcctgccttggcctcccaaagtgctgagattacaggtgttctaggtcccaattctactgcaaatagtatcatggcatcttatcagcaacagaagacttcggttcctgttcttgatgctgagctttttataccaccaaagatcaacagaagaacccagtggaagctgagcctgctagactgagtgactgcagttaggagggatccgacagagaagaccatttccactcattcctgttgtcctaccaccccttgctctttgagggctggctattgagaactggaaagagtaaaatgataacttaccttagcattgccaagaacttcagcagacaacaagcaattctatttattttatgttgtgtatacatcttgatcattagcaagacattaagctttaaccattatggcaccattttgtgagaatgattgttctttcacttgggctgtttgagagcataattatggtaatcatgagattaatgtttcatgatttctacctccaaagtgtgaagacaagtaaaacaatgtttctaaattgtcttattttgttggcggagaagattacaatggctattagtgctacatttggtcaaatgtaatcacttaaatagcttcttgtcaccttaaactaaagcagaataaaaagtatcctttgaaattataagccctcctttgctgacagctattattttgtaacatcttaccaggtcatgtgctttcagttataactgggctgagcctcctataattacaatgtctatagggactgttttactgcctgtgtattttctgctagagagttagcaatgttagagctagaacagattagaatttctaaacagtatcatgcacagttggtgtgagtgatcagtgtgcattgtatggcatgcatggttgtgaattattctctgttctccaaatactgtttctttaactcagatatttttgttagtgtctaggccacttcatttatttttcgtcatggtactttactgacttctctttattcaattctccacgccctcaccaaaaaaaactgtctcaaaatgagaatattttattttcatggtgagtctagaaaacgcccacttcattctgattaaaaattcttccatgttttaaatatcagaaccagacctttcttactgtgtatcttagcccatttgtgtctctataacaacaaccagctttcaaaggaactaatagagtgaaaactcactcattaccacgaggatggcacaagcgattcacgtaggatctgcccctgtgaccaaaacacctcccattgggccccacttccaacactggtgatcacatttcaacatgaggtttagggaaacaaatgcctaaactacagcactgtacataaactaacaggaaatgctgcttttgatcctcaaagaagtgatatagccaaaattgtaatttaagaagcctttcccagtatagcaagatgttaactatagaatcaatctaggagtattcactgtaaaattcaacttttctgtatgtttgaacattttcacaatctcataggagtttttaaaaagaagagaaagaagatatactttgctttggagaaatctactttttgacttacatgggtttgctgtaattaagtgcccaatattgaaaggctgcaagtactttgtaatcactctttggcatgggtaaataagcatggtaacttatattgaaatatagtgctcttgctttggataactgtaaagggacccatgctgatagactggaaatagaagtaaatgtgtttattgataa

SEQ ID NO: 142685 - DNA, 3823 bp, Homo sapiens
  Payload ID: 8195
  Gene Symbol: IKBKAP
  Gene Name: inhibitor of kappa light polypeptide gene enhancer in B-cells, kinase complex-associated protein
  ENST ID: ENST00000537196
  CDS Start-End: 398-3349
gggtgcggactgtgggagctgactctgggtagccggctgcgcgtggctggggaggcgaggccggacgcacctctgtttgggggtcctcagaccctcaggcagtttgattgcatctacacaagataaacccaaccagcaggatattgtgttttttgagaaaaatggactccttcatggacactttacacttcccttccttaaagatgaggttaaggtaaatgacttgctctggaatgcagattcctctgtgcttgcagtctggctggaagaccttcagagagaagaaagctccattccgaaaacctgtgttcagctctggactgttggaaactatcactggtatctcaagcaaagtttatccttcagcacctgtgggaagagcaagattgtgtctctgatgtgggaccctgtgaccccataccggctgcatgttctctgtcagggctggcattacctcgcctatgattggcactggacgactgaccggagcgtgggagataattcaagtgacttgtccaatgtggctgtcattgatggaaacagggtgttggtgacagtcttccggcagactgtggttccgcctcccatgtgcacctaccaactgctgttcccacaccctgtgaatcaagtcacattcttagcacaccctcaaaagagtaatgaccttgctgttctagatgccagtaaccagatttctgtttataaatgtggtgattgtccaagtgctgaccctacagtgaaactgggagctgtgggtggaagtggatttaaagtttgccttagaactcctcatttggaaaagagatacaaaatccagtttgagaataatgaagatcaagatgtaaacccgctgaaactaggccttctcacttggattgaagaagacgtcttcctggctgtaagccacagtgagttcagcccccggtctgtcattcaccatttgactgcagcttcttctgagatggatgaagagcatggacagctcaatgtcagttcatctgcagcggtggatggggtcataatcagtctatgttgcaattccaagaccaagtcagtagtattacagctggctgatggccagatatttaagtacctttgggagtcaccttctctggctattaaaccatggaagaactctggtggatttcctgttcggtttccttatccatgcacccagaccgaattggccatgattggagaagaggaatgtgtccttggtctgactgacaggtgtcgctttttcatcaatgacattgaggttgcgtcaaatatcacgtcatttgcagtatatgatgagtttttattgttgacaacccattcccatacctgccagtgtttttgcctgagggatgcttcatttaaaacattacaggccggcctgagcagcaatcatgtgtcccatggggaagttctgcggaaagtggagaggggttcacggattgtcactgttgtgccccaggacacaaagcttgtattacagatgccaaggggaaacttagaagttgttcatcatcgagccctggttttagctcagattcggaagtggttggacaaacttatgtttaaagaggcatttgaatgcatgagaaagctgagaatcaatctcaatctgatttatgatcataaccctaaggtgtttcttggaaatgtggaaaccttcattaaacagatagattctgtgaatcatattaacttgttttttacagaattgaaagaagaagatgtcacgaagaccatgtaccctgcaccagttaccagcagtgtctacctgtccagggatcctgacgggaataaaatagaccttgtctgcgatgctatgagagcagtcatggagagcataaatcctcataaatactgcctatccatacttacatctcatgtaaagaagacaaccccagaactggaaattgtactgcaaaaagtacacgagcttcaaggaaatgctccctctgatcctgatgctgtgagtgctgaagaggccttgaaatatttgctgcatctggtagatgttaatgaattatatgatcattctcttggcacctatgactttgatttggtcctcatggtagctgagaagtcacagaaggatcccaaagaatatcttccatttcttaatacacttaagaaaatggaaactaattatcagcggtttactatagacaaatacttgaaacgatatgaaaaagccattggccacctcagcaaatgtggacctgagtacttcccagaatgcttaaacttgataaaagataaaaacttgtataacgaagctctgaagttatattcaccaagctcacaacagtaccaggatatcagcattgcttatggggagcacctgatgcaggagcacatgtatgagccagcggggctcatgtttgcccgttgcggtgcccacgagaaagctctctcagcctttctgacatgtggcaactggaagcaagccctctgtgtggcagcccagcttaactttaccaaagaccagctggtgggcctcggcagaactctggcaggaaagctggttgagcagaggaagcacattgatgcggccatggttttggaagagtgtgcccaggattatgaagaagctgtgctcttgctgttagaaggagctgcctgggaagaagctttgaggctggtatacaaatataacagactggatattatagaaaccaacgtaaagccttccattttagaagcccagaaaaattatatggcatttctggactctcagacagccacattcagtcgccacaagaaacgtttattggtagttcgagagctcaaggagcaagcccagcaggcaggtctggatgatgaggtaccccacgggcaagagtcagacctcttctctgaaactagcagtgtcgtgagtggcagtgagatgagtggcaaatactcccatagtaactccaggatatcagcgagatcatccaagaatcgccgaaaagcggagcggaagaagcacagcctcaaagaaggcagtccgctggaggacctggccctcctggaggcactgagtgaagtggtgcagaacactgaaaacctgaaagatgaagtataccatattttaaaggtactctttctctttgagtttgatgaacaaggaagggaattacagaaggcctttgaagatacgctgcagttgatggaaaggtcacttccagaaatttggactcttacttaccagcagaattcagctaccccggttctaggtcccaattctactgcaaatagtatcatggcatcttatcagcaacagaagacttcggttcctgttcttgatgctgagctttttataccaccaaagatcaacagaagaacccagtggaagctgagcctgctagactgagtgactgcagttaggagggatccgacagagaagaccatttccactcattcctgttgtcctaccaccccttgctctttgagggctggctattgagaactggaaagagtaaaatgataacttaccttagcattgccaagaacttcagcagacaacaagcaattctatttattttatgttgtgtatacatcttgatcattagcaagacattaagctttaaccattatggcaccattttgtgagaatgattgttctttcacttgggctgtttgagagcataattatggtaatcatgagattaatgtttcatgatttctacctccaaagtgtgaagacaagtaaaacaatgtttctaaattgtcttattttgttggcggagaagattacaatggctattagtgctacatttggtcaaatgtaatcacttaaatagcttcttgtcaccttaaactaaagcagaataaaaagtatcctttg

SEQ ID NO: 142686 - DNA, 2487 bp, Homo sapiens
  Payload ID: 8196
  Gene Symbol: IKBKE
  Gene Name: inhibitor of kappa light polypeptide gene enhancer in B-cells, kinase epsilon
  Uniprot ID: Q14164
  ENST ID: ENST00000584998
  CDS Start-End: 463-2358
caccgccacaaggaggcagggaagaaacccactagtcccagctcctggggtggcacagacattgcaactggccctgcctgtgggtcctaggggcccttggctaccaggaggctaagaacactgctcatgaatgacagtgagccctgaaagctctgggggtgtcacccagtcccacaagcctgcatcccctgcagtggagatgggctcagctcctggacgtgccacagacagaaagcataacatacactcgccaggaagagcctttgcctgactcagggcagctcagagtgtgggaaatccggagagctggttgctgtgaaggtcttcaacactaccagctacctgcggccccgcgaggtgcaggtgagggagtttgaggtcctgcggaagctgaaccaccagaacattgtcaagctctttgcggtggaggagacgggcggaagccggcagaaggtactggtgatggagtactgctccagtgggagcctgctgagtgtgctggagagccctgagaatgcctttgggctgcctgaggatgagttcctggtggtgctgcgctgtgtggtggccggcatgaaccacctgcgggagaacggcattgtgcatcgcgacatcaagccggggaacatcatgcgcctcgtaggggaggaggggcagagcatctacaagctgacagacttcggcgctgcccgggagctggatgatgatgagaagttcgtctcggtctatgggactgaggagtacctgcatcccgacatgtatgagcgggcggtgcttcgaaagccccagcaaaaagcgttcggggtgactgtggatctctggagcattggagtgaccttgtaccatgcagccactggcagcctgcccttcatcccctttggtgggccacggcggaacaaggagatcatgtaccggatcaccacggagaagccggctggggccattgcaggtgcccagaggcgggagaacgggcccctggagtggagctacaccctccccatcacctgccagctgtcactggggctgcagagccagctggtgcccatcctggccaacatcctggaggtggagcaggccaagtgctggggcttcgaccagttctttgcggagaccagtgacatcctgcagcgagttgtcgtccatgtcttctccctgtcccaggcagtcctgcaccacatctatatccatgcccacaacacgatagccattttccaggaggccgtgcacaagcagaccagtgtggccccccgacaccaggagtacctctttgagggtcacctctgtgtcctcgagcccagcgtctcagcacagcacatcgcccacacgacggcaagcagccccctgaccctcttcagcacagccatccctaaggggctggccttcagggaccctgctctggacgtccccaagttcgtccccaaagtggacctgcaggcggattacaacactgccaagggcgtgttgggcgccggctaccaggccctgcggctggcacgggccctgctggatgggcaggagctaatgtttcgggggctgcactgggtcatggaggtgctccaggccacatgcagacggactctggaagtggcaaggacatccctcctctacctcagcagcagcctgggaactgagaggttcagcagcgtggctggaacgcctgagatccaggaactgaaggcggctgcagaactgaggtccaggctgcggactctagcggaggtcctctccagatgctcccaaaatatcacggagacccaggagagcctgagcagcctgaaccgggagctggtgaagagccgggatcaggtacatgaggacagaagcatccagcagattcagtgctgtttggacaagatgaacttcatctacaaacagttcaagaagtctaggatgaggccagggcttggctacaacgaggagcagattcacaagctggataaggtgaatttcagtcatttagccaaaagactcctgcaggtgttccaggaggagtgcgtgcagaagtatcaagcgtccttagtcacacacggcaagaggatgagggtggtgcacgagaccaggaaccacctgcgcctggttggctgttctgtggctgcctgtaacacagaagcccagggggtccaggagagtctcagcaagctcctggaagagctatctcaccagctccttcaggaccgagcaaagggggctcaggcctcgccgcctcccatagctccttaccccagccctacacgaaaggacctgcttctccacatgcaagagctctgcgaggggatgaagctgctggcatctgacctcctggacaacaaccgcatcatcgaacggctaaatagagtcccagcacctcctgatgtctgagctccatggggcacatgaggcatcctgaagcattagaatgattccaacactgctcttctgcaccatgagaccaacccagggcaagatcccatcccatcacatcagcctacctccctcctggctgctggc

SEQ ID NO: 142687 - DNA, 3221 bp, Homo sapiens
  Payload ID: 8196
  Gene Symbol: IKBKE
  Gene Name: inhibitor of kappa light polypeptide gene enhancer in B-cells, kinase epsilon
  Uniprot ID: Q14164
  ENST ID: ENST00000581977
  CDS Start-End: 327-2477
caccgccacaaggaggcagggaagaaacccactagtcccagctcctggggtggcacagacattgcaactggccctgcctgtgggtcctaggggcccttggctaccaggaggctaagaacactgctcatgaatgacagtgagccctgaaagctctgggggtgtcacccagtcccacaagcctgcatcccctgcagtggagatgggctcagctcctggacgtgccacagacagaaagcataacatacactcgccaggaagagcctttgcctgactcagggcagctcagagtgtggggcagaaggtgaccagccagctcagggcaggagatgcagagcacagccaattacctgtggcacacagatgacctgctggggcagggggccactgccagtgtgtacaaggcccgcaacaagaaatccggagagctggttgctgtgaaggtcttcaacactaccagctacctgcggccccgcgaggtgcaggtgagggagtttgaggtcctgcggaagctgaaccaccagaacattgtcaagctctttgcggtggaggagacgggcggaagccggcagaaggtactggtgatggagtactgctccagtgggagcctgctgagtgtgctggagagccctgagaatgcctttgggctgcctgaggatgagttcctggtggtgctgcgctgtgtggtggccggcatgaaccacctgcgggagaacggcattgtgcatcgcgacatcaagccggggaacatcatgcgcctcgtaggggaggaggggcagagcatctacaagctgacagacttcggcgctgcccgggagctggatgatgatgagaagttcgtctcggtctatgggactgaggagtacctgcatcccgacatgtatgagcgggcggtgcttcgaaagccccagcaaaaagcgttcggggtgactgtggatctctggagcattggagtgaccttgtaccatgcagccactggcagcctgcccttcatcccctttggtgggccacggcggaacaaggagatcatgtaccggatcaccacggagaagccggctggggccattgcaggtgcccagaggcgggagaacgggcccctggagtggagctacaccctccccatcacctgccagctgtcactggggctgcagagccagctggtgcccatcctggccaacatcctggaggtggagcaggccaagtgctggggcttcgaccagttctttgcggagaccagtgacatcctgcagcgagttgtcgtccatgtcttctccctgtcccaggcagtcctgcaccacatctatatccatgcccacaacacgatagccattttccaggaggccgtgcacaagcagaccagtgtggccccccgacaccaggagtacctctttgagggtcacctctgtgtcctcgagcccagcgtctcagcacagcacatcgcccacacgacggcaagcagccccctgaccctcttcagcacagccatccctaaggggctggccttcagggaccctgctctggacgtccccaagttcgtccccaaagtggacctgcaggcggattacaacactgccaagggcgtgttgggcgccggctaccaggccctgcggctggcacgggccctgctggatgggcaggagctaatgtttcgggggctgcactgggtcatggaggtgctccaggccacatgcagacggactctggaagtggcaaggacatccctcctctacctcagcagcagcctgggaactgagaggttcagcagcgtggctggaacgcctgagatccaggaactgaaggcggctgcagaactgaggtccaggctgcggactctagcggaggtcctctccagatgctcccaaaatatcacggagacccaggagagcctgagcagcctgaaccgggagctggtgaagagccgggatcaggtacatgaggacagaagcatccagcagattcagtgctgtttggacaagatgaacttcatctacaaacagttcaagaagtctaggatgaggccagggcttggctacaacgaggagcagattcacaagctggataaggtgaatttcagtcatttagccaaaagactcctgcaggtgttccaggaggagtgcgtgcagaagtatcaagcgtccttagtcacacacggcaagaggatgagggtggtgcacgagaccaggaaccacctgcgcctggttggctgttctgtggctgcctgtaacacagaagcccagggggtccaggagagtctcagcaagctcctggaagagctatctcaccagctccttcaggaccgagcaaagggggctcaggcctcgccgcctcccatagctccttaccccagccctacacgaaaggacctgcttctccacatgcaagagctctgcgaggggatgaagctgctggcatctgacctcctggacaacaaccgcatcatcgaacggctaaatagagtcccagcacctcctgatgtctgagctccatggggcacatgaggcatcctgaagcattagaatgattccaacactgctcttctgcaccatgagaccaacccagggcaagatcccatcccatcacatcagcctacctccctcctggctgctggccaggatgtcgccagcattaccttccactgcctttctccctgggaagcagcacagctgagactgggcaccaggccacctctgttgggacccacaggaaagagtgtggcagcaactgcctggctgacctttctatcttctctaggctcaggtactgctcctccatgcccatggctgggccgtggggagaagaagctctcatacgccttcccactccctctggtttataggacttcactccctagccaacaggagaggaggcctcctggggtttccccagggcagtaggtcaaacgacctcatcacagtcttccttcctcttcaagcgtttcatgttgaacacagctctctccgctcccttgtgatttctgagggtcaccactgccagcctcaggcaacatagagagcctcctgttctttctatgcttggtctgactgagcctaaagttgagaaaatgggtggccaaggccagtgccagtgtcttggggcccctttggctctccctcactctctgaggctccagctggtcctgggacatgcagccaggactgtgagtctgggcaggtccaaggcctgcaccttcaagaagtggaataaatgtggcctttgcttctgtt

SEQ ID NO: 142688 - DNA, 2493 bp, Homo sapiens
  Payload ID: 8196
  Gene Symbol: IKBKE
  Gene Name: inhibitor of kappa light polypeptide gene enhancer in B-cells, kinase epsilon
  ENST ID: ENST00000578328
  CDS Start-End: 327-2300
caccgccacaaggaggcagggaagaaacccactagtcccagctcctggggtggcacagacattgcaactggccctgcctgtgggtcctaggggcccttggctaccaggaggctaagaacactgctcatgaatgacagtgagccctgaaagctctgggggtgtcacccagtcccacaagcctgcatcccctgcagtggagatgggctcagctcctggacgtgccacagacagaaagcataacatacactcgccaggaagagcctttgcctgactcagggcagctcagagtgtggggcagaaggtgaccagccagctcagggcaggagatgcagagcacagccaattacctgtggcacacagatgacctgctggggcagggggccactgccagtgtgtacaaggcccgcaacaagaaatccggagagctggttgctgtgaaggtcttcaacactaccagctacctgcggccccgcgaggtgcaggtgagggagtttgaggtcctgcggaagctgaaccaccagaacattgtcaagctctttgcggtggaggagacgggcggaagccggcagaaggtactggtgatggagtactgctccagtgggagcctgctgagtgtgctggagagccctgagaatgcctttgggctgcctgaggatgagttcctggtggtgctgcgctgtgtggtggccggcatgaaccacctgcgggagaacggcattgtgcatcgcgacatcaagccggggaacatcatgcgcctcgtaggggaggaggggcagagcatctacaagctgacagacttcggcgctgcccgggagctggatgatgatgagaagttcgtctcggtctatgggactgaggagtacctgcatcccgacatgtatgagcgggcggtgcttcgaaagccccagcaaaaagcgttcggggtgactgtggatctctggagcattggagtgaccttgtaccatgcagccactggcagcctgcccttcatcccctttggtgggccacggcggaacaaggagatcatgtaccggatcaccacggagaagccggctggggccattgcaggtgcccagaggcgggagaacgggcccctggagtggagctacaccctccccatcacctgccagctgtcactggggctgcagagccagctggtgcccatcctggccaacatcctggaggtggagcaggccaagtgctggggcttcgaccagttctttgcggagaccagtgacatcctgcagcgagttgtcgtccatgtcttctccctgtcccaggcagtcctgcaccacatctatatccatgcccacaacacgatagccattttccaggaggccgtgcacaagcagaccagtgtggccccccgacaccaggagtacctctttgagggtcacctctgtgtcctcgagcccagcgtctcagcacagcacatcgcccacacgacggcaagcagccccctgaccctcttcagcacagccatccctaaggggctggccttcagggaccctgctctggacgtccccaagttcgtccccaaagtggacctgcaggcggattacaacactgccaagggcgtgttgggcgccggctaccaggccctgcggctggcacgggccctgctggatgggcaggagctaatgtttcgggggctgcactgggtcatggaggtgctccaggccacatgcagacggactctggaagtggcaaggacatccctcctctacctcagcagcagcctgggaactgagaggttcagcagcgtggctggaacgcctgagatccaggaactgaaggcggctgcagaactgaggtccaggctgcggactctagcggaggtcctctccagatgctcccaaaatatcacggagacccaggagagcctgagcagcctgaaccgggagctggtgaagagccgggatcaggtacatgaggacagaagcatccagcagattcagtgctgtttggacaagatgaacttcatctacaaacagttcaagaagtctaggatgaggccagggcttggctacaacgaggagcagattcacaagctggataaggtgaatttcagtcatttagccaaaagactcctgcaggtgttccaggaggagtgcgtgcagaagtatcaagcgtccttagtcacacacggcaagaggatgagggtggtgcacgagaccaggaaccacctgcgcctggttggctgttctgtggctgcctgtaacacagaagcccagggggtccaggagagtctcagcaagcatgcaagagctctgcgaggggatgaagctgctggcatctgacctcctggacaacaaccgcatcatcgaacggctaaatagagtcccagcacctcctgatgtctgagctccatggggcacatgaggcatcctgaagcattagaatgattccaacactgctcttctgcaccatgagaccaacccagggcaagatcccatcccatcacatcagcctacctccctcctggctgctggc

SEQ ID NO: 142689 - DNA, 580 bp, Homo sapiens
  Payload ID: 8196
  Gene Symbol: IKBKE
  Gene Name: inhibitor of kappa light polypeptide gene enhancer in B-cells, kinase epsilon
  ENST ID: ENST00000605726
  CDS Start-End: 143-580
agtgctggggagaggtggtagagacaagaggtttgtctctgcagaatgacctgcctcaggaggggcttcaagggaacgtggggagccaggacaggcagcaggtggaacaggcagaaggtgaccagccagctcagggcaggagatgcagagcacagccaattacctgtggcacacagatgacctgctggggcagggggccactgccagtgtgtacaaggcccgcaacaagaaatccggagagctggttgctgtgaaggtcttcaacactaccagctacctgcggccccgcgaggtgcaggtgagggagtttgaggtcctgcggaagctgaaccaccagaacattgtcaagctctttgcggtggaggagacgggcggaagccggcagaaggtactggtgatggagtactgctccagtgggagcctgctgagtgtgctggagagccctgagaatgcctttgggctgcctgaggatgagttcctggtggtgctgcgctgtgtggtggccggcatgaaccacctgcgggagaacggcattgtgcatcgcgacatcaagccggggaacatcatgcgcctcgtaggg

SEQ ID NO: 142690 - DNA, 678 bp, Homo sapiens
  Payload ID: 8196
  Gene Symbol: IKBKE
  Gene Name: inhibitor of kappa light polypeptide gene enhancer in B-cells, kinase epsilon
  ENST ID: ENST00000579827
  CDS Start-End: 180-641
aagctctgggggtgtcacccagtcccacaagcctgcatcccctgcagtggagatgggctcagctcctggacgtgccacagacagaaagcataacatacactcgccaggaagagcctttgcctgactcagggcagctcagagtgtggggcagaaggtgaccagccagctcagggcaggagatgcagagcacagccaattacctgtggcacacagatgacctgctggggcagggggccactgccagtgtgtacaaggcccgcaacaagaaatccggagagctggttgctgtgaaggtcttcaacactaccagctacctgcggccccgcgaggtgcaggtgagggagtttgaggtcctgcggaagctgaaccaccagaacattgtcaagctctttgcggtggaggagacgggcggaagccggcagaaggtactggtgatggagtactgctccagtgggagcctgctgagtgtgctggagagccctgagaatgcctttgggctgcctgaggatgagttcctggtggtgctgcgctgtgtgggtgagcccctccctgtccctgcctccaccctcagaccagcggcaggcctgggacagatgctgacaggactcaggtgtctgactcctgctaatcattccatttaaaattccaacttaaaaattaaacctaaaaaagattgta

SEQ ID NO: 142691 - DNA, 841 bp, Homo sapiens
  Payload ID: 8197
  Gene Symbol: IKBKG
  Gene Name: inhibitor of kappa light polypeptide gene enhancer in B-cells, kinase gamma
  ENST ID: ENST00000422680
  CDS Start-End: 324-841
ccacgctccaggccgtttgttcctgctgctccctttgggattaactagagattgaaccggctcaccttgtttcagctcaggccctgcaaccgaccgaccgtctgctgggctccaagtcacctgagaggcgaggtgaggtggggaaactaaggcccagagaagtgaggaccccgcagactatcaatcccagtctcttcccctcactccctgtgaagctctccagcatcatcgaggtcccatcaggtggggaaagatgctgttccaggcgcacactagtctacaaggccagagctttctggaagggggcacccttgccctgttggatgaataggcacctctggaagagccaactgtgtgagatggtgcagcccagtggtggcccggcagcagatcaggacgtactgggcgaagagtctcctctggggaagccagccatgctgcacctgccttcagaacagggcgctcctgagaccctccagcgctgcctggaggagaatcaagagctccgagatgccatccggcagagcaaccagattctgcgggagcgctgcgaggagcttctgcatttccaagccagccagagggaggagaaggagttcctcatgtgcaagttccaggaggccaggaaactggtggagagactcggcctggagaagctcgatctgaagaggcagaaggagcaggctctgcgggaggtggagcacctgaagagatgccagcagcagatggctgaggacaaggcctctgtgaaagcccaggtgacgtccttgctcggggagctgcaggagagccagagtcgcttggaggctgccactaaggaatgccaggctctggagggtcg

SEQ ID NO: 142692 - DNA, 960 bp, Homo sapiens
  Payload ID: 8197
  Gene Symbol: IKBKG
  Gene Name: inhibitor of kappa light polypeptide gene enhancer in B-cells, kinase gamma
  ENST ID: ENST00000440286
  CDS Start-End: 209-960
acagactccagaaaggtactggtggcaggggactggtctgctgagtcacagcaaccccacgctccaggccgtttgttcctgctgctccctttgggattaactagagattgaaccggctcaccttgtttcagctcaggccctgcaaccgaccgaccgtctgctgggctccaagtcacctgagaggcgaggtgagcccttgccctgttggatgaataggcacctctggaagagccaactgtgtgagatggtgcagcccagtggtggcccggcagcagatcaggacgtactgggcgaagagtctcctctggggaagccagccatgctgcacctgccttcagaacagggcgctcctgagaccctccagcgctgcctggaggagaatcaagagctccgagatgccatccggcagagcaaccagattctgcgggagcgctgcgaggagcttctgcatttccaagccagccagagggaggagaaggagttcctcatgtgcaagttccaggaggccaggaaactggtggagagactcggcctggagaagctcgatctgaagaggcagaaggagcaggctctgcgggaggtggagcacctgaagagatgccagcagcagatggctgaggacaaggcctctgtgaaagcccaggtgacgtccttgctcggggagctgcaggagagccagagtcgcttggaggctgccactaaggaatgccaggctctggagggtcgggcccgggcggccagcgagcaggcgcggcagctggagagtgagcgcgaggcgctgcagcagcagcacagcgtgcaggtggaccagctgcgcatgcagggccagagcgtggaggccgcgctccgcatggagcgccaggccgcctcggaggagaagaggaagctggcccagttgcaggtggcctatcaccagctcttccaagaatacgacaaccacatcaagagcagcgtggtggg

SEQ ID NO: 142693 - DNA, 693 bp, Homo sapiens
  Payload ID: 8197
  Gene Symbol: IKBKG
  Gene Name: inhibitor of kappa light polypeptide gene enhancer in B-cells, kinase gamma
  ENST ID: ENST00000445622
  CDS Start-End: 280-693
gagctcaacttagcagagcctgtggggccctgcaacaattagttggaaaagctgaggcatggagcaggcacttcctggcttttaagattggggcctgggagatactcaccgatgcacccatgatgatgaatatgtgtgtatccgactgatggaaggcatcgccctggaaaagctcttcccgcaggatcccgcacacctgggtccggctcagggccacctgctctgccatgacgctgtctggtggaagaaaggctcgttaacaagcccttgccctgttggatgaataggcacctctggaagagccaactgtgtgagatggtgcagcccagtggtggcccggcagcagatcaggacgtactgggcgaagagtctcctctggggaagccagccatgctgcacctgccttcagaacagggcgctcctgagaccctccagcgctgcctggaggagaatcaagagctccgagatgccatccggcagagcaaccagattctgcgggagcgctgcgaggagcttctgcatttccaagccagccagagggaggagaaggagttcctcatgtgcaagttccaggaggccaggaaactggtggagagactcggcctggagaagctcgatctgaagaggcagaaggagcaggctctgcgggaggtggagcacctgaagagatgccagcagcagatggctgaggac

SEQ ID NO: 142694 - DNA, 892 bp, Homo sapiens
  Payload ID: 8197
  Gene Symbol: IKBKG
  Gene Name: inhibitor of kappa light polypeptide gene enhancer in B-cells, kinase gamma
  ENST ID: ENST00000413620
  CDS Start-End: 306-892
ggagagggcggggcggccgagcgccccgaggctagacgccgccgtccgagagacgagggggcgtgtaggcggtgacgccctgcaaagtggccggcgtgcttatcattaccgagcttccgcgggcctgcagagcctggcggactcagacttctctccggagcgggatgcggccctaccgcggcctcacacttctcgccggcttcccgagttctcgggggcggggcttgtgtttttacttccggatcccacagctatgacaccggaagccggaagcgtggcacctctggaagagccaactgtgtgagatggtgcagcccagtggtggcccggcagcagatcaggacgtactgggcgaagagtctcctctggggaagccagccatgctgcacctgccttcagaacagggcgctcctgagaccctccagcgctgcctggaggagaatcaagagctccgagatgccatccggcagagcaaccagattctgcgggagcgctgcgaggagcttctgcatttccaagccagccagagggaggagaaggagttcctcatgtgcaagttccaggaggccaggaaactggtggagagactcggcctggagaagctcgatctgaagaggcagaaggagcaggctctgcgggaggtggagcacctgaagagatgccagcagcagatggctgaggacaaggcctctgtgaaagcccaggtgacgtccttgctcggggagctgcaggagagccagagtcgcttggaggctgccactaaggaatgccaggctctggagggtcgggcccgggcggccagcgagcaggcgcggcagctggagagtgagcgcgaggcgctgcagcagcagcacagcgtgcaggtggaccagctgcgcatgcagggccagag

SEQ ID NO: 142695 - DNA, 2299 bp, Homo sapiens
  Payload ID: 8197
  Gene Symbol: IKBKG
  Gene Name: inhibitor of kappa light polypeptide gene enhancer in B-cells, kinase gamma
  Uniprot ID: Q9Y6K9
  ENST ID: ENST00000594239
  CDS Start-End: 455-1714
gttcgcgggtcaagccggccctattgggcagtctcttcttgattcctcccccggagagggcggggcggccgagcgccccgaggctagacgccgccgtccgagagacgagggggcgtgtaggcggtgacgccctgcaaagtggccggcgtgcttatcattaccgagcttccgcgggcctgcagagcctggcggactcagacttctctccggagcgggatgcggccctaccgcggcctcacacttctcgccggcttcccgagttctcgggggcggggcttgtgtttttacttccggatcccacagctatgacaccggaagccggaagcgtggtagggaagggcgaccgcgaaactgggactttctcggagcgccggggccctaccagcgttcacagtccgccgctcccacccttctcacgtctgacggactctgctgacagcccttgccctgttggatgaataggcacctctggaagagccaactgtgtgagatggtgcagcccagtggtggcccggcagcagatcaggacgtactgggcgaagagtctcctctggggaagccagccatgctgcacctgccttcagaacagggcgctcctgagaccctccagcgctgcctggaggagaatcaagagctccgagatgccatccggcagagcaaccagattctgcgggagcgctgcgaggagcttctgcatttccaagccagccagagggaggagaaggagttcctcatgtgcaagttccaggaggccaggaaactggtggagagactcggcctggagaagctcgatctgaagaggcagaaggagcaggctctgcgggaggtggagcacctgaagagatgccagcagcagatggctgaggacaaggcctctgtgaaagcccaggtgacgtccttgctcggggagctgcaggagagccagagtcgcttggaggctgccactaaggaatgccaggctctggagggtcgggcccgggcggccagcgagcaggcgcggcagctggagagtgagcgcgaggcgctgcagcagcagcacagcgtgcaggtggaccagctgcgcatgcagggccagagcgtggaggccgcgctccgcatggagcgccaggccgcctcggaggagaagaggaagctggcccagttgcaggtggcctatcaccagctcttccaagaatacgacaaccacatcaagagcagcgtggtgggcagtgagcggaagcgaggaatgcagctggaagatctcaaacagcagctccagcaggccgaggaggccctggtggccaaacaggaggtgatcgataagctgaaggaggaggccgagcagcacaagattgtgatggagaccgttccggtgctgaaggcccaggcggatatctacaaggcggacttccaggctgagaggcaggcccgggagaagctggccgagaagaaggagctcctgcaggagcagctggagcagctgcagagggagtacagcaaactgaaggccagctgtcaggagtcggccaggatcgaggacatgaggaagcggcatgtcgaggtctcccaggcccccttgccccccgcccctgcctacctctcctctcccctggccctgcccagccagaggaggagcccccccgaggagccacctgacttctgctgtcccaagtgccagtatcaggcccctgatatggacaccctgcagatacatgtcatggagtgcattgagtagggccggccagtgcaaggccactgcctgccgaggacgtgcccgggaccgtgcagtctgcgctttcctctcccgcctgcctagcccaggatgaagggctgggtggccacaactgggatgccacctggagccccacccaggagctggccgcggcaccttacgcttcagctgttgatccgctggtcccctcttttggggtagatgcggccccgatcaggcctgactcgctgctctttttgttcccttctgtctgctcgaaccacttgcctcgggctaatccctccctcttcctccacccggcactggggaagtcaagaatggggcctggggctctcagggagaactgcttcccctggcagagctgggtggccgctcttcctcccaccggacaccgacccgcccgccgctgtgccctgggagtgctgccctcttaccatgcacacgggtgctctccttttgggctgcatgctattccattttgcagccagaccgatgtgtatttaaccagtcactattgatggacatttgggttgtttcccatctttttgttaccataaataatggcatagtaaaaatccttgtgcatta

SEQ ID NO: 142696 - DNA, 1654 bp, Homo sapiens
  Payload ID: 8197
  Gene Symbol: IKBKG
  Gene Name: inhibitor of kappa light polypeptide gene enhancer in B-cells, kinase gamma
  Uniprot ID: Q9Y6K9
  ENST ID: ENST00000611176
  CDS Start-End: 120-1082
aagggcgaccgcgaaactgggactttctcggagcgccggggccctaccagcgttcacagtccgccgctcccacccttctcacgtctgacggactctgctgacagcccttgccctgttggatgaataggcacctctggaagagccaactgtgtgagatggtgcagcccagtggtggcccggcagcagatcaggacgtactgggcgaagagtctcctctggggaagccagccatgctgcacctgccttcagaacagggcgctcctgagaccctccagcgctgcctggaggagaatcaagagctccgagatgccatccggcagagcaaccagattctgcgggagcgctgcgaggagcttctgcatttccaagccagccagagggaggagaaggagttcctcatgtgcaagttccaggaggccaggaaactggtggagagactcggcctggagaagctcgatctgaagaggcagaaggagcaggctctgcgggaggtggagcacctgaagagatgccagcagcagatggctgaggacaaggcctctgtgaaagcccaggtgacgtccttgctcggggagctgcaggagagccagagtcgcttggaggctgccactaaggaatgccaggctctggagggtcggaggaagctggcccagttgcaggtggcctatcaccagctcttccaagaatacgacaaccacatcaagagcagcgtggtgggcagtgagcggaagcgagcggatatctacaaggcggacttccaggctgagaggcaggcccgggagaagctggccgagaagaaggagctcctgcaggagcagctggagcagctgcagagggagtacagcaaactgaaggccagctgtcaggagtcggccaggatcgaggacatgaggaagcggcatgtcgaggtctcccaggcccccttgccccccgcccctgcctacctctcctctcccctggccctgcccagccagaggaggagcccccccgaggagccacctgacttctgctgtcccaagtgccagtatcaggcccctgatatggacaccctgcagatacatgtcatggagtgcattgagtagggccggccagtgcaaggccactgcctgccgaggacgtgcccgggaccgtgcagtctgcgctttcctctcccgcctgcctagcccaggatgaagggctgggtggccacaactgggatgccacctggagccccacccaggagctggccgcggcaccttacgcttcagctgttgatccgctggtcccctcttttggggtagatgcggccccgatcaggcctgactcgctgctctttttgttcccttctgtctgctcgaaccacttgcctcgggctaatccctccctcttcctccacccggcactggggaagtcaagaatggggcctggggctctcagggagaactgcttcccctggcagagctgggtggccgctcttcctcccaccggacaccgacccgcccgccgctgtgccctgggagtgctgccctcttaccatgcacacgggtgctctccttttgggctgcatgctattccattttgcagccagaccgatgtgtatttaaccagtcactattgatggacatttgggttgtttcccatctttttgttaccataaataatggcatagtaaaaa

SEQ ID NO: 142697 - DNA, 1463 bp, Homo sapiens
  Payload ID: 8197
  Gene Symbol: IKBKG
  Gene Name: inhibitor of kappa light polypeptide gene enhancer in B-cells, kinase gamma
  ENST ID: ENST00000619941
  CDS Start-End: 124-1362
agggaagggcgaccgcgaaactgggactttctcggagcgccggggccctaccagcgttcacagtccgccgctcccacccttctcacgtctgacggactctgctgacagcccttgccctgttggatgaataggcacctctggaagagccaactgtgtgagatggtgcagcccagtggtggcccggcagcagatcaggacgtactgggcgaagagtctcctctggggaagccagccatgctgcacctgccttcagaacagggcgctcctgagaccctccagcgctgcctggaggagaatcaagagctccgagatgccatccggcagagcaaccagattctgcgggagcgctgcgaggagcttctgcatttccaagccagccagagggaggagaaggagttcctcatgtgcaagttccaggaggccaggaaactggtggagagactcggcctggagaagctcgatctgaagaggcagaaggagcaggctctgcgggaggtggagcacctgaagagatgccagcagcagatggctgaggacaaggcctctgtgaaagcccaggtgacgtccttgctcggggagctgcaggagagccagagtcgcttggaggctgccactaaggaatgccaggctctggagggtcgggcccgggcggccagcgagcaggcgcggcagctggagagtgagcgcgaggcgctgcagcagcagcacagcgtgcaggtggaccagctgcgcatgcagggccagagcgtggaggccgcgctccgcatggagcgccaggccgcctcggaggagaagaggaagctggcccagttgcaggtggcctatcaccagctcttccaagaatacgacaaccacatcaagagcagcgtgggaatgcagctggaagatctcaaacagcagctccagcaggccgaggaggccctggtggccaaacaggaggtgatcgataagctgaaggaggaggccgagcagcacaagattgtgatggagaccgttccggtgctgaaggcccaggcggatatctacaaggcggacttccaggctgagaggcaggcccgggagaagctggccgagaagaaggagctcctgcaggagcagctggagcagctgcagagggagtacagcaaactgaaggccagctgtcaggagtcggccaggatcgaggacatgaggaagcggcatgtcgaggtctcccaggcccccttgccccccgcccctgcctacctctcctctcccctggccctgcccagccagaggaggagcccccccgaggagccacctgacttctgctgtcccaagtgccagtatcaggcccctgatatggacaccctgcagatacatgtcatggagtgcattgagtagggccggccagtgcaaggccactgcctgccgaggacgtgcccgggaccgtgcagtctgcgctttcctctcccgcctgcctagcccaggatgaagggctgggt

SEQ ID NO: 142698 - DNA, 488 bp, Homo sapiens
  Payload ID: 8197
  Gene Symbol: IKBKG
  Gene Name: inhibitor of kappa light polypeptide gene enhancer in B-cells, kinase gamma
  ENST ID: ENST00000615186
  CDS Start-End: 144-488
agcgttcacagtccgccgctcccacccttctcacgtctgacggactctgctgacagagactcggcctggagaagctcgatctgaagaggcagaaggagcaggctctgcgggaggtggagcacctgaagagatgccagcagcagatggctgaggacaaggcctctgtgaaagcccaggtgacgtccttgctcggggagctgcaggagagccagagtcgcttggaggctgccactaaggaatgccaggctctggagggtcgggcccgggcggccagcgagcaggcgcggcagctggagagtgagcgcgaggcgctgcagcagcagcacagcgtgcaggtggaccagctgcgcatgcagggccagagcgtggaggccgcgctccgcatggagcgccaggccgcctcggaggagaagaggaagctggcccagttgcaggtggcctatcaccagctcttccaagaatacgacaaccacatcaagagcagcgtg

SEQ ID NO: 142699 - DNA, 2103 bp, Homo sapiens
  Payload ID: 8197
  Gene Symbol: IKBKG
  Gene Name: inhibitor of kappa light polypeptide gene enhancer in B-cells, kinase gamma
  Uniprot ID: Q9Y6K9
  ENST ID: ENST00000611071
  CDS Start-End: 259-1518
agcccgttcctgctccgcgcttctggagcactggccaaggcgggccgattcaggacccaggttacttgggcggcgagctggactgtttctactcctccctcctcctccactgcggggtctgaccctactccttgtgtgaggactcctctagttcagagacatattctgttcaccaaacttgactgcgctctatcgaggtcgttaaattcttcggaaatgcctcacatatagtttggcagctagcccttgccctgttggatgaataggcacctctggaagagccaactgtgtgagatggtgcagcccagtggtggcccggcagcagatcaggacgtactgggcgaagagtctcctctggggaagccagccatgctgcacctgccttcagaacagggcgctcctgagaccctccagcgctgcctggaggagaatcaagagctccgagatgccatccggcagagcaaccagattctgcgggagcgctgcgaggagcttctgcatttccaagccagccagagggaggagaaggagttcctcatgtgcaagttccaggaggccaggaaactggtggagagactcggcctggagaagctcgatctgaagaggcagaaggagcaggctctgcgggaggtggagcacctgaagagatgccagcagcagatggctgaggacaaggcctctgtgaaagcccaggtgacgtccttgctcggggagctgcaggagagccagagtcgcttggaggctgccactaaggaatgccaggctctggagggtcgggcccgggcggccagcgagcaggcgcggcagctggagagtgagcgcgaggcgctgcagcagcagcacagcgtgcaggtggaccagctgcgcatgcagggccagagcgtggaggccgcgctccgcatggagcgccaggccgcctcggaggagaagaggaagctggcccagttgcaggtggcctatcaccagctcttccaagaatacgacaaccacatcaagagcagcgtggtgggcagtgagcggaagcgaggaatgcagctggaagatctcaaacagcagctccagcaggccgaggaggccctggtggccaaacaggaggtgatcgataagctgaaggaggaggccgagcagcacaagattgtgatggagaccgttccggtgctgaaggcccaggcggatatctacaaggcggacttccaggctgagaggcaggcccgggagaagctggccgagaagaaggagctcctgcaggagcagctggagcagctgcagagggagtacagcaaactgaaggccagctgtcaggagtcggccaggatcgaggacatgaggaagcggcatgtcgaggtctcccaggcccccttgccccccgcccctgcctacctctcctctcccctggccctgcccagccagaggaggagcccccccgaggagccacctgacttctgctgtcccaagtgccagtatcaggcccctgatatggacaccctgcagatacatgtcatggagtgcattgagtagggccggccagtgcaaggccactgcctgccgaggacgtgcccgggaccgtgcagtctgcgctttcctctcccgcctgcctagcccaggatgaagggctgggtggccacaactgggatgccacctggagccccacccaggagctggccgcggcaccttacgcttcagctgttgatccgctggtcccctcttttggggtagatgcggccccgatcaggcctgactcgctgctctttttgttcccttctgtctgctcgaaccacttgcctcgggctaatccctccctcttcctccacccggcactggggaagtcaagaatggggcctggggctctcagggagaactgcttcccctggcagagctgggtggccgctcttcctcccaccggacaccgacccgcccgccgctgtgccctgggagtgctgccctcttaccatgcacacgggtgctctccttttgggctgcatgctattccattttgcagccagaccgatgtgtatttaaccagtcactattgatggacatttgggttgtttcccatctttttgttaccataaataatggcatagtaaaaatccttgtgcatta

SEQ ID NO: 142700 - DNA, 1972 bp, Homo sapiens
  Payload ID: 8197
  Gene Symbol: IKBKG
  Gene Name: inhibitor of kappa light polypeptide gene enhancer in B-cells, kinase gamma
  ENST ID: ENST00000612051
  CDS Start-End: 2-148
catggcccttgtgatccaggtggggaaactaaggcccagagaagtgaggaccccgcagactatcaatcccagtctcttcccctcactccctgtgaagctctccagcatcatcgaggtcccatcagcccttgccctgttggatgaataggcacctctggaagagccaactgtgtgagatggtgcagcccagtggtggcccggcagcagatcaggacgtactgggcgaagagtctcctctggggaagccagccatgctgcacctgccttcagaacagggcgctcctgagaccctccagcgctgcctggaggagaatcaagagctccgagatgccatccggcagagcaaccagattctgcgggagcgctgcgaggagcttctgcatttccaagccagccagagggaggagaaggagttcctcatgtgcaagttccaggaggccaggaaactggtggagagactcggcctggagaagctcgatctgaagaggcagaaggagcaggctctgcgggaggtggagcacctgaagagatgccagcagcagatggctgaggacaaggcctctgtgaaagcccaggtgacgtccttgctcggggagctgcaggagagccagagtcgcttggaggctgccactaaggaatgccaggctctggagggtcgggcccgggcggccagcgagcaggcgcggcagctggagagtgagcgcgaggcgctgcagcagcagcacagcgtgcaggtggaccagctgcgcatgcagggccagagcgtggaggccgcgctccgcatggagcgccaggccgcctcggaggagaagaggaagctggcccagttgcaggtggcctatcaccagctcttccaagaatacgacaaccacatcaagagcagcgtggtgggcagtgagcggaagcgaggaatgcagctggaagatctcaaacagcagctccagcaggccgaggaggccctggtggccaaacaggaggtgatcgataagctgaaggaggaggccgagcagcacaagattgtgatggagaccgttccggtgctgaaggcccaggcggatatctacaaggcggacttccaggctgagaggcaggcccgggagaagctggccgagaagaaggagctcctgcaggagcagctggagcagctgcagagggagtacagcaaactgaaggccagctgtcaggagtcggccaggatcgaggacatgaggaagcggcatgtcgaggtctcccaggcccccttgccccccgcccctgcctacctctcctctcccctggccctgcccagccagaggaggagcccccccgaggagccacctgacttctgctgtcccaagtgccagtatcaggcccctgatatggacaccctgcagatacatgtcatggagtgcattgagtagggccggccagtgcaaggccactgcctgccgaggacgtgcccgggaccgtgcagtctgcgctttcctctcccgcctgcctagcccaggatgaagggctgggtggccacaactgggatgccacctggagccccacccaggagctggccgcggcaccttacgcttcagctgttgatccgctggtcccctcttttggggtagatgcggccccgatcaggcctgactcgctgctctttttgttcccttctgtctgctcgaaccacttgcctcgggctaatccctccctcttcctccacccggcactggggaagtcaagaatggggcctggggctctcagggagaactgcttcccctggcagagctgggtggccgctcttcctcccaccggacaccgacccgcccgccgctgtgccctgggagtgctgccctcttaccatgcacacgggtgctctccttttgggctgcatgctattccattttgcagccagaccgatgtgtatttaaccagtcactattgatggacatttgggttgtttcccatctttttgttaccataaataatggcatagtaaaaa

SEQ ID NO: 142701 - DNA, 1460 bp, Homo sapiens
  Payload ID: 8197
  Gene Symbol: IKBKG
  Gene Name: inhibitor of kappa light polypeptide gene enhancer in B-cells, kinase gamma
  ENST ID: ENST00000615874
  CDS Start-End: 124-1359
agggaagggcgaccgcgaaactgggactttctcggagcgccggggccctaccagcgttcacagtccgccgctcccacccttctcacgtctgacggactctgctgacagcccttgccctgttggatgaataggcacctctggaagagccaactgtgtgagatggtgcagcccagtggtggcccggcagcagatcaggacgtactgggcgaagagtctcctctggggaagccagccatgctgcacctgccttcagaacagggcgctcctgagaccctccagcgctgcctggaggagaatcaagagctccgagatgccatccggcagagcaaccagattctgcgggagcgctgcgaggagcttctgcatttccaagccagccagagggaggagaaggagttcctcatgtgcaagttccaggaggccaggaaactggtggagagactcggcctggagaagctcgatctgaagaggcagaaggagcaggctctgcgggaggtggagcacctgaagagatgccagcagatggctgaggacaaggcctctgtgaaagcccaggtgacgtccttgctcggggagctgcaggagagccagagtcgcttggaggctgccactaaggaatgccaggctctggagggtcgggcccgggcggccagcgagcaggcgcggcagctggagagtgagcgcgaggcgctgcagcagcagcacagcgtgcaggtggaccagctgcgcatgcagggccagagcgtggaggccgcgctccgcatggagcgccaggccgcctcggaggagaagaggaagctggcccagttgcaggtggcctatcaccagctcttccaagaatacgacaaccacatcaagagcagcgtgggaatgcagctggaagatctcaaacagcagctccagcaggccgaggaggccctggtggccaaacaggaggtgatcgataagctgaaggaggaggccgagcagcacaagattgtgatggagaccgttccggtgctgaaggcccaggcggatatctacaaggcggacttccaggctgagaggcaggcccgggagaagctggccgagaagaaggagctcctgcaggagcagctggagcagctgcagagggagtacagcaaactgaaggccagctgtcaggagtcggccaggatcgaggacatgaggaagcggcatgtcgaggtctcccaggcccccttgccccccgcccctgcctacctctcctctcccctggccctgcccagccagaggaggagcccccccgaggagccacctgacttctgctgtcccaagtgccagtatcaggcccctgatatggacaccctgcagatacatgtcatggagtgcattgagtagggccggccagtgcaaggccactgcctgccgaggacgtgcccgggaccgtgcagtctgcgctttcctctcccgcctgcctagcccaggatgaagggctgggt

SEQ ID NO: 142702 - DNA, 2069 bp, Homo sapiens
  Payload ID: 8197
  Gene Symbol: IKBKG
  Gene Name: inhibitor of kappa light polypeptide gene enhancer in B-cells, kinase gamma
  Uniprot ID: Q9Y6K9
  ENST ID: ENST00000618670
  CDS Start-End: 21-1484
cctgaacgcccatcaagcccatggcccttgtgatccaggtggggaaactaaggcccagagaagtgaggaccccgcagactatcaatcccagtctcttcccctcactccctgtgaagctctccagcatcatcgaggtcccatcaggtggggaaagatgctgttccaggcgcacactagtctacaaggccagagctttctggaagggggcacccttgccctgttggatgaataggcacctctggaagagccaactgtgtgagatggtgcagcccagtggtggcccggcagcagatcaggacgtactgggcgaagagtctcctctggggaagccagccatgctgcacctgccttcagaacagggcgctcctgagaccctccagcgctgcctggaggagaatcaagagctccgagatgccatccggcagagcaaccagattctgcgggagcgctgcgaggagcttctgcatttccaagccagccagagggaggagaaggagttcctcatgtgcaagttccaggaggccaggaaactggtggagagactcggcctggagaagctcgatctgaagaggcagaaggagcaggctctgcgggaggtggagcacctgaagagatgccagcagcagatggctgaggacaaggcctctgtgaaagcccaggtgacgtccttgctcggggagctgcaggagagccagagtcgcttggaggctgccactaaggaatgccaggctctggagggtcgggcccgggcggccagcgagcaggcgcggcagctggagagtgagcgcgaggcgctgcagcagcagcacagcgtgcaggtggaccagctgcgcatgcagggccagagcgtggaggccgcgctccgcatggagcgccaggccgcctcggaggagaagaggaagctggcccagttgcaggtggcctatcaccagctcttccaagaatacgacaaccacatcaagagcagcgtggtgggcagtgagcggaagcgaggaatgcagctggaagatctcaaacagcagctccagcaggccgaggaggccctggtggccaaacaggaggtgatcgataagctgaaggaggaggccgagcagcacaagattgtgatggagaccgttccggtgctgaaggcccaggcggatatctacaaggcggacttccaggctgagaggcaggcccgggagaagctggccgagaagaaggagctcctgcaggagcagctggagcagctgcagagggagtacagcaaactgaaggccagctgtcaggagtcggccaggatcgaggacatgaggaagcggcatgtcgaggtctcccaggcccccttgccccccgcccctgcctacctctcctctcccctggccctgcccagccagaggaggagcccccccgaggagccacctgacttctgctgtcccaagtgccagtatcaggcccctgatatggacaccctgcagatacatgtcatggagtgcattgagtagggccggccagtgcaaggccactgcctgccgaggacgtgcccgggaccgtgcagtctgcgctttcctctcccgcctgcctagcccaggatgaagggctgggtggccacaactgggatgccacctggagccccacccaggagctggccgcggcaccttacgcttcagctgttgatccgctggtcccctcttttggggtagatgcggccccgatcaggcctgactcgctgctctttttgttcccttctgtctgctcgaaccacttgcctcgggctaatccctccctcttcctccacccggcactggggaagtcaagaatggggcctggggctctcagggagaactgcttcccctggcagagctgggtggccgctcttcctcccaccggacaccgacccgcccgccgctgtgccctgggagtgctgccctcttaccatgcacacgggtgctctccttttgggctgcatgctattccattttgcagccagaccgatgtgtatttaaccagtcactattgatggacatttgggttgtttcccatctttttgttaccataaataatggcatagtaaaaatccttgtgcatta

SEQ ID NO: 142703 - DNA, 1949 bp, Homo sapiens
  Payload ID: 8197
  Gene Symbol: IKBKG
  Gene Name: inhibitor of kappa light polypeptide gene enhancer in B-cells, kinase gamma
  ENST ID: ENST00000617207
  CDS Start-End: 121-1377
gaagggcgaccgcgaaactgggactttctcggagcgccggggccctaccagcgttcacagtccgccgctcccacccttctcacgtctgacggactctgctgacagcccttgccctgttggatgaataggcacctctggaagagccaactgtgtgagatggtgcagcccagtggtggcccggcagcagatcaggacgtactgggcgaagagtctcctctggggaagccagccatgctgcacctgccttcagaacagggcgctcctgagaccctccagcgctgcctggaggagaatcaagagctccgagatgccatccggcagagcaaccagattctgcgggagcgctgcgaggagcttctgcatttccaagccagccagagggaggagaaggagttcctcatgtgcaagttccaggaggccaggaaactggtggagagactcggcctggagaagctcgatctgaagaggcagaaggagcaggctctgcgggaggtggagcacctgaagagatgccagcagatggctgaggacaaggcctctgtgaaagcccaggtgacgtccttgctcggggagctgcaggagagccagagtcgcttggaggctgccactaaggaatgccaggctctggagggtcgggcccgggcggccagcgagcaggcgcggcagctggagagtgagcgcgaggcgctgcagcagcagcacagcgtgcaggtggaccagctgcgcatgcagggccagagcgtggaggccgcgctccgcatggagcgccaggccgcctcggaggagaagaggaagctggcccagttgcaggtggcctatcaccagctcttccaagaatacgacaaccacatcaagagcagcgtggtgggcagtgagcggaagcgaggaatgcagctggaagatctcaaacagcagctccagcaggccgaggaggccctggtggccaaacaggaggtgatcgataagctgaaggaggaggccgagcagcacaagattgtgatggagaccgttccggtgctgaaggcccaggcggatatctacaaggcggacttccaggctgagaggcaggcccgggagaagctggccgagaagaaggagctcctgcaggagcagctggagcagctgcagagggagtacagcaaactgaaggccagctgtcaggagtcggccaggatcgaggacatgaggaagcggcatgtcgaggtctcccaggcccccttgccccccgcccctgcctacctctcctctcccctggccctgcccagccagaggaggagcccccccgaggagccacctgacttctgctgtcccaagtgccagtatcaggcccctgatatggacaccctgcagatacatgtcatggagtgcattgagtagggccggccagtgcaaggccactgcctgccgaggacgtgcccgggaccgtgcagtctgcgctttcctctcccgcctgcctagcccaggatgaagggctgggtggccacaactgggatgccacctggagccccacccaggagctggccgcggcaccttacgcttcagctgttgatccgctggtcccctcttttggggtagatgcggccccgatcaggcctgactcgctgctctttttgttcccttctgtctgctcgaaccacttgcctcgggctaatccctccctcttcctccacccggcactggggaagtcaagaatggggcctggggctctcagggagaactgcttcccctggcagagctgggtggccgctcttcctcccaccggacaccgacccgcccgccgctgtgccctgggagtgctgccctcttaccatgcacacgggtgctctccttttgggctgcatgctattccattttgcagccagaccgatgtgtatttaaccagtcactattgatggacatttgggttgtttcccatctttttgttaccataaataatggcatagtaaaaa

SEQ ID NO: 142704 - DNA, 552 bp, Homo sapiens
  Payload ID: 8197
  Gene Symbol: IKBKG
  Gene Name: inhibitor of kappa light polypeptide gene enhancer in B-cells, kinase gamma
  ENST ID: ENST00000492469
  CDS Start-End: 1-546
gagaatcaagagctccgagatgccatccggcagagcaaccagattctgcgggagcgctgcgaggagcttctgcatttccaagccagccagagggaggagaaggagttcctcatgtgcaagttccaggaggccaggaaactggtggagagactcggcctggagaagctcgatctgaagaggcagaaggagcaggctctgcgggaggtggagcacctgaagagatgccagcaggaaaggacacaggttacggtgagcgaaggctcagggcgcacagggcgggctccaggagagaccaggcgtgagcttcagcggctcctcgcccaggggagttgtgcagacggcacctgtttctttcggcaacagtgtgggacagcgagcacggagtcacaaccgggaagctcaccccagccgtggcggccggggttttcacggggggtgggccgcgtgggcaccgagcgcctgcgtggccaaccctggtcactcggctgtagccaccagaggtccagctgtgtggcccaaggctccccccataaatcgtgtcattagcacaga

SEQ ID NO: 142705 - DNA, 2877 bp, Homo sapiens
  Payload ID: 8198
  Gene Symbol: INMT-FAM188B
  Gene Name: INMT-FAM188B readthrough (NMD candidate)
  ENST ID: ENST00000458257
  CDS Start-End: 15-440
atttcagggacaccatgaagggtggcttcactgggggtgatgagtaccagaagcacttcctgcccagggactacttggctacttactacagcttcgatggcagcccctcacccgaggccgagatgctgaagtttaacttggaatgtctccacaagaccttcggccctggcctccaaggggacacgctgattgacattggctcaggtcctaccatctaccaagttcttgctgcctgtgattccttccaagacatcactctctccgactttaccgaccgcaaccgggaggagctggaaaagtggctgaagaaggagccgggggcctatgactggaccccagcggtgaaattcgcctgtgagctggaaggaaacagggacatggagttaattaataacacgactcttgtcaattcacgacatcctgccatcactggtccttgagaggccatcttttattaactaatgaatcaatagaaataatataaaagatgctgaagaaacaaatacactcatgacacccagagcacgacggatacttatcattacctgcgttgttctcatctgccatgtccttgaccttcccattcccagggcttaaagaagacatgtgtgaccatggaccaggaacgcccacgctctgacctcagcataaacaacagaaatgatcttcgaaaggttttgcatcttgaatttctctataaggagaacaaggcaaaggaaaatcctctaaaaacaagccttgaactcatcaccagatactttctggatcactttggaaatacggctaacaatttcactcaagataccccaatccctgcactctcagttccaaagaaaaataacaaagtgccatcaagatgctcagagactacactggtaaatatatatgacctttcagatgaagatgcaggatggagaacatcattgtcagaaacaagcaaagccagacatgacaatcttgatggagatgtacttggtaattttgtatcatctaaaaggcccccgcacaaaagtaagcccatgcagacggtcccgggtgaaactcctgtgttgacttctgcatgggagaagatagacaagcttcactcggagccttccttggatgtgaagaggatgggagagaattccaggccaaagtctggtctgattgtgcgaggcatgatgtctgggcccatcgccagctccccacaggattcttttcacagacactatctgagacggtcctcaccgtcaagcagctccacccaaccccaagaagagagccggaaggtccctgagctctttgtctgcacccaacaggacattctggcttcgagcaacagctccccctccaggacctccctgggtcagcttagtgaactgaccgtagaaaggcagaaaaccactgccagcagccctccccatctgcccagcaaacggctgcccccatgggacagggccaggccgagggatccctccgaggacaccccagcagtggacggcagcacagacacggacaggatgcccttgaagctctacttgcctggtggtaattccaggatgacccaggagaggctggaaagagcgttcaaacggcagggcagccagcccgcacctgtcaggaaaaatcagttgctgccgtctgacaaggtggatggtgagctgggtgccctgcggctcgaggatgtggaggatgagttgataagggaagaggtcatcctgtcgccagtcccatcagtgctcaagttgcagacagcatcaaaaccaattgacctctcagtagcaaaggaaataaagacccttctgtttggttccagcttttgctgtttcaatgaagaatggaaacttcagagtttttcctttagtaacacagcctcattaaaatacggcatagtgcagaacaagggtggtccttgcggagtcctggcagctgtccaaggctgtgtcctacagaaactcctgtttgaaggagatagcaaagccgactgtgctcagggactgcagccttcagatgcccaccggacccgctgcctcgtcctggccctcgcagacattgtgtggcgggcagggggccgagagagagccgttgttgcactggcttcgagaacacagcagttcagtccaacagggaaatacaaagcagatggagtcttagaaacacttacgcttcacagtttgacctgctatgaggacctggtgacttttcttcaacaaagcattcatcagtttgaagtgggcccctatggctgcatcctgctcaccctttctgccatcctgtccaggtctacagagctcatccgccaggactttgatgtccccaccagccacctgattggagcacatggctactgtacacaggaacttgtcaatctgctcctgactgggaaagctgtgtccaacgttttcaacgatgtggttgagctggattctggggatgggaacatcacacttctcagaggcattgctgcacgcagtgatattggcttcttatctctctttgagcattacaacatgtgccaggttggctgcttcctgaagaccccgaggttccccatctgggtggtttgcagtgagagccacttcagcatcctctttagcctgcagccggggctcctgcgtgactggaggactgagaggctctttgacttgtactactacgatggcctggccaaccagcaggagcagatccggctgaccattgacaccacccaaaccatctctgaggacacagacaacgaccttgtcccacccctcgagctctgcatcagaaccaagtggaagggggcatcagtgaactggaacggctcagaccccatcctgtgaccgttggatgtgggtaaaccctgtggtccaccactcatcacctcatcaccgaggatgacagctgaaccccaagcct

SEQ ID NO: 142706 - DNA, 975 bp, Homo sapiens
  Payload ID: 8198
  Gene Symbol: INMT-FAM188B
  Gene Name: INMT-FAM188B readthrough (NMD candidate)
  ENST ID: ENST00000451002
  CDS Start-End: 1-367
gaagggtggcttcactgggggtgatgagtaccagaagcacttcctgcccagggactacttggctacttactacagcttcgatggcagcccctcacccgaggccgagatgctgaagtttaacttggaatgtctccacaagaccttcggccctggaggcctccaaggggacacgctgattgacattggctcaggtcctaccatctaccaagttcttgctgcctgtgattccttccaagacatcactctctccgactttaccgaccgcaaccgggaggagctggaaaagtggctgaagaaggagccgggggcctatgactggaccccagcggtgaaattcgcctgtgagctggaaggaaacagggcttaaagaagacatgtgtgaccatggaccaggaacgcccacgctctgacctcagcataaacaacagaaatgatcttcgaaaggttttgcatcttgaatttctctataaggagaacaaggcaaaggaaaatcctctaaaaacaagccttgaactcatcaccagatactttctggatcactttggaaatacggctaacaatttcactcaagataccccaatccctgcactctcagttccaaagaaaaataacaaagtgccatcaagatgctcagagactacactggtaaatatatatgacctttcagatgaagatgcaggatggagaacatcattgtcagaaacaagcaaagccagacatgacaatcttgatggagatgtacttggtaattttgtatcatctaaaaggcccccgcacaaaagtaagcccatgcagacggtcccgggtgaaactcctgtgttgacttctgcatgggagaagatagacaagcttcactcggagccttccttggatgtgaagaggatgggagagaattccaggccaaagtctggtctgattgtgcgaggcatgatgtctgggcccatcgccagctccccacaggattcttttcacaga

SEQ ID NO: 142707 - DNA, 3698 bp, Homo sapiens
  Payload ID: 8199
  Gene Symbol: INCENP
  Gene Name: inner centromere protein antigens 135/155kDa
  Uniprot ID: Q9NQS7
  ENST ID: ENST00000278849
  CDS Start-End: 178-2922
agttttgaaaatcatagttttcgcccgcgctgcgccgcctggttgctcctcccgtgcggtgagtcccgaaggcccggagccaagtgggtctgggcaagcggggccttacctagggataccaccggacttggatcggagcagccttcaggggacgtggcgcagtcgaacagagccaccatggggacgacggccccagggcccattcacctgctggagctatgtgaccagaagctcatggagtttctctgcaacatggataataaggacttggtgtggcttgaggaaatccaagaggaggccgagcgcatgttcaccagagaattcagcaaagagccagagctgatgcccaaaacaccttctcagaagaaccgacggaagaagagacggatttcttatgttcaggatgaaaacagagatcccatcaggagaaggttatcccgcagaaagtctcggagcagccagctgagctcccgacgcctccgcagcaaggacagtgtagagaagctggctacagtggtcggggagaacggctccgtcctgcggcgtgtgacccgtgctgcggctgcagctgccgcggctaccatggcattggctgcaccttcttcacccacccctgagtctcccacgatgctgactaagaagcccgaggataaccacacccagtgccagctggtgcctgtggtggagatcggcatcagtgagcgccagaatgctgagcagcatgtcacccagctcatgtccaccgagcctctgccccgcactctgtccccgactccagcttcagccacagctccaacctcccagggcatcccgacatcagatgaggaatcaacacctaagaagtcgaaggccaggatactggagtccatcacagtgagctccctgatggctacaccccaggaccccaagggtcaaggggtcgggacggggcggtctgcgtctaagctcaggattgcgcaggtctcccctggcccacgggactcgccagcctttccagattctccatggcgggagcgggtgctggctcccatcctgccggataacttctccacgcccacgggctctcgcacggactctcaatcggtgcggcacagcccgatcgccccgtcttccccgagtccccaagtcttagcccagaagtactctctggtggccaaacaggaaagtgttgtccgcagggcgagcagaaggcttgccaagaagactgccgaagagccagctgcctctggccgcatcatctgtcacagttacctggagaggctcctgaatgttgaggtgccccagaaagttggttctgagcagaaggaaccccccgaggaggctgagcctgtggcggcagctgagccagaggtccctgagaacaatggaaataactcgtggccccacaatgacacggagattgccaacagcacacccaacccgaagcctgcagccagcagcccggaaacaccctctgcagggcagcaagaggccaagacggaccaagcagatggacccagagagccaccgcagagtgccaggaggaagcgcagctacaagcaggccgtgagtgagctggacgaggagcagcacctggaggatgaggagctgcagccccccaggagcaagaccccttcctcaccctgcccagccagcaaggtggtacggcccctccggacctttctgcacacagtgcagaggaaccagatgctcatgaccccgacctcagccccacgcagcgtcatgaagtcctttattaagcgcaacactcccctgcgcatggaccccaaggagaaggagcggcagcgcctggagaatctgcggcggaaggaggaggccgagcagctgcgcaggcagaaggtggaggaggacaagcggcggcggctggaggaggtgaagctgaagcgtgaggaacgcctccgcaaggtgctgcaggcccgcgagcgggtggagcagatgaaggaggagaagaagaagcagattgagcagaagtttgctcagatcgacgagaagactgagaaggccaaggaggagcggctggcagaggagaaggccaagaaaaaggcggcggccaagaagatggaggaggtggaagcacgcaggaagcaggaagaggaggcacgtaggctcaggtggctgcagcaggaggaggaagagcggcggcaccaagagctgctgcagaagaagaaggaagaggagcaggagcggctgcggaaggcggccgaggctaagcggctggcagagcagcgggagcaggagcggcgggagcaggagcggcgcgagcaggagcggcgcgagcaggagcggcgggagcaggagcggcgcgagcaggagcgacagctggcagagcaggagcgtcggcgggagcaggagcggctccaggccgagagggagctgcaggagcgggagaaggccctgcggctgcagaaggagcagctgcagagggaactggaggagaagaagaagaaggaagagcagcagcgtctggctgagcggcagctgcaggaggagcaagagaagaaagccaaggaggcagcaggggccagcaaggccctgaatgtgactgtggacgtgcagtctccagcttgtacctcatatcagatgactccgcaagggcacagggcccctcccaagatcaacccagataactacgggatggatctgaatagcgacgactccaccgatgatgaggcccatccccggaagcccatccccacctgggcccgaggcaccccgctcagccaggctatcattcaccagtactaccacccaccgaaccttctggagctctttggaaccattctcccactggacttggaggatatcttcaagaagagcaagccccgctatcacaagcgcaccagctctgctgtctggaactcaccgcccctgcagggcgccagggtccccagcagcctggcctacagcctgaagaagcactgaggctggcctgcggccttcttggcagcctcgcctcctgtccatgtctatctgtctgtctgtcggtctctgtcttggtctgttgccctccttcttggcatgccattgtggagggcttggccaggtgtatataaacgtcctctgtgctgggtgtttctgctgcaggtggcaggtggccccaggcctgtttggaggatgggctgggtgggtgggtggggaagaaatgggcccagccccacatggcctgcagacagtgctctgtaaatagttgttttaatttagctgaatgttagcattttagtctttggcattttagcgtttgggaggtagattaataaagtatattccttcaagcctgctgttgataccatgaagactgggcgcctcagtcccagccctgtagctgtgtgtcttgggccaccagtggcctgcaggacgaaggtactgttccatcacctgcggtgtgcctcaggatcaccaggtgcaggcccccaccctcggagatgctgctgcagtgagtggttccactgcctggataacccttgaggaacacgtcagttactgtcacgatggggcaggtggagctccttcctattttttggggtgctccctgtttgtaaaggggagtttgttcattgggaaagacctgggtcttgacacggccctgccacttagtcccctaccctctccattccccaggctccacccgtgctgctcaggtgcaaatggacttgagagcatctatgtgctggtgaagcatgaggtctgagtagaaaagg

SEQ ID NO: 142708 - DNA, 3964 bp, Homo sapiens
  Payload ID: 8199
  Gene Symbol: INCENP
  Gene Name: inner centromere protein antigens 135/155kDa
  Uniprot ID: Q9NQS7
  ENST ID: ENST00000394818
  CDS Start-End: 203-2959
cttgccgaggattggctgagccttcagttttgaaaatcatagttttcgcccgcgctgcgccgcctggttgctcctcccgtgcggtgagtcccgaaggcccggagccaagtgggtctgggcaagcggggccttacctagggataccaccggacttggatcggagcagccttcaggggacgtggcgcagtcgaacagagccaccatggggacgacggccccagggcccattcacctgctggagctatgtgaccagaagctcatggagtttctctgcaacatggataataaggacttggtgtggcttgaggaaatccaagaggaggccgagcgcatgttcaccagagaattcagcaaagagccagagctgatgcccaaaacaccttctcagaagaaccgacggaagaagagacggatttcttatgttcaggatgaaaacagagatcccatcaggagaaggttatcccgcagaaagtctcggagcagccagctgagctcccgacgcctccgcagcaaggacagtgtagagaagctggctacagtggtcggggagaacggctccgtcctgcggcgtgtgacccgtgctgcggctgcagctgccgcggctaccatggcattggctgcaccttcttcacccacccctgagtctcccacgatgctgactaagaagcccgaggataaccacacccagtgccagctggtgcctgtggtggagatcggcatcagtgagcgccagaatgctgagcagcatgtcacccagctcatgtccaccgagcctctgccccgcactctgtccccgactccagcttcagccacagctccaacctcccagggcatcccgacatcagatgaggaatcaacacctaagaagtcgaaggccaggatactggagtccatcacagtgagctccctgatggctacaccccaggaccccaagggtcaaggggtcgggacggggcggtctgcgtctaagctcaggattgcgcaggtctcccctggcccacgggactcgccagcctttccagattctccatggcgggagcgggtgctggctcccatcctgccggataacttctccacgcccacgggctctcgcacggactctcaatcggtgcggcacagcccgatcgccccgtcttccccgagtccccaagtcttagcccagaagtactctctggtggccaaacaggaaagtgttgtccgcagggcgagcagaaggcttgccaagaagactgccgaagagccagctgcctctggccgcatcatctgtcacagttacctggagaggctcctgaatgttgaggtgccccagaaagttggttctgagcagaaggaaccccccgaggaggctgagcctgtggcggcagctgagccagaggtccctgagaacaatggaaataactcgtggccccacaatgacacggagattgccaacagcacacccaacccgaagcctgcagccagcagcccggaaacaccctctgcagggcagcaagaggccaagacggaccaagcagatggacccagagagccaccgcagagtgccaggaggaagcgcagctacaagcaggccgtgagtgagctggacgaggagcagcacctggaggatgaggagctgcagccccccaggagcaagaccccttcctcaccctgcccagccagcaaggtggtacggcccctccggacctttctgcacacagtgcagaggaaccagatgctcatgaccccgacctcagccccacgcagcgtcatgaagtcctttattaagcgcaacactcccctgcgcatggaccccaagtgcagcttcgtcgagaaggagcggcagcgcctggagaatctgcggcggaaggaggaggccgagcagctgcgcaggcagaaggtggaggaggacaagcggcggcggctggaggaggtgaagctgaagcgtgaggaacgcctccgcaaggtgctgcaggcccgcgagcgggtggagcagatgaaggaggagaagaagaagcagattgagcagaagtttgctcagatcgacgagaagactgagaaggccaaggaggagcggctggcagaggagaaggccaagaaaaaggcggcggccaagaagatggaggaggtggaagcacgcaggaagcaggaagaggaggcacgtaggctcaggtggctgcagcaggaggaggaagagcggcggcaccaagagctgctgcagaagaagaaggaagaggagcaggagcggctgcggaaggcggccgaggctaagcggctggcagagcagcgggagcaggagcggcgggagcaggagcggcgcgagcaggagcggcgcgagcaggagcggcgggagcaggagcggcgcgagcaggagcgacagctggcagagcaggagcgtcggcgggagcaggagcggctccaggccgagagggagctgcaggagcgggagaaggccctgcggctgcagaaggagcagctgcagagggaactggaggagaagaagaagaaggaagagcagcagcgtctggctgagcggcagctgcaggaggagcaagagaagaaagccaaggaggcagcaggggccagcaaggccctgaatgtgactgtggacgtgcagtctccagcttgtacctcatatcagatgactccgcaagggcacagggcccctcccaagatcaacccagataactacgggatggatctgaatagcgacgactccaccgatgatgaggcccatccccggaagcccatccccacctgggcccgaggcaccccgctcagccaggctatcattcaccagtactaccacccaccgaaccttctggagctctttggaaccattctcccactggacttggaggatatcttcaagaagagcaagccccgctatcacaagcgcaccagctctgctgtctggaactcaccgcccctgcagggcgccagggtccccagcagcctggcctacagcctgaagaagcactgaggctggcctgcggccttcttggcagcctcgcctcctgtccatgtctatctgtctgtctgtcggtctctgtcttggtctgttgccctccttcttggcatgccattgtggagggcttggccaggtgtatataaacgtcctctgtgctgggtgtttctgctgcaggtggcaggtggccccaggcctgtttggaggatgggctgggtgggtgggtggggaagaaatgggcccagccccacatggcctgcagacagtgctctgtaaatagttgttttaatttagctgaatgttagcattttagtctttggcattttagcgtttgggaggtagattaataaagtatattccttcaagcctgctgttgataccatgaagactgggcgcctcagtcccagccctgtagctgtgtgtcttgggccaccagtggcctgcaggacgaaggtactgttccatcacctgcggtgtgcctcaggatcaccaggtgcaggcccccaccctcggagatgctgctgcagtgagtggttccactgcctggataacccttgaggaacacgtcagttactgtcacgatggggcaggtggagctccttcctattttttggggtgctccctgtttgtaaaggggagtttgttcattgggaaagacctgggtcttgacacggccctgccacttagtcccctaccctctccattccccaggctccacccgtgctgctcaggtgcaaatggacttgagagcatctatgtgctggtgaagcatgaggtctgagtagaaaaggggtatcccttgagaccaccttgggaccagtgcttgcaagcagcgagatatttccccagcaaaaccaggcagctgctaattaaatgcttagaaccaatgaaagctggctgtggtcctgcctgtgagctgcctactgctgccttctgaatgcatatatctgctactgtagccccgggttgtcaaactatggcctgtgggccaaatccagccacagtcggttctttaaagtt

SEQ ID NO: 142709 - DNA, 570 bp, Homo sapiens
  Payload ID: 8199
  Gene Symbol: INCENP
  Gene Name: inner centromere protein antigens 135/155kDa
  ENST ID: ENST00000533896
  CDS Start-End: 70-570
agttttgaaaatcatagttttcgcccgcgctgcgccgcctggttgctcctcccgtgcgacagagccaccatggggacgacggccccagggcccattcacctgctggagctatgtgaccagaagctcatggagtttctctgcaacatggataataaggacttggtgtggcttgaggaaatccaagaggaggccgagcgcatgttcaccagagaattcagcaaagagccagagctgatgcccaaaacaccttctcagaagaaccgacggaagaagagacggatttcttatgttcaggatgaaaacagagatcccatcaggagaaggttatcccgcagaaagtctcggagcagccagctgagctcccgacgcctccgcagcaaggacagtgtagagaagctggctacagtggtcggggagaacggctccgtcctgcggcgtgtgacccgtgctgcggctgcagctgccgcggctaccatggcattggctgcaccttcttcacccacccctgagtctcccacgatgctgactaagaagcccgaggataaccacacccagtgccagctggtgcct

SEQ ID NO: 142710 - DNA, 2613 bp, Homo sapiens
  Payload ID: 8200
  Gene Symbol: IMMT
  Gene Name: inner membrane protein, mitochondrial
  ENST ID: ENST00000254636
  CDS Start-End: 298-2277
agtgctgaaggtcgacgggcgagaactacagttcccgtcaggacgagcggagcggcggcttgttgcatccttaataaggagagttgtctctgtgggaagtttgtcctccgtccattgcgaccatgccgcagatactctacttcaggcagctctgggttgactactggcaaaattgctggagctggccttttgtttgttggtggaggtattggtggcactatcctatatgccaaatgggattcccatttccgggaaagtgtagagaaaaccataccttactcagacaaactcttcgagatggttcttggtcctgcagcttataatgttccattgccaaagaaatcgattcagtcgggtccactaaaaatctctagtgtatcagaagtaatgaaagaatctaaacagcctgcctcacaactccaaaaacaaaagggagatactccagcttcagcaacagcaggtgataccctgtcggtcccagcccctgcagttcagcctgaggaatctttaaaaactgatcaccctgaaattggtgaaggaaaacccacacctgcactttcagaagcatcctcatcttctataagggagcgaccacctgaagaagttgcagctcgccttgcacaacaggaaaaacaagaacaagttaaaattgagtctctagccaagagcttagaagatgctctgaggcaaactgcaagtgtcactctgcaggctattgcagctcagaatgctgcggtccaggctgtcaatgcacactccaacatattgaaagccgccatggacaattctgagattgcaggcgagaagaaatctgctcagtggcgcacagtggagggtgcattgaaggaacgcagaaaggcagtagatgaagctgccgatgcccttctcaaagccaaagaagagttagagaagatgaaaagtgtgattgaaaatgcaaagaaaaaagaggttgctggggccaagcctcatataactgctgcagagggtaaacttcacaacatgatagttgatctggataatgtggtcaaaaaggtccaagcagctcagtctgaggctaaggttgtatctcagtatcatgagctggtggtccaagctcgggatgactttaaacgagagctggacagtattactccagaagtccttcctgggtggaaaggaatgagtgtttcagacttagctgacaagctctctactgatgatctgaactccctcattgctcatgcacatcgtcgtattgatcagctgaacagagagctggcagaacagaaggccaccgaaaagcagcacatcacgttagccttggagaaacaaaagctggaagaaaagcgggcatttgactctgcagtagcaaaagcattagaacatcacagaagtgaaatacaggctgaacaggacagaaagatagaagaagtcagagatgccatggaaaatgaaatgagaacccagcttcgccgacaggcagctgcccacactgatcacttgcgagatgtccttagggtacaagaacaggaattgaagtctgaatttgagcagaacctgtctgagaaactctctgaacaagaattacaatttcgtcgtctcagtcaagagcaagttgacaactttactctggatataaatactgcctatgccagactcagaggaatcgaacaggctgttcagagccatgcagttgctgaagaggaagccagaaaagcccaccaactctggctttcagtggaggcattaaagtacagcatgaagacctcatctgcagaaacacctactatcccgctgggtagtgcagttgaggccatcaaagccaactgttctgataatgaattcacccaagctttaaccgcagctatccctccagagtccctgacccgtggggtgtacagtgaagagacccttagagcccgtttctatgctgttcaaaaactggcccgaagggtagcaatgattgatgaaaccagaaatagcttgtaccagtacttcctctcctacctacagtccctgctcctattcccacctcagcaactgaagccgcccccagagctctgccctgaggatataaacacatttaaattactgtcatatgcttcctattgcattgagcatggtgatctggagctagcagcaaagtttgtcaatcagctgaagggggaatccagacgagtggcacaggactggctgaaggaagcccgaatgaccctagaaacgaaacagatagtggaaatcctgacagcatatgccagcgccgtaggaataggaaccactcaggtgcagccagagtgaggtttaggaagattttcataaagtcatatttcatgtcaaaggaaatcagcagtgatagatgaagggttcgcagcgagagtcccggacttgtctagaaatgagcaggtttacaagtactgttctaaatgttaacacctgttgcatttatattctttccatttgctatcatgtcagtgaacgccaggagtgctttctttgcaacttgtgtaacattttctgttttttcaggttttactgatgaggcttgtgaggccaatcaaaataatgtttgtgatctctactactgttgattttgccctcggagcaaactgaataaagcaacaagatgaaaactga

SEQ ID NO: 142711 - DNA, 2515 bp, Homo sapiens
  Payload ID: 8200
  Gene Symbol: IMMT
  Gene Name: inner membrane protein, mitochondrial
  ENST ID: ENST00000409051
  CDS Start-End: 52-2187
gcgccgccgcggcagctcgagtccaccagcagcgccgtccgcttgaccgagatgctgcgggcctgtcagttatcgggtgtgaccgccgccgcccagagttgtctctgtgggaagtttgtcctccgtccattgcgaccatgccgcagatactctacttcaggcagctctgggttgactactggcaaaattgctggagctggccttttgtttgttggtggaggtattggtggcactatcctatatgccaaatgggattcccatttccgggaaagtgtagagaaaaccataccttactcagacaaactcttcgagatggttcttggtcctgcagcttataatgttccattgccaaagaaatcgattcagtcgggtccactaaaaatctctagtgtatcagaagtaatgaaagaatctaaacagcctgcctcacaactccaaaaacaaaagggagatactccagcttcagcaacagaagcatcctcatcttctataagggagcgaccacctgaagaagttgcagctcgccttgcacaacaggaaaaacaagaacaagttaaaattgagtctctagccaagagcttagaagatgctctgaggcaaactgcaagtgtcactctgcaggctattgcagctcagaatgctgcggtccaggctgtcaatgcacactccaacatattgaaagccgccatggacaattctgagattgcaggcgagaagaaatctgctcagtggcgcacagtggagggtgcattgaaggaacgcagaaaggcagtagatgaagctgccgatgcccttctcaaagccaaagaagagttagagaagatgaaaagtgtgattgaaaatgcaaagaaaaaagaggttgctggggccaagcctcatataactgctgcagagggtaaacttcacaacatgatagttgatctggataatgtggtcaaaaaggtccaagcagctcagtctgaggctaaggttgtatctcagtatcatgagctggtggtccaagctcgggatgactttaaacgagagctggacagtattactccagaagtccttcctgggtggaaaggaatgagtgtttcagacttagctgacaagctctctactgatgatctgaactccctcattgctcatgcacatcgtcgtattgatcagctgaacagagagctggcagaacagaaggccaccgaaaagcagcacatcacgttagccttggagaaacaaaagctggaagaaaagcgggcatttgactctgcagtagcaaaagcattagaacatcacagaagtgaaatacaggctgaacaggacagaaagatagaagaagtcagagatgccatggaaaatgaaatgagaacccagcttcgccgacaggcagctgcccacactgatcacttgcgagatgtccttagggtacaagaacaggaattgaagtctgaatttgagcagaacctgtctgagaaactctctgaacaagaattacaatttcgtcgtctcagtcaagagcaagttgacaactttactctggatataaatactgcctatgccagactcagaggaatcgaacaggctgttcagagccatgcagttgctgaagaggaagccagaaaagcccaccaactctggctttcagtggaggcattaaagtacagcatgaagacctcatctgcagaaacacctactatcccgctgggtagtgcagttgaggccatcaaagccaactgttctgataatgaattcacccaagctttaaccgcagctatccctccagagtccctgacccgtggggtgtacagtgaagagacccttagagcccgtttctatgctgttcaaaaactggcccgaagggtagcaatgattgatgaaaccagaaatagcttgtaccagtacttcctctcctacctacagtccctgctcctattcccacctcagcaactgaagccgcccccagagctctgccctgaggatataaacacatttaaattactgtcatatgcttcctattgcattgagcatggtgatctggagctagcagcaaagtttgtcaatcagctgaagggggaatccagacgagtggcacaggactggctgaaggaagcccgaatgaccctagaaacgaaacagatagtggaaatcctgacagcatatgccagcgccgtaggaataggaaccactcaggtgcagccagagtgaggtttaggaagattttcataaagtcatatttcatgtcaaaggaaatcagcagtgatagatgaagggttcgcagcgagagtcccggacttgtctagaaatgagcaggtttacaagtactgttctaaatgttaacacctgttgcatttatattctttccatttgctatcatgtcagtgaacgccaggagtgctttctttgcaacttgtgtaacattttctgttttttcaggttttactgatgaggcttgtgaggccaatcaaaataatgtttgtgatctctactactgttgattttgccctcggagcaaactgaataaagcaacaagatg

SEQ ID NO: 142712 - DNA, 1408 bp, Homo sapiens
  Payload ID: 8200
  Gene Symbol: IMMT
  Gene Name: inner membrane protein, mitochondrial
  ENST ID: ENST00000409258
  CDS Start-End: 52-495
gcgccgccgcggcagctcgagtccaccagcagcgccgtccgcttgaccgagatgctgcgggcctgtcagttatcgggtgtgaccgccgccgcccagagttgtctctgtgggaagtttgtcctccgtccattgcgaccatgccgcagatactctacttcaggcagctctgggttgactactggcaaaattgctggagctggccttttgtttgttggtggaggtattggtggcactatcctatatgccaaatgggattcccatttccgggaaagtgtagagaaaaccataccttactcagacaaactcttcgagatggttcttggtcctgcagcttataatgttccattgccaaagaaatcgattcagtcgggtccactaaaaatctctagtgtatcagaagtaatgaaagaatctaaacagcctgcctcacaactccaaaaacaaaagggagatactccagcttcagcaacaggaaagtataaataccatgagtaacatatatttatagcacctacagaagcggctcaaattatttctgcagcaggtgataccctgtcggtcccagcccctgcagttcagcctgaggaatctttaaaaactgatcaccctgaaattggtgaaggaaaacccacacctgcactttcagaagaagcatcctcatcttctataagggagcgaccacctgaagaagttgcagctcgccttgcacaacaggaaaaacaagaacaagttaaaattgagtctctagccaagagcttagaagatgctctgaggcaaactgcaagtgtcactctgcaggctattgcagctcagaatgctgcggtccaggctgtcaatgcacactccaacatattgaaagccgccatggacaattctgagattgcaggcgagaagaaatctgctcagtggcgcacagtggagggtgcattgaaggaacgcagaaaggcagtagatgaagctgccgatgcccttctcaaagccaaagaagagttagagaagatgaaaagtgtgattgaaaatgcaaagaaaaaagaggttgctggggccaagcctcatataactgctgcagagggtaaacttcacaacatgatagttgatctggataatgtggtcaaaaaggtatgtttcctaagtcttatagtattttatattttaaaatataatctcttaaaggattttaaggatttaggaaaacagcaaattcctaccatctccccgtcttttctcctgcaaagtgtattcgttgttactgttttaaaaaatttgccttggctgggtgtggtggttcacacctgtaatcccagcactttggcaggccgaggtgggcagataacttgagcccaggagtttgagaccagcctgggcaacatggtgaaactctgtttctacaaaaaatacaaaaataagt

SEQ ID NO: 142713 - DNA, 3001 bp, Homo sapiens
  Payload ID: 8200
  Gene Symbol: IMMT
  Gene Name: inner membrane protein, mitochondrial
  Uniprot ID: Q16891
  ENST ID: ENST00000410111
  CDS Start-End: 389-2665
aattctctttaagagtcacagctgtccattttccacgtgcggctgaagaatggatttcagagcgctctccctccggcagtgttcacctagtaaccccttccggataaggacctgcagcccgggcgcgacccggaaagggaatccgcccttttcgcctccttcgcgccaatcgcctggagttggcgtttccgcagccgggacacagcccaccctctaagagccgcggagtcggggacggtagaaggggccgcgcgtgcgcagtggcgtccgctgtgcttccggtgcgccgggcgcggacgcgggcacgcacacacgcaagcacgcctccacttaactcgcgccgccgcggcagctcgagtccaccagcagcgccgtccgcttgaccgagatgctgcgggcctgtcagttatcgggtgtgaccgccgccgcccagagttgtctctgtgggaagtttgtcctccgtccattgcgaccatgccgcagatactctacttcaggcagctctgggttgactactggcaaaattgctggagctggccttttgtttgttggtggaggtattggtggcactatcctatatgccaaatgggattcccatttccgggaaagtgtagagaaaaccataccttactcagacaaactcttcgagatggttcttggtcctgcagcttataatgttccattgccaaagaaatcgattcagtcgggtccactaaaaatctctagtgtatcagaagtaatgaaagaatctaaacagcctgcctcacaactccaaaaacaaaagggagatactccagcttcagcaacagcacctacagaagcggctcaaattatttctgcagcaggtgataccctgtcggtcccagcccctgcagttcagcctgaggaatctttaaaaactgatcaccctgaaattggtgaaggaaaacccacacctgcactttcagaagaagcatcctcatcttctataagggagcgaccacctgaagaagttgcagctcgccttgcacaacaggaaaaacaagaacaagttaaaattgagtctctagccaagagcttagaagatgctctgaggcaaactgcaagtgtcactctgcaggctattgcagctcagaatgctgcggtccaggctgtcaatgcacactccaacatattgaaagccgccatggacaattctgagattgcaggcgagaagaaatctgctcagtggcgcacagtggagggtgcattgaaggaacgcagaaaggcagtagatgaagctgccgatgcccttctcaaagccaaagaagagttagagaagatgaaaagtgtgattgaaaatgcaaagaaaaaagaggttgctggggccaagcctcatataactgctgcagagggtaaacttcacaacatgatagttgatctggataatgtggtcaaaaaggtccaagcagctcagtctgaggctaaggttgtatctcagtatcatgagctggtggtccaagctcgggatgactttaaacgagagctggacagtattactccagaagtccttcctgggtggaaaggaatgagtgtttcagacttagctgacaagctctctactgatgatctgaactccctcattgctcatgcacatcgtcgtattgatcagctgaacagagagctggcagaacagaaggccaccgaaaagcagcacatcacgttagccttggagaaacaaaagctggaagaaaagcgggcatttgactctgcagtagcaaaagcattagaacatcacagaagtgaaatacaggctgaacaggacagaaagatagaagaagtcagagatgccatggaaaatgaaatgagaacccagcttcgccgacaggcagctgcccacactgatcacttgcgagatgtccttagggtacaagaacaggaattgaagtctgaatttgagcagaacctgtctgagaaactctctgaacaagaattacaatttcgtcgtctcagtcaagagcaagttgacaactttactctggatataaatactgcctatgccagactcagaggaatcgaacaggctgttcagagccatgcagttgctgaagaggaagccagaaaagcccaccaactctggctttcagtggaggcattaaagtacagcatgaagacctcatctgcagaaacacctactatcccgctgggtagtgcagttgaggccatcaaagccaactgttctgataatgaattcacccaagctttaaccgcagctatccctccagagtccctgacccgtggggtgtacagtgaagagacccttagagcccgtttctatgctgttcaaaaactggcccgaagggtagcaatgattgatgaaaccagaaatagcttgtaccagtacttcctctcctacctacagtccctgctcctattcccacctcagcaactgaagccgcccccagagctctgccctgaggatataaacacatttaaattactgtcatatgcttcctattgcattgagcatggtgatctggagctagcagcaaagtttgtcaatcagctgaagggggaatccagacgagtggcacaggactggctgaaggaagcccgaatgaccctagaaacgaaacagatagtggaaatcctgacagcatatgccagcgccgtaggaataggaaccactcaggtgcagccagagtgaggtttaggaagattttcataaagtcatatttcatgtcaaaggaaatcagcagtgatagatgaagggttcgcagcgagagtcccggacttgtctagaaatgagcaggtttacaagtactgttctaaatgttaacacctgttgcatttatattctttccatttgctatcatgtcagtgaacgccaggagtgctttctttgcaacttgtgtaacattttctgttttttcaggttttactgatgaggcttgtgaggccaatcaaaataatgtttgtgatctctactactgttgattttgccctcggagcaaactgaataaagcaacaagatgaaaactga

SEQ ID NO: 142714 - DNA, 2670 bp, Homo sapiens
  Payload ID: 8200
  Gene Symbol: IMMT
  Gene Name: inner membrane protein, mitochondrial
  Uniprot ID: Q16891
  ENST ID: ENST00000449247
  CDS Start-End: 91-2334
gcgggcacgcacacacgcaagcacgcctccacttaactcgcgccgccgcggcagctcgagtccaccagcagcgccgtccgcttgaccgagatgctgcgggcctgtcagttatcgggtgtgaccgccgccgcccagagttgtctctgtgggaagtttgtcctccgtccattgcgaccatgccgcagatactctacttcaggcagctctgggttgactactggcaaaattgctggagctggccttttgtttgttggtggaggtattggtggcactatcctatatgccaaatgggattcccatttccgggaaagtgtagagaaaaccataccttactcagacaaactcttcgagatggttcttggtcctgcagcttataatgttccattgccaaagaaatcgattcagtcgggtccactaaaaatctctagtgtatcagaagtaatgaaagaatctaaacagcctgcctcacaactccaaaaacaaaagggagatactccagcttcagcaacagcaggtgataccctgtcggtcccagcccctgcagttcagcctgaggaatctttaaaaactgatcaccctgaaattggtgaaggaaaacccacacctgcactttcagaagaagcatcctcatcttctataagggagcgaccacctgaagaagttgcagctcgccttgcacaacaggaaaaacaagaacaagttaaaattgagtctctagccaagagcttagaagatgctctgaggcaaactgcaagtgtcactctgcaggctattgcagctcagaatgctgcggtccaggctgtcaatgcacactccaacatattgaaagccgccatggacaattctgagattgcaggcgagaagaaatctgctcagtggcgcacagtggagggtgcattgaaggaacgcagaaaggcagtagatgaagctgccgatgcccttctcaaagccaaagaagagttagagaagatgaaaagtgtgattgaaaatgcaaagaaaaaagaggttgctggggccaagcctcatataactgctgcagagggtaaacttcacaacatgatagttgatctggataatgtggtcaaaaaggtccaagcagctcagtctgaggctaaggttgtatctcagtatcatgagctggtggtccaagctcgggatgactttaaacgagagctggacagtattactccagaagtccttcctgggtggaaaggaatgagtgtttcagacttagctgacaagctctctactgatgatctgaactccctcattgctcatgcacatcgtcgtattgatcagctgaacagagagctggcagaacagaaggccaccgaaaagcagcacatcacgttagccttggagaaacaaaagctggaagaaaagcgggcatttgactctgcagtagcaaaagcattagaacatcacagaagtgaaatacaggctgaacaggacagaaagatagaagaagtcagagatgccatggaaaatgaaatgagaacccagcttcgccgacaggcagctgcccacactgatcacttgcgagatgtccttagggtacaagaacaggaattgaagtctgaatttgagcagaacctgtctgagaaactctctgaacaagaattacaatttcgtcgtctcagtcaagagcaagttgacaactttactctggatataaatactgcctatgccagactcagaggaatcgaacaggctgttcagagccatgcagttgctgaagaggaagccagaaaagcccaccaactctggctttcagtggaggcattaaagtacagcatgaagacctcatctgcagaaacacctactatcccgctgggtagtgcagttgaggccatcaaagccaactgttctgataatgaattcacccaagctttaaccgcagctatccctccagagtccctgacccgtggggtgtacagtgaagagacccttagagcccgtttctatgctgttcaaaaactggcccgaagggtagcaatgattgatgaaaccagaaatagcttgtaccagtacttcctctcctacctacagtccctgctcctattcccacctcagcaactgaagccgcccccagagctctgccctgaggatataaacacatttaaattactgtcatatgcttcctattgcattgagcatggtgatctggagctagcagcaaagtttgtcaatcagctgaagggggaatccagacgagtggcacaggactggctgaaggaagcccgaatgaccctagaaacgaaacagatagtggaaatcctgacagcatatgccagcgccgtaggaataggaaccactcaggtgcagccagagtgaggtttaggaagattttcataaagtcatatttcatgtcaaaggaaatcagcagtgatagatgaagggttcgcagcgagagtcccggacttgtctagaaatgagcaggtttacaagtactgttctaaatgttaacacctgttgcatttatattctttccatttgctatcatgtcagtgaacgccaggagtgctttctttgcaacttgtgtaacattttctgttttttcaggttttactgatgaggcttgtgaggccaatcaaaataatgtttgtgatctctactactgttgattttgccctcggagcaaactgaataaagcaacaagatgaaaactga

SEQ ID NO: 142715 - DNA, 2627 bp, Homo sapiens
  Payload ID: 8200
  Gene Symbol: IMMT
  Gene Name: inner membrane protein, mitochondrial
  Uniprot ID: Q16891
  ENST ID: ENST00000442664
  CDS Start-End: 22-2295
agcgccgtccgcttgaccgagatgctgcgggcctgtcagttatcgggtgtgaccgccgccgcccagagttgtctctgtgggaagtttgtcctccgtccattgcgaccatgccgcagatactctacttcaggcagctctgggttgactactggcaaaattgctggagctggccttttgtttgttggtggaggtattggtggcactatcctatatgccaaatgggattcccatttccgggaaagtgtagagaaaaccataccttactcagacaaactcttcgagatggttcttggtcctgcagcttataatgttccattgccaaagaaatcgattcagtcgggtccactaaaaatctctagtgtatcagaagtaatgaaagaatctaaacagcctgcctcacaactccaaaaacaaaagggagatactccagcttcagcaacagcacctacagaagcggctcaaattatttctgcagcaggtgataccctgtcggtcccagcccctgcagttcagcctgaggaatctttaaaaactgatcaccctgaaattggtgaaggaaaacccacacctgcactttcagaagcatcctcatcttctataagggagcgaccacctgaagaagttgcagctcgccttgcacaacaggaaaaacaagaacaagttaaaattgagtctctagccaagagcttagaagatgctctgaggcaaactgcaagtgtcactctgcaggctattgcagctcagaatgctgcggtccaggctgtcaatgcacactccaacatattgaaagccgccatggacaattctgagattgcaggcgagaagaaatctgctcagtggcgcacagtggagggtgcattgaaggaacgcagaaaggcagtagatgaagctgccgatgcccttctcaaagccaaagaagagttagagaagatgaaaagtgtgattgaaaatgcaaagaaaaaagaggttgctggggccaagcctcatataactgctgcagagggtaaacttcacaacatgatagttgatctggataatgtggtcaaaaaggtccaagcagctcagtctgaggctaaggttgtatctcagtatcatgagctggtggtccaagctcgggatgactttaaacgagagctggacagtattactccagaagtccttcctgggtggaaaggaatgagtgtttcagacttagctgacaagctctctactgatgatctgaactccctcattgctcatgcacatcgtcgtattgatcagctgaacagagagctggcagaacagaaggccaccgaaaagcagcacatcacgttagccttggagaaacaaaagctggaagaaaagcgggcatttgactctgcagtagcaaaagcattagaacatcacagaagtgaaatacaggctgaacaggacagaaagatagaagaagtcagagatgccatggaaaatgaaatgagaacccagcttcgccgacaggcagctgcccacactgatcacttgcgagatgtccttagggtacaagaacaggaattgaagtctgaatttgagcagaacctgtctgagaaactctctgaacaagaattacaatttcgtcgtctcagtcaagagcaagttgacaactttactctggatataaatactgcctatgccagactcagaggaatcgaacaggctgttcagagccatgcagttgctgaagaggaagccagaaaagcccaccaactctggctttcagtggaggcattaaagtacagcatgaagacctcatctgcagaaacacctactatcccgctgggtagtgcagttgaggccatcaaagccaactgttctgataatgaattcacccaagctttaaccgcagctatccctccagagtccctgacccgtggggtgtacagtgaagagacccttagagcccgtttctatgctgttcaaaaactggcccgaagggtagcaatgattgatgaaaccagaaatagcttgtaccagtacttcctctcctacctacagtccctgctcctattcccacctcagcaactgaagccgcccccagagctctgccctgaggatataaacacatttaaattactgtcatatgcttcctattgcattgagcatggtgatctggagctagcagcaaagtttgtcaatcagctgaagggggaatccagacgagtggcacaggactggctgaaggaagcccgaatgaccctagaaacgaaacagatagtggaaatcctgacagcatatgccagcgccgtaggaataggaaccactcaggtgcagccagagtgaggtttaggaagattttcataaagtcatatttcatgtcaaaggaaatcagcagtgatagatgaagggttcgcagcgagagtcccggacttgtctagaaatgagcaggtttacaagtactgttctaaatgttaacacctgttgcatttatattctttccatttgctatcatgtcagtgaacgccaggagtgctttctttgcaacttgtgtaacattttctgttttttcaggttttactgatgaggcttgtgaggccaatcaaaataatgtttgtgatctctactactgttgattttgccctcggagcaaactgaataaagcaacaagatgaaaa

SEQ ID NO: 142716 - DNA, 2172 bp, Homo sapiens
  Payload ID: 8200
  Gene Symbol: IMMT
  Gene Name: inner membrane protein, mitochondrial
  ENST ID: ENST00000419070
  CDS Start-End: 1-1840
gattcagtcgggtccactaaaaatctctagtgtatcagaagtaatgaaagaatctaaacagcctgcctcacaactccaaaaacaaaagggagatactccagcttcagcaacagcaggtgataccctgtcggtcccagcccctgcagttcagcctgaggaatctttaaaaactgatcaccctgaaattggtgaaggaaaacccacacctgcactttcagctctagccaagagcttagaagatgctctgaggcaaactgcaagtgtcactctgcaggctattgcagctcagaatgctgcggtccaggctgtcaatgcacactccaacatattgaaagccgccatggacaattctgagattgcaggcgagaagaaatctgctcagtggcgcacagtggagggtgcattgaaggaacgcagaaaggcagtagatgaagctgccgatgcccttctcaaagccaaagaagagttagagaagatgaaaagtgtgattgaaaatgcaaagaaaaaagaggttgctggggccaagcctcatataactgctgcagagggtaaacttcacaacatgatagttgatctggataatgtggtcaaaaaggtccaagcagctcagtctgaggctaaggttgtatctcagtatcatgagctggtggtccaagctcgggatgactttaaacgagagctggacagtattactccagaagtccttcctgggtggaaaggaatgagtgtttcagacttagctgacaagctctctactgatgatctgaactccctcattgctcatgcacatcgtcgtattgatcagctgaacagagagctggcagaacagaaggccaccgaaaagcagcacatcacgttagccttggagaaacaaaagctggaagaaaagcgggcatttgactctgcagtagcaaaagcattagaacatcacagaagtgaaatacaggctgaacaggacagaaagatagaagaagtcagagatgccatggaaaatgaaatgagaacccagcttcgccgacaggcagctgcccacactgatcacttgcgagatgtccttagggtacaagaacaggaattgaagtctgaatttgagcagaacctgtctgagaaactctctgaacaagaattacaatttcgtcgtctcagtcaagagcaagttgacaactttactctggatataaatactgcctatgccagactcagaggaatcgaacaggctgttcagagccatgcagttgctgaagaggaagccagaaaagcccaccaactctggctttcagtggaggcattaaagtacagcatgaagacctcatctgcagaaacacctactatcccgctgggtagtgcagttgaggccatcaaagccaactgttctgataatgaattcacccaagctttaaccgcagctatccctccagagtccctgacccgtggggtgtacagtgaagagacccttagagcccgtttctatgctgttcaaaaactggcccgaagggtagcaatgattgatgaaaccagaaatagcttgtaccagtacttcctctcctacctacagtccctgctcctattcccacctcagcaactgaagccgcccccagagctctgccctgaggatataaacacatttaaattactgtcatatgcttcctattgcattgagcatggtgatctggagctagcagcaaagtttgtcaatcagctgaagggggaatccagacgagtggcacaggactggctgaaggaagcccgaatgaccctagaaacgaaacagatagtggaaatcctgacagcatatgccagcgccgtaggaataggaaccactcaggtgcagccagagtgaggtttaggaagattttcataaagtcatatttcatgtcaaaggaaatcagcagtgatagatgaagggttcgcagcgagagtcccggacttgtctagaaatgagcaggtttacaagtactgttctaaatgttaacacctgttgcatttatattctttccatttgctatcatgtcagtgaacgccaggagtgctttctttgcaacttgtgtaacattttctgttttttcaggttttactgatgaggcttgtgaggccaatcaaaataatgtttgtgatctctactactgttgattttgccctcggagcaaactgaataaagcaacaagatgaaaa

SEQ ID NO: 142717 - DNA, 1520 bp, Homo sapiens
  Payload ID: 8200
  Gene Symbol: IMMT
  Gene Name: inner membrane protein, mitochondrial
  ENST ID: ENST00000620815
  CDS Start-End: 83-1201
gcacacacgcaagcacgcctccacttaactcgcgccgccgcggcagctcgagtccaccagcagcgccgtccgcttgaccgagatgctgcgggcctgtcagttatcgggtgtgaccgccgccgcccagagttgtctctgtgggaagtttgtcctccgtccattgcgaccatgccgcagatactctacttcaggcagctctgggttgactactggcaaaattgctggagctggccttttgtttgttggtggaggtattggtggcactatcctatatgccaaatgggattcccatttccgggaaagtgtagagaaaaccataccttactcagacaaactcttcgagatggttcttggtcctgcagcttataatgttccattgccaaagaaatcgattcagtcgggtccactaaaaatctctagtgtatcagaagtaatgaaagaatctaaacagcctgcctcacaactccaaaaacaaaagggagatactccagcttcagcaacagcaggtgataccctgtcggtcccagcccctgcagttcagcctgaggaatctttaaaaactgatcaccctgaaattggtgaaggaaaacccacacctgcactttcagaagcatcctcatcttctataagggagcgaccacctgaagaagttgcagctcgccttgcacaacaggaaaaacaagaacaagttaaaattgagtctctagccaagagcttagaagatgctctgaggcaaactgcaagtgtcactctgcaggctattgcagctatccctccagagtccctgacccgtggggtgtacagtgaagagacccttagagcccgtttctatgctgttcaaaaactggcccgaagggtagcaatgattgatgaaaccagaaatagcttgtaccagtacttcctctcctacctacagtccctgctcctattcccacctcagcaactgaagccgcccccagagctctgccctgaggatataaacacatttaaattactgtcatatgcttcctattgcattgagcatggtgatctggagctagcagcaaagtttgtcaatcagctgaagggggaatccagacgagtggcacaggactggctgaaggaagcccgaatgaccctagaaacgaaacagatagtggaaatcctgacagcatatgccagcgccgtaggaataggaaccactcaggtgcagccagagtgaggtttaggaagattttcataaagtcatatttcatgtcaaaggaaatcagcagtgatagatgaagggttcgcagcgagagtcccggacttgtctagaaatgagcaggtttacaagtactgttctaaatgttaacacctgttgcatttatattctttccatttgctatcatgtcagtgaacgccaggagtgctttctttgcaacttgtgtaacattttctgttttttcaggttttactgatgaggcttgtgaggccaatcaaaataatgtttgtgatctctactactgttgattttgccctcggagcaaactgaataaagc

SEQ ID NO: 142718 - DNA, 795 bp, Homo sapiens
  Payload ID: 8201
  Gene Symbol: IMMP1L
  Gene Name: inner mitochondrial membrane peptidase subunit 1
  Uniprot ID: Q96LU5
  ENST ID: ENST00000278200
  CDS Start-End: 197-697
gaaaagtgcgccctacgaaaggacggtcgacttcggcggggcccaggtgagaaaggcccacctgtgtcctggttgagggtctccagggttctttggggcccgaggaatttcagacctgaacaatcaggtggacaacttcttgtgactttgggtattctgaaattactgccaatggtggcagagtctacatagaactatgcttcgtggtgttctggggaaaacctttcgacttgttggctatactattcaatatggctgtatagctcattgtgcttttgaatacgttggtggtgttgtcatgtgttctggaccatcaatggagcctacaattcaaaattcagatattgtctttgcagaaaatcttagtcgacatttttatggtatccaaagaggtgacattgtgattgcaaaaagcccaagtgatccaaaatcaaatatttgtaaaagagtaattggtttggaaggagacaaaatcctcaccactagtccatcagatttctttaaaagccatagttatgtgccaatgggtcatgtttggttagaaggtgacaatctacagaattctacagattccaggtgctatggacctattccatatggactaataagaggacgaatcttctttaagatttggcctctgagtgattttggatttttacgtgccagccctaatggccacagattttctgatgattagtaagcatttattcttttgacttgattattgtctccttttcatgtgaatttattactcccgttgaaaccgtgtacttaccaataaactatttgctattc

SEQ ID NO: 142719 - DNA, 475 bp, Homo sapiens
  Payload ID: 8201
  Gene Symbol: IMMP1L
  Gene Name: inner mitochondrial membrane peptidase subunit 1
  ENST ID: ENST00000529749
  CDS Start-End: 155-475
aggacggtcgacttcggcggggcccaggtgagaaaggcccacctgtgtcctggttgagggtctccagggttctttggggcccgagcatcttgactctactgtgcctggatgtagctgtgtgttttgccaatggtggcagagtctacatagaactatgcttcgtggtgttctggggaaaacctttcgacttgttggctatactattcaatatggctgtatagctcattgtgcttttgaatacgttggtggtgttgtcatgtgttctggaccatcaatggagcctacaattcaaaattcagatattgtctttgcagaaaatcttagtcgacatttttatggtatccaaagaggtgacattgtgattgcaaaaagcccaagtgatccaaaatcaaatatttgtaaaagagtaattggtttggaaggagacaaaatcctcaccactagtccatcagatttctttaaaagccatagttat

SEQ ID NO: 142720 - DNA, 314 bp, Homo sapiens
  Payload ID: 8201
  Gene Symbol: IMMP1L
  Gene Name: inner mitochondrial membrane peptidase subunit 1
  ENST ID: ENST00000533642
  CDS Start-End: 134-307
aaccaatcggaaggcgtattgctgaaaagtgcgccctacgaaaggacggtcgacttcggcggggcccaggtgagaaaggcccacctgtgtcctggttgagggtctccagggttctttggggcccgaggtgccaatgggtcatgtttggttagaaggtgacaatctacagaattctacagattccaggtgctatggacctattccatatggactaataagaggacgaatcttctttaagatttggcctctgagtgattttggatttttacgtgccagccctaatggccacagattttctgatgattagtaagcat

SEQ ID NO: 142721 - DNA, 437 bp, Homo sapiens
  Payload ID: 8201
  Gene Symbol: IMMP1L
  Gene Name: inner mitochondrial membrane peptidase subunit 1
  ENST ID: ENST00000531331
  CDS Start-End: 1-91
ttgtaaaagagtaattggtttggaaggagacaaaatcctcaccactagtccatcagatttctttaaaagccatagttatcatttcagataagagatactcaacctgcaacttatagaggtggatcagcaaagatgcctgctttaattttaaaagatctgtgccaatgggtcatgtttggttagaaggtgacaatctacagaattctacagattccaggtgctatggacctattccatatggactaataagaggacgaatcttctttaagatttggcctctgagtgattttggatttttacgtgccagccctaatggccacagattttctgatgattagtaagcatttattcttttgacttgattattgtctccttttcatgtgaatttattactcccgttgaaaccgtgtacttaccaataaactatttgctattca

SEQ ID NO: 142722 - DNA, 612 bp, Homo sapiens
  Payload ID: 8201
  Gene Symbol: IMMP1L
  Gene Name: inner mitochondrial membrane peptidase subunit 1
  ENST ID: ENST00000534812
  CDS Start-End: 340-513
cttcggcggggcccaggtgagaaaggcccacctgtgtcctggttgagggtctccagggttctttggggcccgaggtgaagcgacttccagtcatttggaaaggatgggatgaaaaggaaccttggtgataattttgatgtctgcaagatttagtaccagtgtaatgggattatcggtaacaccttcactgcagaaaaagccacctggcgctataactggcagcaactgagaactaatcctttcccatctcttggatgtcattcatgaagctcaaagctatttctgccctgctaactgtgattaattttataaacaacaacaacaaaaaatcaggtgccaatgggtcatgtttggttagaaggtgacaatctacagaattctacagattccaggtgctatggacctattccatatggactaataagaggacgaatcttctttaagatttggcctctgagtgattttggatttttacgtgccagccctaatggccacagattttctgatgattagtaagcatttattcttttgacttgattattgtctccttttcatgtgaatttattactcccgttgaaaccgtgtacttaccaataaactatttgctattca

SEQ ID NO: 142723 - DNA, 552 bp, Homo sapiens
  Payload ID: 8201
  Gene Symbol: IMMP1L
  Gene Name: inner mitochondrial membrane peptidase subunit 1
  ENST ID: ENST00000530023
  CDS Start-End: 265-552
gcgtattgctgaaaagtgcgccctacgaaaggacggtcgacttcggcggggcccaggtgagaaaggcccacctgtgtcctggttgagggtctccagggttctttggggcccgaggaatttcagacctgaacaatcaggtggacaacttcttgtgactttgggtattctgaaattactcatcttgactctactgtgcctggatgtagctgtgtgttttgtgtgtatcctgttcatggccaatggtggcagagtctacatagaactatgcttcgtggtgttctggggaaaacctttcgacttgttggctatactattcaatatggctgtatagctcattgtgcttttgaatacgttggtggtgttgtcatgtgttctggaccatcaatggagcctacaattcaaaattcagatattgtctttgcagaaaatcttagtcgacatttttatggtatccaaagaggtgacattgtgattgcaaaaagcccaagtgatccaaaatcaaatatttgtaaaagagtaattggtttggaaggagacaaaatcctcaccact

SEQ ID NO: 142724 - DNA, 469 bp, Homo sapiens
  Payload ID: 8201
  Gene Symbol: IMMP1L
  Gene Name: inner mitochondrial membrane peptidase subunit 1
  ENST ID: ENST00000526776
  CDS Start-End: 86-370
gagaaaggcccacctgtgtcctggttgagggtctccagggttctttggggcccgaggccaatggtggcagagtctacatagaactatgcttcgtggtgttctggggaaaacctttcgacttgttggctatactattcaatatggctgtatagctcattgtgcttttgaatacgttggtggtgttgtcatggtgccaatgggtcatgtttggttagaaggtgacaatctacagaattctacagattccaggtgctatggacctattccatatggactaataagaggacgaatcttctttaagatttggcctctgagtgattttggatttttacgtgccagccctaatggccacagattttctgatgattagtaagcatttattcttttgacttgattattgtctccttttcatgtgaatttattactcccgttgaaaccgtgtacttaccaataaactatttgctattca

SEQ ID NO: 142725 - DNA, 685 bp, Homo sapiens
  Payload ID: 8201
  Gene Symbol: IMMP1L
  Gene Name: inner mitochondrial membrane peptidase subunit 1
  Uniprot ID: Q96LU5
  ENST ID: ENST00000532287
  CDS Start-End: 86-586
gagaaaggcccacctgtgtcctggttgagggtctccagggttctttggggcccgaggccaatggtggcagagtctacatagaactatgcttcgtggtgttctggggaaaacctttcgacttgttggctatactattcaatatggctgtatagctcattgtgcttttgaatacgttggtggtgttgtcatgtgttctggaccatcaatggagcctacaattcaaaattcagatattgtctttgcagaaaatcttagtcgacatttttatggtatccaaagaggtgacattgtgattgcaaaaagcccaagtgatccaaaatcaaatatttgtaaaagagtaattggtttggaaggagacaaaatcctcaccactagtccatcagatttctttaaaagccatagttatgtgccaatgggtcatgtttggttagaaggtgacaatctacagaattctacagattccaggtgctatggacctattccatatggactaataagaggacgaatcttctttaagatttggcctctgagtgattttggatttttacgtgccagccctaatggccacagattttctgatgattagtaagcatttattcttttgacttgattattgtctccttttcatgtgaatttattactcccgttgaaaccgtgtacttaccaataaactatttgctattca

SEQ ID NO: 142726 - DNA, 1205 bp, Homo sapiens
  Payload ID: 8202
  Gene Symbol: IMMP2L
  Gene Name: inner mitochondrial membrane peptidase subunit 2
  Uniprot ID: Q96T52
  ENST ID: ENST00000331762
  CDS Start-End: 130-657
cggcggagggcggggtctgcgcggggacttcccccgggctgagctgcgcagcggggttttggccaaattgggcgagggcacaaaataaccacttaccccttctcaccgaggaagagcgggagaaagggtatggcacagtcacaagggtgggtgaaaagatacatcaaggccttttgtaaaggcttctttgtggcggtgcctgtggcagtgactttcttggatcgggtcgcctgtgtggcaagagtagaaggagcatcgatgcagccttctttgaatcctggggggagccagtcatctgatgtggtgcttttgaaccactggaaagtgaggaattttgaagtacaccgtggtgacattgtatcattggtgtctcctaaaaacccagaacagaagatcattaagagagtgattgctcttgaaggagatattgtcagaaccataggacacaaaaaccggtatgtcaaagtcccccgtggtcacatctgggttgaaggtgatcatcatggacacagttttgacagtaattcttttgggccggtttccctaggacttctgcatgcccatgccacacatatcctgtggcccccagagcgctggcagaaattggaatctgttcttcctccagagcgcttaccagtacagagagaagaggaatgactgcatgaatctacctgagttgctggcattgggaggccagttactggaaaggaatggaaaaaagaagcctccaaaagggaaaaacttctgacaatatgatgctgtgcgagaaatatttacagcacattaaaacgatctgtattattaaataaataattttcaaatgttaaacagtattaaatggcacctgattttgtgttaaattttagttccctgttgtttaatgcccccaaaatatgcagacctttgggaatataaaaatattgcacccacatgtcttaatggggctgaatttcagattatttgttacatatacttattatattgattgttgggttttgattttggtgcttgctgctgaaataaattgaaaattaatattcaataaaaatgatgtatttgtcacttgctgttaaggtagaacaagaaggaacacatattatacacataatgatgggaattacattgtgatttgtactatctacaaaggagtaactgccagttaggaagaacagtaaacagtgatgttaaaataaaacaatgatttg

SEQ ID NO: 142727 - DNA, 1522 bp, Homo sapiens
  Payload ID: 8202
  Gene Symbol: IMMP2L
  Gene Name: inner mitochondrial membrane peptidase subunit 2
  Uniprot ID: Q96T52
  ENST ID: ENST00000405709
  CDS Start-End: 444-971
cggccgcgagtcctgcgtgatcgcgagcatgtgtgcgtgcgcgtgtttatctgaggcgcgtgcggcggccaccccagcctagtcctcttcttggtgccactggctaactaggttgagaaaccggcgccacaggcggcacacctggcccggagctggcccgctcctccccgccgagccggcgccccaacaacgcgccctctcccagtcctcacaaaggggcctagtccggcccccggctctggccgtgagggagcgctgtgggggcgcgctgccttctgcctggaagtgttgggcaggtggtgggagagcgtcaggcttgaacaacatgattttaaagcacgtgtctgtctgtcgttttttacttttagggttttggccaaattgggcgagggcacaaaataaccacttaccccttctcaccgaggaagagcgggagaaagggtatggcacagtcacaagggtgggtgaaaagatacatcaaggccttttgtaaaggcttctttgtggcggtgcctgtggcagtgactttcttggatcgggtcgcctgtgtggcaagagtagaaggagcatcgatgcagccttctttgaatcctggggggagccagtcatctgatgtggtgcttttgaaccactggaaagtgaggaattttgaagtacaccgtggtgacattgtatcattggtgtctcctaaaaacccagaacagaagatcattaagagagtgattgctcttgaaggagatattgtcagaaccataggacacaaaaaccggtatgtcaaagtcccccgtggtcacatctgggttgaaggtgatcatcatggacacagttttgacagtaattcttttgggccggtttccctaggacttctgcatgcccatgccacacatatcctgtggcccccagagcgctggcagaaattggaatctgttcttcctccagagcgcttaccagtacagagagaagaggaatgactgcatgaatctacctgagttgctggcattgggaggccagttactggaaaggaatggaaaaaagaagcctccaaaagggaaaaacttctgacaatatgatgctgtgcgagaaatatttacagcacattaaaacgatctgtattattaaataaataattttcaaatgttaaacagtattaaatggcacctgattttgtgttaaattttagttccctgttgtttaatgcccccaaaatatgcagacctttgggaatataaaaatattgcacccacatgtcttaatggggctgaatttcagattatttgttacatatacttattatattgattgttgggttttgattttggtgcttgctgctgaaataaattgaaaattaatattcaataaaaatgatgtatttgtcacttgctgttaaggtagaacaagaaggaacacatattatacacataatgatgggaattacattgtgatttgtactatctacaaaggagtaactgccagttaggaagaacagtaaacagtgatgttaaaataaaacaatgatttgcta

SEQ ID NO: 142728 - DNA, 1164 bp, Homo sapiens
  Payload ID: 8202
  Gene Symbol: IMMP2L
  Gene Name: inner mitochondrial membrane peptidase subunit 2
  Uniprot ID: Q96T52
  ENST ID: ENST00000447215
  CDS Start-End: 77-409
gggttttggccaaattgggcgagggcacaaaataaccacttaccccttctcaccgaggaagagcgggagaaagggtatggcacagtcacaagggtgggtgaaaagatacatcaaggccttttgtaaaggcttctttgtggcggtgcctgtggcagtgactttcttggatcgggtcgcctgtgtggcaagagtagaaggagcatcgatgcagccttctttgaatcctggggggagccagtcatctgatgtggtgcttttgaaccactggaaagtgaggaattttgaagtacaccgtggtgacattgtatcattggtgtctcctaaaaacccagaacagaagatcattaagagagtgattgctcttgaaggagatattgtcagagatgggagaaaactgaaaaggatatgaaacagaaacttccgaatcagtgacaagaatgaaagctttagatgataagattgtaacaatcaggtgtttaagcagcctttagtaatgtcgtatttattgtacttgctgataaatcaagaacaattgttgacattcagcaagtaaatactgtgtggcatgatgtgtctcattgtgatcgctttctttaaacaagttgtagccaggcctatacaatgtggtagccaaaatgctttgactactacattgaggaagttttctgaccctgttttctaaaaaaacttgatcctaaagtatttgtattaatgatagtacacatattaactaatctcactgaaatgaacctcagtcagttttagagcagattctaggctagcagttctcacagcatggccagaggatcccaggggatccccactgggggcctatgagattaaaactactttcctaataatactaaagtgttacttgccgtttttcactctcattctcttgtgagtgtacagtggaattttccagatatgtaatattggagttgattgaatgcaggagcagatatgagaatccagctgttttctattaagccagaaactaaaaagatttgcaaaaatgtaaaaaaaaaaaatcattatttttactatttattgtttgcttttggaaaaggactataatttttatttaaatcgtattctttttgttaacataagggtttattattggtattttaaattgaatcaataaatgaaattttaaaacaa

SEQ ID NO: 142729 - DNA, 243 bp, Homo sapiens
  Payload ID: 8202
  Gene Symbol: IMMP2L
  Gene Name: inner mitochondrial membrane peptidase subunit 2
  ENST ID: ENST00000437687
  CDS Start-End: 1-243
atggcacagtcacaagggtgggtgaaaagatacatcaaggccttttgtaaaggcttctttgtggcggtgcctgtggcagtgactttcttggatcgggtcgcctgtgtggcaagagtagaaggagcatcgatgcagccttctttgaatcctggggggagccagtcatctgatgtggtgcttttgaaccactggaaagtgaggaattttgaagtacaccgtggtgacattgtatcattggtgtaa

SEQ ID NO: 142730 - DNA, 833 bp, Homo sapiens
  Payload ID: 8202
  Gene Symbol: IMMP2L
  Gene Name: inner mitochondrial membrane peptidase subunit 2
  Uniprot ID: Q96T52
  ENST ID: ENST00000452895
  CDS Start-End: 120-647
cccccgggctgagctgcgcagcgggtgcggagggcgggcgcccgggttttggccaaattgggcgagggcacaaaataaccacttaccccttctcaccgaggaagagcgggagaaagggtatggcacagtcacaagggtgggtgaaaagatacatcaaggccttttgtaaaggcttctttgtggcggtgcctgtggcagtgactttcttggatcgggtcgcctgtgtggcaagagtagaaggagcatcgatgcagccttctttgaatcctggggggagccagtcatctgatgtggtgcttttgaaccactggaaagtgaggaattttgaagtacaccgtggtgacattgtatcattggtgtctcctaaaaacccagaacagaagatcattaagagagtgattgctcttgaaggagatattgtcagaaccataggacacaaaaaccggtatgtcaaagtcccccgtggtcacatctgggttgaaggtgatcatcatggacacagttttgacagtaattcttttgggccggtttccctaggacttctgcatgcccatgccacacatatcctgtggcccccagagcgctggcagaaattggaatctgttcttcctccagagcgcttaccagtacagagagaagaggaatgactgcatgaatctacctgagttgctggcattgggaggccagttactggaaaggaatggaaaaaagaagcctccaaaagggaaaaacttctgacaatatgatgctgtgcgagaaatatttacagcacattaaaacgatctgtattattaaataaataattttcaaatgttaaacagtattaaatggca

SEQ ID NO: 142731 - DNA, 761 bp, Homo sapiens
  Payload ID: 8202
  Gene Symbol: IMMP2L
  Gene Name: inner mitochondrial membrane peptidase subunit 2
  ENST ID: ENST00000450877
  CDS Start-End: 112-585
accccccagctccatggggacaaaagctactatgctctggacccttccagacctcactagatttacctcctcatctggctcttcatttgtggtacttttaatgcaccagtaatggtaggagaggacattgaagcaaggagacactttctgaacctctgttgccaaccgagaagagttagcctaagattgaagaagtgcatatctgaggtcaaggacaaggcgggcagtgctcaatgtcatcctttagaacagagggcaggaatcccatctggagagtggaggcaactgaaagagaggtctcctaaaaacccagaacagaagatcattaagagagtgattgctcttgaaggagatattgtcagaaccataggacacaaaaaccggtatgtcaaagtcccccgtggtcacatctgggttgaaggtgatcatcatggacacagttttgacagtaattcttttgggccggtttccctaggacttctgcatgcccatgccacacatatcctgtggcccccagagcgctggcagaaattggaatctgttcttcctccagagcgcttaccagtacagagagaagaggaatgactgcatgaatctacctgagttgctggcattgggaggccagttactggaaaggaatggaaaaaagaagcctccaaaagggaaaaacttctgacaatatgatgctgtgcgagaaatatttacagcacattaaaacgatctgtattattaaataaataattttcaaatgttaaacagta

SEQ ID NO: 142732 - DNA, 421 bp, Homo sapiens
  Payload ID: 8202
  Gene Symbol: IMMP2L
  Gene Name: inner mitochondrial membrane peptidase subunit 2
  ENST ID: ENST00000452753
  CDS Start-End: 185-421
ggtctgcgcggggacttcccccgggctgagctgcgcagcggggttttggccaaattgggcgagggcacaaaataaccacttaccccttctcaccgaggaagagcgggagaaaggtggcctgattcttttgagaagccttcctactccttactcccaaccctgatcaaaggaaaagccatgttgtatggcacagtcacaagggtgggtgaaaagatacatcaaggccttttgtaaaggcttctttgtggcggtgcctgtggcagtgactttcttggatcgggtcgcctgtgtggcaagagtagaaggagcatcgatgcagccttctttgaatcctggggggagccagtcatctgatgtggtgcttttgaaccactggaaagtgaggaattttgaagtacaccgtggtgacattgtatcattg

SEQ ID NO: 142733 - DNA, 6439 bp, Homo sapiens
  Payload ID: 8203
  Gene Symbol: INO80
  Gene Name: INO80 complex subunit
  Uniprot ID: Q9ULG1
  ENST ID: ENST00000361937
  CDS Start-End: 426-5096
aggcgacgagcagtgagtgtgggcggggtgggggtaagccacccgtgtagcggctcgattgttctggcctggctatggcgcctctcctcccccccgccatggctccccgtgtccctgctccgctcctctcagtgagtgaaagtggccgccgccgccgccggcccagcgcccgcagccgcctcagcgccgccgccatcttggggtcccaggagccgcggagggagcgagctaggagcgtccacgcccaacgcagtcaccgtcccacggcctcagagagcgaaccgcggctccaccgtcggcggggcgacccccccctccggaccccgcccgcaccccgccccccctccgccgccgtcgcggcggcggggccaggcggcccgagccgtgcagtcggaggtccttgtgcatgaagacagatttgttctatggcctcggagttgggtgccagggatgatggaggctgcactgagctggcaaagcccctctatcttcagtacttggagagggccctccggttggaccattttctgcgacaaacgtcagctatcttcaataggaatatttctagtgatgacagtgaagatggactggatgacagtaatccattattgccccagtctggggatcccttaatacaagttaaggaagaacctccaaattcattgcttggtgaaacttctggagcaggcagttctggaatgttaaacacatattctctgaatggagttctacagtcagaatcaaaatgtgataaggggaatttatataatttctctaagctgaagaaaagcagaaagtggctaaagagcattctgctaagtgatgaatccagcgaggctgattctcagagtgaagacgatgatgaagaagaactcaatctcagcagagaagaacttcacaacatgcttcgactacacaaatataagaaacttcaccaaaataagtatagtaaagacaaggagttgcagcaatatcagtactacagtgcaggcctgctctccacatatgaccctttctatgagcaacaacggcacctacttggacccaagaaaaagaaatttaaggaggaaaagaaacttaaagctaagttgaaaaaagtgaagaaaaaaagacgaagagatgaagaactttcctctgaagaatcccctcgtcgccatcaccaccagaccaaagtctttgccaagttttctcacgatgcacctccccctggcactaagaaaaagcacttatccattgagcagctgaatgctcgtcgcaggaaagtatggctcagcattgtgaaaaaggaactaccaaaggcaaataagcagaaagcttcagctcgtaacctgtttctcaccaatagccgaaagcttgctcaccagtgcatgaaggaggtgcgtcgagctgccttgcaggcccagaagaactgtaaggaaaccttgcctcgtgcccgccgcctcaccaaggagatgcttctgtactggaagaaatatgagaaagtagagaaggagcaccgcaagagagcagagaaggaagctttggagcagcggaagttggatgaggaaatgcgggaggccaagaggcaacagcgaaaactcaacttcttaattacccagacagagttgtatgcccatttcatgagtcgcaaacgagatatgggtcatgatggtatccaggaagaaatcctaaggaaactggaagacagttctacccagagacaaatcgatataggtggaggagtggtagttaacatcacacaggaggattatgatagtaaccattttaaagcccaggccctgaagaatgctgaaaatgcttaccatattcaccaagctcggacaaggtcatttgatgaagatgcaaaagaaagtcgagcagctgccctacgggcagcaaacaagtctggcactgggtttggggagagttatagcctggctaacccatctatccgggctggtgaggatattccacagcccacaatttttaatggcaaattgaaaggttatcaactgaaaggcatgaattggttggccaatctatatgaacagggtattaatggcattcttgctgatgaaatgggccttggtaaaacagtacagagcattgcccttctggcccatctggctgagagagagaacatttggggacctttcttaataatttcacctgcgtctacacttaacaattggcaccaggagtttactagatttgttcctaaatttaaggtgctaccatattggggaaatcctcatgatagaaaagtcatcagaaggttctggagtcagaagaccctctacactcaggatgcccccttccatgtggttattaccagctatcagctggtggtgcaggatgtaaagtatttccagcgggtcaagtggcaatacatggtactggatgaggctcaggcgctcaagagtagttccagtgttcgttggaagatcctcttacagttccagtgtcggaatcggcttttgctaaccgggaccccaattcagaacaccatggcagagctttgggctctgctgcatttcattatgccaacattatttgattcacatgaggaatttaatgaatggttttccaaggacattgagagccatgccgaaaacaaatctgctattgatgagaatcaactttctcgcttacacatgattttgaagccatttatgctgaggagaatcaagaaagatgtggaaaatgaattatctgacaagattgagattctaatgtattgccaactgaccagccgacagaagctgctatatcaggcactaaagaacaaaatttccattgaggatttattgcagtcttctatgggctctacccaacaagcacagaacaccaccagcagcctcatgaatctggtcatgcagtttaggaaggtgtgtaatcacccggagttatttgaacggcaagaaacttggtctccatttcatatttccctaaagccataccacatttcaaagtttatctaccgtcatggacagatcagggtcttcaatcattcacgagacaggtggttaagggttctttctccatttgcaccagactatatccaacggtctctctttcacagaaaaggtattaatgaagaaagctgtttctctttccttcgctttattgatatatctccagcagaaatggcaaaccttatgcttcagggacttttggccagatggttagctcttttcctgtctctgaaagcctcctacaggctccatcagctacgctcctggggagcgccagaaggggagagccaccagagatacctgaggaacaaggatttccttcttggggttaattttccactctcctttccaaacctttgcagctgccctttgttaaagtctcttgttttcagcagccactgtaaagcagtgagtggctactcagaccaggttgtccatcagcggagatcagctacctcctcgctgcgtcgctgcctgctcactgagctgccatcttttttgtgtgtggccagtccacgagttaccgcagtgccattggattcttactgcaatgaccgaagtgcagaatatgaaaggcgagttctgaaggaaggagggagtctggcagccaagcagtgtttgttgaatggggcccctgaactggctgcagactggctaaatagacgatcacagttcttcccagagccagctggaggtctgtggagcatcagacctcagaatggctggtctttcatcaggattccaggcaaggagagcctcatcactgacagtggaaagctgtatgcccttgatgtcctgctgactcggctcaagtctcaagggcatagggtccttatctactcccagatgaccaggatgatagacctactggaggaatacatggtttacaggaagcatacctacatgaggcttgatggctcatccaagatctcggagaggcgagacatggttgctgattttcagaacaggaatgacatctttgtgttcctgttaagcacacgagctggaggactgggtatcaatctcactgctgcagacacagtgattttctatgatagcgactggaaccccactgtggaccagcaggccatggacagggcccaccgcttagggcagacaaagcaggttactgtgtaccggctcatctgtaaaggcaccattgaagaacgcattctgcaaagagccaaggagaagagtgagattcagcggatggtgatttcaggtgggaacttcaaaccagataccttgaaacccaaagaggtggttagtcttcttctagacgacgaagagttggagaagaaactgaggctgcggcaggaagagaaacggcaacaggaggaaaccaaccgagtgaaagagcgcaagcggaagcgggaaaagtatgcagagaagaagaaaaaagaagatgaattggatgggaaaaggagaaaagagggtgtgaacctggtgatcccatttgttccctcggctgataactccaacctctctgctgacggagatgactccttcattagcgtggactcagccatgccaagccctttcagtgagatctccatcagcagtgagctgcacactggctccattcccctggacgagagcagcagtgacatgctggtcattgtggatgacccagcctcctcagcccctcagtctcgagctaccaactctcccgcatccataacaggctccgtctcagataccgtgaatggaatttccattcaggaaatgccagctgcaggacgtggtcactcagcccgaagccgaggccgccccaaaggttcaggaagcacagccaaaggagcagggaagggccggagccgaaagtccacggcaggcagtgctgctgcaatggcaggagccaaagccggggctgcagcggcctctgcagctgcctatgccgcatacgggtacaacgtgtctaaaggaatctccgccagcagtcctctgcagacatcccttgttcggcctgctggccttgctgactttggaccttcaagcgcctcttctcctttgagttcccctttgagcaagggaaataatgttcctgggaatcccaagaacctccacatgaccagcagcctagccccagactctctggtccggaaacagggcaaaggcaccaacccctctggaggacggtaaccatctgggccctccgacttccttcaaccaaaccagggctagagtcctgacctgccagtggtctttggatggcttgccccgtgcagcatcttgcatcctgagtcagaagtggaaatgtccagcaggggaaggacaggcaggtggatggtgtgagcacttttatcatctgtgtctcatcaggagcatctggggtgcctgtaggaggaaggccacagggcatggatcagccccactgcatctcaagtgaactgtatagccaagtcttaaacctctcacggggcaagcctgacacagaccccctttagatgctcaggcatactgtttccatcccgattccactcttcggctctgacacgtcccttgcaaagtctccgcaggtgctgtgaagagccttccatggtagagatttctcttaagagtgtgatttctcatagggctagtaagggagattgtatacctgttgtccacagtcttcaggcagctccccaggtctctgaaccccagagtgtcatcattggagagagcagtgactgcgagagatggtggaggccgctaagcatggtagaggctagaggaagtctatccacaggcagttgtgttcccagcaattcctcccatcctgcatggttcacaccaagagaaccttcagatcctaccagcaaccgtagcaccttccacccaggggactcccagaagccagtagagagaccaggagccacctcaatcagcaggacagcctcactgcccctcttgcagagtcccctttgcccatcctgaatgcacagtctccctgctcatgcccttcagtcccctgcttggctgtatgcactgtctatattgcactgagagaggaagggacagcaggagtgaggtgaagagggcggagagagggggcaggctcggcaccggccctcccagcccggccagcctgagcttgctgccctccagtagagacagaggggcagtgtttgcatgggaggtgtttctgcctgtccctgcctgatgtccctggtggagcaggtacctccgggcgggcaagcctctgatttgcacacctgaaaatcgcggaattgagtttcgatagattgatttttaaaacttttttggagtagggggtataggggaatcatttaatttaaatcattaagattcccctgctcaaacccagattcctgtgtacagatgctatttagagggaatcagaaaaatgccaagccttttctctttgaatgtgctatttttataactgaacttgtacatatgtataaagagagacacatcttccttttactaactggataaaaaaatcttaaataaaatggagtgagataattttatgtaaa

SEQ ID NO: 142734 - DNA, 5991 bp, Homo sapiens
  Payload ID: 8203
  Gene Symbol: INO80
  Gene Name: INO80 complex subunit
  Uniprot ID: Q9ULG1
  ENST ID: ENST00000401393
  CDS Start-End: 225-4895
ggtcccaggagccgcggagggagcgagctaggagcgtccacgcccaacgcagtcaccgtcccacggcctcagagagcgaaccgcggctccaccgtcggcggggcgacccccccctccggaccccgcccgcaccccgccccccctccgccgccgtcgcggcggcggggccaggcggcccgagccgtgcagtcggaggtccttgtgcatgaagacagatttgttctatggcctcggagttgggtgccagggatgatggaggctgcactgagctggcaaagcccctctatcttcagtacttggagagggccctccggttggaccattttctgcgacaaacgtcagctatcttcaataggaatatttctagtgatgacagtgaagatggactggatgacagtaatccattattgccccagtctggggatcccttaatacaagttaaggaagaacctccaaattcattgcttggtgaaacttctggagcaggcagttctggaatgttaaacacatattctctgaatggagttctacagtcagaatcaaaatgtgataaggggaatttatataatttctctaagctgaagaaaagcagaaagtggctaaagagcattctgctaagtgatgaatccagcgaggctgattctcagagtgaagacgatgatgaagaagaactcaatctcagcagagaagaacttcacaacatgcttcgactacacaaatataagaaacttcaccaaaataagtatagtaaagacaaggagttgcagcaatatcagtactacagtgcaggcctgctctccacatatgaccctttctatgagcaacaacggcacctacttggacccaagaaaaagaaatttaaggaggaaaagaaacttaaagctaagttgaaaaaagtgaagaaaaaaagacgaagagatgaagaactttcctctgaagaatcccctcgtcgccatcaccaccagaccaaagtctttgccaagttttctcacgatgcacctccccctggcactaagaaaaagcacttatccattgagcagctgaatgctcgtcgcaggaaagtatggctcagcattgtgaaaaaggaactaccaaaggcaaataagcagaaagcttcagctcgtaacctgtttctcaccaatagccgaaagcttgctcaccagtgcatgaaggaggtgcgtcgagctgccttgcaggcccagaagaactgtaaggaaaccttgcctcgtgcccgccgcctcaccaaggagatgcttctgtactggaagaaatatgagaaagtagagaaggagcaccgcaagagagcagagaaggaagctttggagcagcggaagttggatgaggaaatgcgggaggccaagaggcaacagcgaaaactcaacttcttaattacccagacagagttgtatgcccatttcatgagtcgcaaacgagatatgggtcatgatggtatccaggaagaaatcctaaggaaactggaagacagttctacccagagacaaatcgatataggtggaggagtggtagttaacatcacacaggaggattatgatagtaaccattttaaagcccaggccctgaagaatgctgaaaatgcttaccatattcaccaagctcggacaaggtcatttgatgaagatgcaaaagaaagtcgagcagctgccctacgggcagcaaacaagtctggcactgggtttggggagagttatagcctggctaacccatctatccgggctggtgaggatattccacagcccacaatttttaatggcaaattgaaaggttatcaactgaaaggcatgaattggttggccaatctatatgaacagggtattaatggcattcttgctgatgaaatgggccttggtaaaacagtacagagcattgcccttctggcccatctggctgagagagagaacatttggggacctttcttaataatttcacctgcgtctacacttaacaattggcaccaggagtttactagatttgttcctaaatttaaggtgctaccatattggggaaatcctcatgatagaaaagtcatcagaaggttctggagtcagaagaccctctacactcaggatgcccccttccatgtggttattaccagctatcagctggtggtgcaggatgtaaagtatttccagcgggtcaagtggcaatacatggtactggatgaggctcaggcgctcaagagtagttccagtgttcgttggaagatcctcttacagttccagtgtcggaatcggcttttgctaaccgggaccccaattcagaacaccatggcagagctttgggctctgctgcatttcattatgccaacattatttgattcacatgaggaatttaatgaatggttttccaaggacattgagagccatgccgaaaacaaatctgctattgatgagaatcaactttctcgcttacacatgattttgaagccatttatgctgaggagaatcaagaaagatgtggaaaatgaattatctgacaagattgagattctaatgtattgccaactgaccagccgacagaagctgctatatcaggcactaaagaacaaaatttccattgaggatttattgcagtcttctatgggctctacccaacaagcacagaacaccaccagcagcctcatgaatctggtcatgcagtttaggaaggtgtgtaatcacccggagttatttgaacggcaagaaacttggtctccatttcatatttccctaaagccataccacatttcaaagtttatctaccgtcatggacagatcagggtcttcaatcattcacgagacaggtggttaagggttctttctccatttgcaccagactatatccaacggtctctctttcacagaaaaggtattaatgaagaaagctgtttctctttccttcgctttattgatatatctccagcagaaatggcaaaccttatgcttcagggacttttggccagatggttagctcttttcctgtctctgaaagcctcctacaggctccatcagctacgctcctggggagcgccagaaggggagagccaccagagatacctgaggaacaaggatttccttcttggggttaattttccactctcctttccaaacctttgcagctgccctttgttaaagtctcttgttttcagcagccactgtaaagcagtgagtggctactcagaccaggttgtccatcagcggagatcagctacctcctcgctgcgtcgctgcctgctcactgagctgccatcttttttgtgtgtggccagtccacgagttaccgcagtgccattggattcttactgcaatgaccgaagtgcagaatatgaaaggcgagttctgaaggaaggagggagtctggcagccaagcagtgtttgttgaatggggcccctgaactggctgcagactggctaaatagacgatcacagttcttcccagagccagctggaggtctgtggagcatcagacctcagaatggctggtctttcatcaggattccaggcaaggagagcctcatcactgacagtggaaagctgtatgcccttgatgtcctgctgactcggctcaagtctcaagggcatagggtccttatctactcccagatgaccaggatgatagacctactggaggaatacatggtttacaggaagcatacctacatgaggcttgatggctcatccaagatctcggagaggcgagacatggttgctgattttcagaacaggaatgacatctttgtgttcctgttaagcacacgagctggaggactgggtatcaatctcactgctgcagacacagtgattttctatgatagcgactggaaccccactgtggaccagcaggccatggacagggcccaccgcttagggcagacaaagcaggttactgtgtaccggctcatctgtaaaggcaccattgaagaacgcattctgcaaagagccaaggagaagagtgagattcagcggatggtgatttcaggtgggaacttcaaaccagataccttgaaacccaaagaggtggttagtcttcttctagacgacgaagagttggagaagaaactgaggctgcggcaggaagagaaacggcaacaggaggaaaccaaccgagtgaaagagcgcaagcggaagcgggaaaagtatgcagagaagaagaaaaaagaagatgaattggatgggaaaaggagaaaagagggtgtgaacctggtgatcccatttgttccctcggctgataactccaacctctctgctgacggagatgactccttcattagcgtggactcagccatgccaagccctttcagtgagatctccatcagcagtgagctgcacactggctccattcccctggacgagagcagcagtgacatgctggtcattgtggatgacccagcctcctcagcccctcagtctcgagctaccaactctcccgcatccataacaggctccgtctcagataccgtgaatggaatttccattcaggaaatgccagctgcaggacgtggtcactcagcccgaagccgaggccgccccaaaggttcaggaagcacagccaaaggagcagggaagggccggagccgaaagtccacggcaggcagtgctgctgcaatggcaggagccaaagccggggctgcagcggcctctgcagctgcctatgccgcatacgggtacaacgtgtctaaaggaatctccgccagcagtcctctgcagacatcccttgttcggcctgctggccttgctgactttggaccttcaagcgcctcttctcctttgagttcccctttgagcaagggaaataatgttcctgggaatcccaagaacctccacatgaccagcagcctagccccagactctctggtccggaaacagggcaaaggcaccaacccctctggaggacggtaaccatctgggccctccgacttccttcaaccaaaccagggctagagtcctgacctgccagtggtctttggatggcttgccccgtgcagcatcttgcatcctgagtcagaagtggaaatgtccagcaggggaaggacaggcaggtggatggtgtgagcacttttatcatctgtgtctcatcaggagcatctggggtgcctgtaggaggaaggccacagggcatggatcagccccactgcatctcaagtgaactgtatagccaagtcttaaacctctcacggggcaagcctgacacagaccccctttagatgctcaggcatactgtttccatcccgattccactcttcggctctgacacgtcccttgcaaagtctccgcaggtgctgtgaagagccttccatggtagagatttctcttaagagtgtgatttctcatagggctagtaagggagattgtatacctgttgtccacagtcttcaggcagctccccaggtctctgaaccccagagtgtcatcattggagagagcagtgactgcgagagatggtggaggccgctaagcatggtagaggctagaggaagtctatccacaggcagttgtgttcccagcaattcctcccatcctgcatggttcacaccaagagaaccttcagatcctaccagcaaccgtagcaccttccacccaggggactcccagaagccagtagagagaccaggagccacctcaatcagcagtgtttgcatgggaggtgtttctgcctgtccctgcctgatgtccctggtggagcaggtacctccgggcgggcaagcctctgatttgcacacctgaaaatcgcggaattgagtttcgatagattgatttttaaaacttttttggagtagggggtataggggaatcatttaatttaaatcattaagattcccctgctcaaacccagattcctgtgtacagatgctatttagagggaatcagaaaaatgccaagccttttctctttgaatgtgctatttttataactgaacttgtacatatgtataaagagagacacatcttccttttactaactggataaaaaaatcttaaataaaatggagtgagat

SEQ ID NO: 142735 - DNA, 599 bp, Homo sapiens
  Payload ID: 8203
  Gene Symbol: INO80
  Gene Name: INO80 complex subunit
  ENST ID: ENST00000557849
  CDS Start-End: 1-82
acgagtctgcgacacacatcctacatgggagatgtttgctctgacccacgatctgctgggatactgccatgtcaagtcatagaagggagagagacccaattttcatccacctgctttgtattcctgttaccgcagtgccattggattcttactgcaatgaccgaagtgcagaatatgaaaggcgagttctgaaggaaggagggagtctggcagccaagcagtgtttgttgaatggggcccctgaactggctgcagactggctaaatagacgatcacagttcttcccagagccagctggaggtctgtggagcatcagacctcagaatggctggtctttcatcaggattccaggcaaggagagcctcatcactgacagtggaaagctgtatgcccttgatgtcctgctgactcggctcaagtctcaagggcatagggtccttatctactcccagatgaccaggatgatagacctactggaggaatacatggtttacaggaagcatacctacatgaggcttgatggctcatccaagatctcggagaggcgagacatggttgctgattttcagaacaggaatgacatctttgtgttcctgtta

SEQ ID NO: 142736 - DNA, 5503 bp, Homo sapiens
  Payload ID: 8203
  Gene Symbol: INO80
  Gene Name: INO80 complex subunit
  ENST ID: ENST00000558357
  CDS Start-End: 204-3518
agcgagctaggagcgtccacgcccaacgcagtcaccgtcccacggcctcagagagcgaaccgcggctccaccgtcggcggggcgacccccccctccggaccccgcccgcaccccgccccccctccgccgccgtcgcggcggcggggccaggcggcccgagccgtgcagtcggaggtccttgtgcatgaagacagatttgttctatggcctcggagttgggtgccagggatgatggaggctgcactgagctggcaaagcccctctatcttcagtacttggagagggccctccggttggaccattttctgcgacaaacgtcagctatcttcaataggaatatttctagtgatgacagtgaagatggactggatgacagtaatccattattgccccagtctggggatcccttaatacaagttaaggaagaacctccaaattcattgcttggtgaaacttctggagcaggcagttctggaatgttaaacacatattctctgaatggagttctacagtcagaatcaaaatgtgataaggggaatttatataatttctctaagctgaagaaaagcagaaagtggctaaagagcattctgctaagtgatgaatccagcgaggctgattctcagagtgaagacgatgatgaagaagaactcaatctcagcagagaagaacttcacaacatgcttcgactacacaaatataagaaacttcaccaaaataagtatagtaaagacaaggagttgcagcaatatcagtactacagtgcaggcctgctctccacatatgaccctttctatgagcaacaacggcacctacttggacccaagaaaaagaaatttaaggaggaaaagaaacttaaagctaagttgaaaaaagtgaagaaaaaaagacgaagagatgaagaactttcctctgaagaatcccctcgtcgccatcaccaccagaccaaagtctttgccaagttttctcacgatgcacctccccctggcactaagaaaaagcacttatccattgagcagctgaatgctcgtcgcaggaaagtatggctcagcattgtgaaaaaggaactaccaaaggcaaataagcagaaagcttcagctcgtaacctgtttctcaccaatagccgaaagcttgctcaccagtgcatgaaggaggtgcgtcgagctgccttgcaggcccagaagaactgtaaggaaaccttgcctcgtgcccgccgcctcaccaaggagatgcttctgtactggaagaaatatgagaaagtagagaaggagcaccgcaagagagcagagaaggaagctttggagcagcggaagttggatgaggaaatgcgggaggccaagaggcaacagcgaaaactcaacttcttaattacccagacagagttgtatgcccatttcatgagtcgcaaacgagatatgggtcatgatggtatccaggaagaaatcctaaggaaactggaagacagttctacccagagacaaatcgatataggtggaggagtggtagttaacatcacacaggaggattatgatagtaaccattttaaagcccaggccctgaagaatgctgaaaatgcttaccatattcaccaagctcggacaaggtcatttgatgaagatgcaaaagaaagtcgagcagctgccctacgggcagcaaacaagtctggcactgggtttggggagagttatagcctggctaacccatctatccgggctggtgaggatattccacagcccacaatttttaatggcaaattgaaaggttatcaactgaaaggcatgaattggttggccaatctatatgaacagggtattaatggcattcttgctgatgaaatgggccttggtaaaacagtacagagcattgcccttctggcccatctggctgagagagagaacatttggggacctttcttaataatttcacctgcgtctacacttaacaattggcaccaggagtttactagatttgttcctaaatttaaggtgctaccatattggggaaatcctcatgatagaaaagtcatcagaaggttctggagtcagaagaccctctacactcaggatgcccccttccatgtggttattaccagctatcagctggtggtgcaggatgtaaagtatttccagcgggtcaagtggcaatacatggtactggatgaggctcaggcgctcaagagtagttccagtgttcgttggaagatcctcttacagttccagtgtcggaatcggcttttgctaaccgggaccccaattcagaacaccatggcagagctttgggctctgctgcatttcattatgccaacattatttgattcacatgaggaatttaatgaatggttttccaaggacattgagagccatgccgaaaacaaatctgctattgatgagaatcaactttctcgcttacacatgattttgaagccatttatgctgaggagaatcaagaaagatgtggaaaatgaattatctgacaagattgagattctaatgtattgccaactgaccagccgacagaagctgctatatcaggcactaaagaacaaaatttccattgaggatttattgcagtcttctatgggctctacccaacaagcacagaacaccaccagcagcctcatgaatctggtcatgcagtttaggaaggtgtgtaatcacccggagttatttgaacggcaagaaacttggtctccatttcatatttccctaaagccataccacatttcaaagtttatctaccgtcatggacagatcagggtcttcaatcattcacgagacaggtggttaagggttctttctccatttgcaccagactatatccaacggtctctctttcacagaaaaggtattaatgaagaaagctgtttctctttccttcgctttattgatatatctccagcagaaatggcaaaccttatgcttcagggacttttggccagatggttagctcttttcctgtctctgaaagcctcctacaggctccatcagctacgctcctggggagcgccagaaggggagagccaccagagatacctgaggaacaaggatttccttcttggggttaattttccactctcctttccaaacctttgcagctgccctttgttaaagtctcttgttttcagcagccactgtaaagcagtgagtggctactcagaccaggttgtccatcagcggagatcagctacctcctcgctgcgtcgctgcctgctcactgagctgccatcttttttgtgtgtggccagtccacgagttaccgcagtgccattggattcttactgcaatgaccgaagtgcagaatatgaaaggcgagttctgaaggaaggagggagtctggcagccaagcagtgtttgttgaatggggcccctgaactggctgcagactggctaaatagacgatcacagttcttcccagagccagctggaggtctgtggagcatcagacctcagaatggctggtctttcatcaggattccaggaatacatggtttacaggaagcatacctacatgaggcttgatggctcatccaagatctcggagaggcgagacatggttgctgattttcagaacaggaatgacatctttgtgttcctgttaagcacacgagctggaggactgggtatcaatctcactgctgcagacacagtgattttctatgatagcgactggaaccccactgtggaccagcaggccatggacagggcccaccgcttagggcagacaaagcaggttactgtgtaccggctcatctgtaaaggcaccattgaagaacgcattctgcaaagagccaaggagaagagtgagattcagcggatggtgatttcaggtgggaacttcaaaccagataccttgaaacccaaagaggtggttagtcttcttctagacgacgaagagttggagaagaaactgaggctgcggcaggaagagaaacggcaacaggaggaaaccaaccgagtgaaagagcgcaagcggaagcgggaaaagtatgcagagaagaagaaaaaagaagatgaattggatgggaaaaggagaaaagagggtgtgaacctggtgatcccatttgttccctcggctgataactccaacctctctgctgacggagatgactccttcattagcgtggactcagccatgccaagccctttcagtgagatctccatcagcagtgagctgcacactggctccattcccctggacgagagcagcagtgacatgctggtcattgtggatgacccagcctcctcagcccctcagtctcgagctaccaactctcccgcatccataacaggctccgtctcagataccgtgaatggaatttccattcaggaaatgccagctgcaggacgtggtcactcagcccgaagccgaggccgccccaaaggttcaggaagcacagccaaaggagcagggaagggccggagccgaaagtccacggcaggcagtgctgctgcaatggcaggagccaaagccggggctgcagcggcctctgcagctgcctatgccgcatacgggtacaacgtgtctaaaggaatctccgccagcagtcctctgcagacatcccttgttcggcctgctggccttgctgactttggaccttcaagcgcctcttctcctttgagttcccctttgagcaagggaaataatgttcctgggaatcccaagaacctccacatgaccagcagcctagccccagactctctggtccggaaacagggcaaaggcaccaacccctctggaggacggtaaccatctgggccctccgacttccttcaaccaaaccagggctagagtcctgacctgccagtggtctttggatggcttgccccgtgcagcatcttgcatcctgagtcagaagtggaaatgtccagcaggggaaggacaggcaggtggatggtgtgagcacttttatcatctgtgtctcatcaggagcatctggggtgcctgtaggaggaaggccacagggcatggatcagccccactgcatctcaagtgaactgtatagccaagtcttaaacctctcacggggcaagcctgacacagaccccctttagatgctcaggcatactgtttccatcccgattccactcttcggctctgacacgtcccttgcaaagtctccgcaggtgctgtgaagagccttccatggtagagatttctcttaagagtgtgatttctcatagggctagtaagggagattgtatacctgttgtccacagtcttcaggcagctccccaggtctctgaaccccagagtgtcatcattggagagagcagtgactgcgagagatggtggaggccgctaagcatggtagaggctagaggaagtctatccacaggcagttgtgttcccagcaattcctcccatcctgcatggttcacaccaagagaaccttcagatcctaccagcaaccgtagcaccttccacccaggggactcccagaagccagtagagagaccaggagccacctcaatcagcaggacagcctcactgcccctcttgcaga

SEQ ID NO: 142737 - DNA, 566 bp, Homo sapiens
  Payload ID: 8203
  Gene Symbol: INO80
  Gene Name: INO80 complex subunit
  ENST ID: ENST00000559995
  CDS Start-End: 1-239
ctacacttaacaattggcaccaggagtttactagatttgttcctaaatttaaggtgctaccatattggggaaatcctcatgatagaaaagtcatcagaaggttctggagtcagtgttcgttggaagatcctcttacagttccagtgtcggaatcggcttttgctaaccgggaccccaattcagaacaccatggcagagctttgggctctgctgcatttcattatgccaacattatttgattcacatgaggaatttaatgaatggttttccaaggacattgagagccatgccgaaaacaaatctgctattgatgagaatcaactttctcgcttacacatgattttgaagccatttatgctgaggagaatcaagaaagatgtggaaaatgaattatctgacaagattgagattctaatgtattgccaactgaccagccgacagaagctgctatatcaggcactaaagaacaaaatttccattgaggatttattgcagtcttctatgggctctacccaacaagcacagaacaccaccagcagcctcatgaatctggtcatgcagtttag
